United States Patent Application Publication US 2023/0272434 A1 - sequence listing, part 11

SEQ ID NO: 17745 - protein, 949 aa, Atethmia centrago
MHTATQSGDGTLNQNYICLHCDRSFQSKRGLNIHISKKHRLCISQNGPALLDPVSLPAPVSDSPNSTPFHLYLSYLKNNVPVIKRVPRGARISVANHLSGLIKKCVESNQIVDWHNLFLFSYTTLHVKKDEATISLTQKIKNNCLTKTSSPFDSPKRGTLSRIKLIEGKIADGDLKGAARLLFTNDVLSPDTPDTLSALHSKHPPAPVIPYFFDSPTADQACLEIEGKDVIDAIISFKTGSAAGLDGISPQHLKDLTSYSVGDAGVQLICSITKLINFMFSGKINADIASLLFGANLIALTKKDGGVRPIAVGSTLRRLASKIAVRHIKSKLQSVFEPIQLGFGTKGGCEAAVHALRTYLSYDDCEIVVKIDVKNAFNSVNRDAMLTEVKNKIPELYQYLLTCYAEPSKLIYRSHELSSEVGCQQGDPLGPAIFSLAINPIIQNLKSKFNVWYLDDGTLGGDVDTVLSDLSDIKTNFENIGLELNFSKCELFIQKTSYGLDNLKSKLNFLAPNIKIVDRKSLCLLGSPIFEESFPDYITNTISKFQSHANCLLEISPHYALIILKFCLFVPKFTYVLRCSPFWKHPNLLSPIDDLVKTSLETILNIQLNEPSWLQASLPIRFGGLGIRKISSVASPAFLSSTHSTSRLIGNVLRALPTNYETAGLEDAKNAFQIACPGKEFPDNLKSQRSWDDIYCDLTYKSILSRSSGPDRARLLAVGTREAGHWLHAHPSPYTGTFLDPTSLRLATGLRLGVTVCTPHTCPCGTDVDRLGHHGLCCQKSAGRFSRHATLNDIIRRSLASINVPALLEPTGIVRDDGKRPDGVSLVPWSLGRMLVWDATCVDTLAPSHLQRTTSKAGAAAENAENLKVIKYGGLGREYNFVPFGVETLGPWGPSAHKLFAEIAKRLVDVTGDRKAGGFLAQRISIAIQRGNAASILGTMPRGPFLSLT

SEQ ID NO: 17746 - protein, 671 aa, Atethmia centrago
MFSGKINADIASLLFGANLIALTKKDGGVRPIAVGSTLRRLASKIAVRHIKSKLQSVFEPIQLGFGTKGGCEAAVHALRTYLSYDDCEIVVKIDVKNAFNSVNRDAMLTEVKNKIPELYQYLLTCYAEPSKLIYRSHELSSEVGCQQGDPVGPAIFSLAINPIIQNLKSKFNVWYLDDGTLGGDVDTVLSDLSDIKTNFENIGLELNFSKCELFIQKTSYGLDNLKSKLNFLAPNIKIVDRKSLCLLGSPIFEESFPDYITNTISKFQSHANCLLEISPHYALIILKFCLFVPKFTYVLRCSPFWKHPNLLSPIDDLVKTSLETILNIQLNEPSWLQASLPIRFGGLGIRKISSVASPAFLSSTHSTSRLIGNVLRALPTNYETAGLEDAKNAFQIACPGKEFPDNLKSQRSWDDIYCDLTYKSILSRSSGPDRARLLAVGTREAGHWLHAHPSPYTGTFLDPTSLRLATGLRLGVTVCTPHTCPCGTDVDRLGHHGLCCQKSAGRFSRHATLNDIIRRSLASINVPALLEPTGIVRDDGKRPDGVSLVPWSLGRMLVWDATCVDTLAPSHLQRTTSKAGAAAENAENLKVIKYGGLGREYNFVPFGVETLGPWGPSAHKLFAEIAKRLVDVTGDRKAGGFLAQRISIAIQRGNAASILGTMPRGPFLSLT

SEQ ID NO: 17747 - protein, 950 aa, Atethmia centrago
MHTATQSGDGTLNQNYICLHCDRSFQSKRGLNIHISKKHRLCISQNGPALNLDPVSLPAPVSDSPNSTPFHLYLSYLKNNVPVIKRVPRGARISVANHLSGLIKKCVESNQIVDWHNLFLFSYTTLHVKKDEATISLTQKIKNNCLTKTTSPFDSPKRGTLSRIKLIEGKIADGDLKGAARLLFTNDVLSPDTPDTLSALHSKHPPAPVIPYFFDSPTADQACLEIEGKDVIDAIISFKTGSAAGLDGISPQHLKDLTSYSVGDAGVQLICSITKLINFMFSGKINADIASLLFGANLIALTKKDGGVRPIAVGSTLRRLASKIAVRHIKSKLQSVFEPIQLGFGTKGGCEAAVHALRTYLSYDDCEIVVKIDVKNAFNSVNRDAMLTEVKNKIPELYQYLLTCYAEPSKLIYRSHELSSEVGCQQGDPLGPAIFSLAINPIIQNLKSKFNVWYLDDGTLGGDVDTVLSDLSDIKTNFENIGLELNFSKCELFIQKTSYGLDNLKSKLNFLAPNIKIVDRKSLCLLGSPIFEESFPDYITNTISKFQSHANCLLEISPHYALIILKFCLFVPKFTYVLRCSPFWKHPNLLSPIDDLVKTSLETILNIQLNEPSWLQASLPIRFGGLGIRKISSVASPAFLSSTHSTSRLIGNVLRALPTNYETAGLDDAKNAFQIACPGKEFPDNLKSQRSWDDIYCDLTYKSILSRSSGPDRARLLAVGTREAGLWLHAHPSPYTGTFLDPTSLRLATGLRLGVTVCTPHTCPCGTDVDRLGHHGLCCQKSAGRFSRHAPLNDIIRRSLASINVPALLEPTGIVRDDGKRPDGVSLVPWSLGRMLVWDATCVDTLAPSHLQRTTSKAGAAAENAENLKVIKYVGLGREYNFVPFGVETLGPWGPSAHKLFAEIAKRLVDVTGDRKAGGFLAQRISIAIQRGNAASILGTMPRGPFLSLT

SEQ ID NO: 17748 - protein, 565 aa, Atethmia centrago
MLTEVKNKIPELYQYLLTCYAEPSKLIYRSHELSSEVGCQQGDPLGPAIFSLAINPIIQNLKSKFNVWYLDDGTLGGDVDTVLSDLSDIKTNFENIGLELNFSKCELFIQKTSYGLDNLKSKLNFLAPNIKIVDRKSLCLLGSPIFEESFPDYITNTISKFQSHANCLLEISPHYALIILKFCLFVPKFTYVLRCSPFWKHPNLLSPIDDLVKTSLETILNIQLNEPSWLQASLPIRFGGLGIRKISSVASPAFLSSTHSTSRLIGNVLRALPTNYETAGLEDAKNAFQIACPGKEFPDNLKSQRSWDDIYCDLTYKSILSRSSGPDRARLLAVGTREAGHWLHAHPSPYTGTFLDPTSLRLATGLRLGVTVCTPHTCPCGTDVDRLGHHGLCCQKSAGRFSRHATLNDIIRRSLASINVPALLEPTGIVRDDGKRPDGVSLVPWSLGRMLVWDATCVDTLAPSHLQRTTSKAGAAAENAENLKVIKYGGLGREYNFVPFGVETLGPWGPSAHKLFAEIAKRLVDVTGDRKAGGFLAQRISIAIQRGNAASILGTMPRGPFLSLT

SEQ ID NO: 17749 - protein, 950 aa, Atethmia centrago
MHTATQSGDGTLNQNYICLHCDRSFQSKRGVNIHISKKHRLCISQNGPALNLDPVSLPAPVSDSPNSTPFHLYLSYLKNNVPVIKRVPRGARISVANHLSGLIKKCVESNQIVDWHNLFLFSYTTLHVKKDEATISLTQKIKNNCLTKTSSPFDSPKRGTLSRIKLIEGKIADGDLKGAARLLFTNDVLSPDTPDTLSALHSKHPPAPVIPYFFDSPTADQACLEIEGKDVIDAIISFKTGSAAGLDGISPQHLKDLTSYSVGDAGVQLICSITKLINFMFSGKINADIASLLFGANLIALTKKDGGVRPIAVGSTLRRLASKIAVRHIKSKLQSVFEPIQLGFGTKGGCEAAVHALRTYLSYDDCEIVVKIDVKNAFNSVNRDAMLTEVKNKIPELYQYLLTCYAEPSKLIYRSHELSSEVGCQQGDPLGPAIFSLAINPIIQNLKSKFNVWYLDDGTLGGDVDTVLSDLSDIKTNFENIGLELNFSKCELFIQKTSYGLDNLKSKLNFLAPNIKIVDRKSLCLLGSPIFEESFPDYITNTISKFQSHANCLLEISPHYALIILKFCLFVPKFTYVLRCSPFWKHPNLLSPIDDLVKTSLETILNIQLNEPSWLQASLPIRFGGLGIRKISSVTSPAFLSSTHSTSRLIGNVLRALPTNYETAGLEDAKNAFQIACPGKEFPDNLKSQRSWDDIYCDLTYKSILSRSSGPDRARLLAVGTREAGHWLHAHPSPYTGTFLDPTSLRLATGLRLGVTVCTPHTCPCGTDVDRLGHHGLCCQKSAGRFSRHATLNDIIRRSLASINVPALLEPTGIVRDDGKRPDGVSLVPWSLGRMLVWDATCVDTLAPSHLQRTTSKAGAAAENAENLKVIKYGGLGREYNFVPFGVETLGPWGPSAHKLFAEIAKRLVDVTGDRKAGGFLAQRISIAIQRGNAASILGTMPRGPFLSLT

SEQ ID NO: 17750 - protein, 950 aa, Atethmia centrago
MHTATQSGDGTLNQNYICLHCDRSFQSKRGLNIHISKKHRLCISQNGPALNLDPVSLPAPVSDSPNSTPFHLYLSYLKNNVPVIKRVPRGARISVANHLSGLIKKCVESNQIVDWHNLFLFSYTTLHVKKDEATISLTQKIKNNCLTKTTSPFDSPKRGTLSRIKLIEGKIADGDLKGAARLLFTNDVLSPDTPDTLSALHSKHPPAPVIPYFFDSPTADQACLEIEGKDVIDAIISFKTGSAAGLDGISPQHLKDLTSYSVGDAGVQLICSITKLINFMFSGKINADIASLLFGANLIALTKKDGGVRPIAVGSTLRRLASKIAVRHFKSKLQSVFEPIQLGFGTKGGCEAAVHALRTYLSYDDCEIVVKIDVKNAFNSVNRDAMLTEVKNKIPELYQYLLTCYAEPSKLIYRSHELSSEVGCQQGDPLGPAIFSLAINPIIQNLKSKFNVWYLDDGTLGGDVDTVLSDLSDIKTNFENIGLELNFSKCELFIQKTSYGLDNLKSKLNFLAPNIKIVDRKSLCLLGSPIFEESFPDYITNTISKFQSHANCLLEISPHYALIILKFCLFVPKFTYVLRCSPFWKHPNLLSPIDDLVKTSLETILNIQLNEPSWLQASLPIRFGGLGIRKISSVASPAFLSSTHSTSRLIGNVLRALPTNYETAGLDDAKNAFQIACPGKEFPDNLKSQRSWDDIYCDLTYKSILSRSSGPDRARLLAVGTREAGLWLHAHPSPYTGTFLDPTSLRLATGLRLGVTVCTPHTCPCGTDVDRLGHHGLCCQKSAGRFSRHATLNDIIRRSLASINVPALLEPTGIVRDDGKRPDGVSLVPWSLGRMLVWDATCVDTLAPSHLQRTTSKAGAAAENAENLKVIKYVGLGREYNFVPFGVETLGPWGPSAHKLFAEIAKRLVDVTGDRKAGGFLAQRISIAIQRGNAASILGTMPRGPFLSLT

SEQ ID NO: 17751 - protein, 950 aa, Atethmia centrago
MHTATQSGDGTLNQNYICLHCDRSFQSKRGLNIHISKKHRLCISQNGPALNLDPVSLPAPVSDSPNSTPFHLYLSYLKNNVPIIKRVPRDARISVANHLSGLIKKCVESNQIVDWHNLFLFSYTTLHVKKDEATISLTQKIKNNCLTKTSSPFDSPKRGTLSRIKLIEGKIADGDLKGAARLLFTNDVLSPDTPDTLSALHSKHPPAPVIPYFFDSPTADQACLEIEGKDVIDAIISFKTGSAAGLDGISPQHLKDLTSYSVGDAGVQLICSITKLINFMFSGKINADIASLLFGANLIALTKKDGGVRPIAVGSTLRRLASKIAVRHIKSKLQSVFEPIQLGFGTKGGCEAAVHALRTYLSYDDCEIVVKIDVKNAFNSVNRDAMLTEVKNKIPELYQYLLTCYAEPSKLIYRSHELSSEVGCQQGDPLGPAIFSLAINPIIQNLKSKFNVWYLDDGTLGGDVDTVLSDLSDIKTNFENIGLELNFSKCELFIQKTSYGLDNLKSKLNFLAPNIKIVDRKSLCLLGSPIFEESFPDYITNTISKFQSHANCLLEISPHYALIILKFCLFVPKFTYVLRCSPFWKHPNLLSPIDDLVKTSLETILNIQLNEPSWLQASLPIRFGGLGIRKISSVASPAFLSSTHSTSRLIGNVLRALPTNYETAGLEDAKNAFQIACPGKEFPDNLKSQRSWDDIYCDLTYKSILSRSSGPDRARLLAVGTREAGHWLHAHPSPYTGTFLDPTSLRLATGLRLGVTVCTPHTCPCGTDVDRLGHHGLCCQKSAGRFSRHATLNDIIRRSLASINVPALLEPTGIVRDDGKRPDGVSLVPWSLGRMLVWDATCVDTLAPSHLQRTTSKAGAAAENAENLKVIKYGGLGREYNFVPFGVETLGPWGPSAHKLFAEIAKRLVDVTGDRKAGGFLAQRISIAIQRGNAASILGTMPRGPFLSLT

SEQ ID NO: 17752 - protein, 950 aa, Atethmia centrago
MHTATQSGDGTLNQNYICLHCDRSFQSKRGLNIHISKKHRLCISQNGPALNLDPVSLPAPVSDSPNSTPFHLYLSYLKNNVPVIKRVPRGARISVANHLSGLIKKCVESNQIVDWHNLFLFSYTTLHVKKDEATISLTQKIKNNCLTKTSSPFDSPKRGTLSRIKLIEGKIADGDLKGAARLLFTNDVLSPDTPDTLSALHSKHPPAPVIPYFFDSPTADQACLEIEGKDVIDAIISFKTGSAAGLDGISSQHLKDLTSYSVGDAGVQLICSITKLINFMFSGKINADIASLLFGANLIALTKKDGGVRPIAVGSTLRRLASKIAVRHIKSKLQSVFEPIQLGFGTKGGCEAAVHALRTYLSYDDCEIVVKIDVKNAFNSVNRDAMLTEVKNKIPELYQYLLTCYAEPSKLIYRSHELSSEVGCQQGDPLGPAIFSLAINPIIQNLKSKFNVWYLDDGTLGGDVDTVLSDLSDIKTNFENIGLELNFSKCELFIQKTSYGLDNLKSKLNFLAPNIKIVDRKSLCLLGSPIFEESFPDYITNTISKFQSHANCLLEISPHYALIILKFCLFVPKFTYVLRCSPFWKHPNLLSPIDDLVKTSLETILNIQLNEPSWLQASLPIRFGGLGIRKISSVASPAFLSSTHSTSRLIGNVLRALPTNYETAGLEDAKNAFQIACPGKEFPDNLKSQRSWDDIYCDLTYKSILSRSSGPDRARLLAVGTREAGHWLHAHPSPYTGTFLDPTSLRLATGLRLGVTVCTPHTCPCGTDVDRLGHHGLCCQKSAGRFSRHATLNDIIRRSLASINVPALLEPTGIVRDDGKRPDGVSLVPWSLGRMLVWDATCVDTLAPSHLQRTTSKAGAAAENAENLKVIKYGGLGREYNFVPFGVETLGPWGPSAHKLFAEIAKRLVDVTGDRKAGGFLAQRISIAIQRGNAASILGTMPRGPFLSLT

SEQ ID NO: 17753 - protein, 950 aa, Atethmia centrago
MHTATQSGDGTLNQNYICLHCDRSFQSKRGLNIHISKNHRLCISQNGPALNLDPVSLPAPVSDSPNSTPFHLYLSYLKNNVPVIKRVPRGARISVANHLSGLIKKCVESNQIVDWHNLFLFSYTTLHVKKDEATISLTQKIKNNCLTKTSSPFDSPKRGTLSRIKLIEGKIADGDLKGAARLLFTNDVLSPDTPDTLSALHSKHPPAPVIPYFFDSPTADQACLEIEGKDVIDAIISFKTGSAAGLDGISPQHLKDLTSYSVGDAGVQLICSITKLINFMFSGKINADIASLLFGANLIALTKKDGGVRPIAVGSTLRRLASKIAVRHIKSKLQSVFEPIQLGFGTKGGCEAAVHALRTYLSYDDCEIVVKIDVKNAFNSVNRDAMLTEVKNKIPELYQYLLTCYAEPSKLIYRSHELSSEVGCQQGDPLGPAIFSLAINPIIQNLKSKFNVWYLDDGTLGGDVDTVLSDLSDIKTNFENIGLELNFSKCELFIQKTSYGLDNLKSKLNFLAPNIKIVDRKSLCLLGSPIFEESFPDYITNTISKFQSHANCLLEISPHYALIILKFCLFVPKFTYVLRCSPFWKHPNLLSPIDDLVKTSLETILNIQLNEPSWLQASLPIRFGGLGIRKISSVASPAFLSSTHSTSRLIGNVLRALPTNYETAGLEDAKNAFQIACPGKEFPDNLKSQRSWDDIYCDLTYKSILSRSSGPDRARLLAVGTREAGHWLHAHPSPYTGTFLDPTSLRLATGLRLGVTVCTPHTCPCGTDVDRLGHHGLCCQKSAGRFSRHATLNDIIRRSLASINVPALLEPTGIVRDDGKRPDGVSLVPWSLGRMLVWDATCVDTLAPSHLQRTTSKAGAAAENAENLKVIKYGGLGREYNFVPFGVETLGPWGPSAHKLFAEIAKRLVDVTGDRKAGGFLAQRISIAIQRGNAASILGTMPRGPFLSLT

SEQ ID NO: 17754 - protein, 950 aa, Atethmia centrago
MHTATQSGDSTLNQNYICLHCDRSFQSKRGLNIHISKKHRLCISQNGPALNLDPVSLPAPVSDSPNSTPFHLYLSYLKNNVPVIKRVPRGARISVANHLSGLIKKCVESNQIVDWHNLFLFSYTTLHVKKDEATISLTQKIKNNCLTKTSSPFDSPKRGTLSRIKLIEGKIADGDLKGAARLLFTNDVLSPDTPDTLSALHSKHTPAPVIPYFFDSPTADQACLEIEGKDVIDAIISFKTGSAAGLDGISPQHLKDLTSYSVGDAGVQLICSITKLINFIFSGKINADIASLLFGANLIALTKKDGGVRPIAVGSTLRRLASKIAVRHIKSKLQSVFEPIQLGFGTKGGCEAAVHALRTYLSYDDCEIVVKIDVKNAFNSVNRDAMLTEVKNKIPEVYQYLLTCYAEPSKLIYRSHELSSEVGCQQGDPLGPAIFSLAINPIIQNLKSKFNVWYLDDGTLGGDVDTVLSDLSDIKTNFENIGLELNFSKCELFIQKTSYGLDNLKSKLNFLAPNIKIVDRKSLCLLGSPIFEESFPDYITNTISKFQSHANCLLEISPHYALIILKFCLFVPKFTYVLRCSPFWKHQNLLSPIDDLVKTSLETILNIQLNEPSWLQASLPIRFGGLGIRKISSVASPAFLSSTHSTSRLIGNVLRALPTNYETAGLEDAKNAFQIACPGKEFPDNLKSQRSWDDIYCDLTYKSILSRSSGPDRARLLAVGTREAGHWLHAHPSPYTGTFLDPTSLRLATGLRLGVTVCTPHTCPCGTDVDRLGHHGLCCQKSAGRFSRHATLNDIIRRSLASINVPALLEPTGIVRDDGKRPDGVSLVPWSLGRMLVWDATCVDTLAPSHLQRTTSTAGAAAENAENLKVIKYGGLGREYNFVPFGVETLGPWGPSAHKLFAEIAKRLVDVTGDRKAGGFLAQRISIAIQRGNAASILGTMPRGPFLSLT

SEQ ID NO: 17755 - protein, 947 aa, Atethmia centrago
MTVNKINYLKNKKPDCKNTTEKGKTSIIIYTYNFGNNLCISQNGPALNLDPVSLPAPVSDSPNSTPFHLYLSYLKNNVPVIKRVPRGARISVANHLSGLIKKCVESNQIVDWHNLFLFSYTTLHVKKDEATISLTQKIKNNCLTKTSSPFDSPKRGTLSRIKLIEGKIADGDLKDAARLLFTNDVLSPDTPDTLSALHSKHPPAPVIPYFFDSPTADQACLEIEGKDVIDAIISFKTGSAAGLDGISPQHLKDLTSYSVGDAGVQLICSITKLINFMFSGKINADIASLLFGANLIALTKKDGGVRPIAVGSTLRRLASKIAVRHIKSKLQSVFEPIQLGFGTKGGCEAAVHALRTYLSYDDCEIVVKIDVKNAFNSVNRDAMLTEVKNKIPELYQYLLTCYAEPSKLIYRSHELSSEVGCQQGDPLGPAIFSLAINPIIQNLKSKFNVWYLDDGTLGGDVDTVLSDLSDIKTNFENIGLELNFSKCELFIQKTSYGLDNLKSKLNFLAPNIKIVDRKSLCLLGSPIFEESFPDYITNTISKFQSHANCLLEISPHYALIILKFCLFVPKFTYVLRCSPFWKHPNLLSPIDDLVKTSLETILNIQLNEPSWLQASLPIRFGGLGIRKISSVASPAFLSSTHSTSRLIGNVLRALPTNYETAGLEDAKNAFQIACPGKEFPDNLKSQRSWDDIYCDLTYKSILSRSSGPDRARLLAVGTREAGHWLHAHPSPYTGTFLDPTSLRLATGLRLGVTVCTPHTCPCGTDVDRLGHHGLCCQKSAGRFSRHATLNDIIRRSLASINVPALLEPTGIVRVDGKRPDGVSLVPWSLGRMLVWDATCVDTLAPSHLQRTTSKAGAAAENAENLKVIKYGGLGREYNFVPFGVETLGPWGPSAHKLFAEIAKRLVDVTGDRKAGGFLAQRISIAIQRGNAASILGTMPRGPFLSLT

SEQ ID NO: 17756 - protein, 950 aa, Atethmia centrago
MHTATQSGDGTLNQNYTCLHCDRSFQSKRGLNIHISKKHRLCISQNGPALNLDPVSLPAPVSDSPNSTPFHLYLSYLKNNVPVIKRVPRGARISVANHLSGLIKKCVESNQIVDWHNLFLFSYTTLHVKKDEATISLTQKIKNNCLTKTSSPFDSPKRGTLSRIKLIEGKIADGDLKGAARLLFTNDVLSPDTPDTLSALHSKHPPAPVIPYFFDSPTADQACLEIEGKDVIDAIISFKTGSAAGLDGISPQHLKDLTSYSVGDAGVQLICSITKLINFMFSGKINADIASLLFGANLIALTKKDGGVRPIAVGSTLRRLASKIAVRHIKSKLQSVFEPIQLGFGTKGGCEAAVHALRTYLSYDDCEIVVKIDVKNAFNSVNRDAMLTEVKNKIPELYQYLLTCYAEPSKLIYRSHELSSEVGCQQGDPLGPAIFSLAINPIIQNLKSKFNVWYLDDGTLGGDVDTVLSDLSDIKTNFENIGLELNFSKCELFIQKNSYGLDNLKSKLNFLAPNIKIVDRKSLCLLGSPIFEESFPDYITNTISKFQSHANCLLEISPHYALIILKFCLFVPKFTYVLRCSPFWKHPNLLSPIDDLVKTSLETILNIQLNEPSWLQASLPIRFGGLGIRQISSVASPAFLSSTHSTSRLIGNVLRALPTNYETAGLEDAKNAFQIACPGKEFPDNLKSQRSWDDIYCDLTYKSILSRSSGPDRARLLAVGTREAGHWLHAHPSPYTGTFLDPTSLRLATGLRLGVTVCTPHTCPCGTDVDRLGHHGLCCQKSAGRFSRHATLNDIIRRSLASINVPALLEPTGIVRDDGKRPDGVSLVPWSLGRMLVWDATCVDTLAPSHLQRTTSKAGAAAENAENLKVIKYGGLGREYNFVPFGVETLGPWGPSAHKLFAEIAKRLVDVTGDRKAGGFLAQRISIAIQRGNAASILGTMPRGPFLSLT

SEQ ID NO: 17757 - protein, 950 aa, Atethmia centrago
MHTATQSGDGTLNQNYICLHCDRSFQSKRGLNIHISKKHRLCISQNGPALNLDPVSLPAPVSDSPNSTPFHLYLSYLKNNVPVIKRVPRGTRISVANHLSGLIKKCVESNQIVDWHNLFLFSYTTLHVKKDEATISLTQKIKNNCLTKTSSPFDSPKRGTLSRIKLIEGKIADGDLKGAARLLFTNDVLSPDTPDTLSALHSKHPPAPVIPYFFDSPTADQACLEIEGKDVIDAIISFKTGSAAGLDGISPQHLKDLTSYSVGDAGVQLICSITKLINFMFSGKINADIASLLFGANLIALTKKDGGVRPIAVGSTLRRLASKIAVRHIKSKLQSVFEPIQLGFGTKGGCEAAVHALRTYLSYDDCEIVVKIDVKNAFNSVNRDAMLTEVKNKIPELYQYLLTCYAEPSKLIYRSHELSSEVGCQQGDPLGPAIFSLAINPIIQNLKSKFNVWYLDDGTLGGDVDTVLSDLSDIKTNFENIGLELNFSKCELFIQKTSYGLDNLKSKLNFLAPNIKIVDRKSLCLLGSPIFEESFPDYITNTISKFQSHANCLLEISPHYALIILKFCLFVPKFTYVLRCSPFWKHPNLLSPIDDLVKTSLETILNIQLNEPSWLQASLPIRFGGLGIRKISSVASPAFLSSTHSTSRLIGNVLRALPTNYETAGLEDAKNAFQIACPGKEFPDNLKSQRSWDDIYCDLTYKSILSRSSGPDRARLLAVGTREAGHWLHAHPSPYTGTFLDPTSLRLATGLRLGVTVCTPHTCPCGTDVDRLGHHGLCCQKSAGRFSRHATLNDIIRRSLASINVPALLEPTGIVRDDGKRPDGVSLVPWSLGRMLVWDATCVDTLAPSHLQRTTSKAGAAAENAENLKVIKYGGLGREYNFVPFGVETLGPWGPSAHKLFAEIAKRLVDVTGDRKAGGFLAQRISIAIQRGNAASILGTMPRGPFLSLT

SEQ ID NO: 17758 - protein, 950 aa, Atethmia centrago
MHTATQSGDGTLNQNYICLHCDRSFQSKRGLNIHISKKHRLCISQNGPALNLDPVSLPAPVSDSPNSTPFHLYLSYLKNNVPVIKRVPRGARISVANHLSGLIKKCVESNQIVDWHNLFLFSYTTLHVKKDEATISLTQKIKNNCLTKTSSPFDSPKRGTLSRIKLIEGKIADGDLKGAARLLFTNDVLSPDTPDTLSALHSKHPPAPVIPYFFDSPTADQACLEIEGKDVIDAIISFKTGSAAGLDGISPQHLKDLTSYSVGDAGVQLICSITKLINFMFSGKINADIASLLFGANLIALTKKDGGVRPIAVGSTLRRLASKIAVRHIKSKLQSVFEPIQLGFGTKGGCEAAVHALRTYLSYDDCEIVVKIDVKNAFNSVNRDAMLTEVKNKIPELYQYLLTCYAEPSKLIYRSHELSSEVGCQQGDPLGPAIFSLAINPIIQNLKSKFNVWYLDDGTLGGDVDTVLSDLSDIKTNFENIGLELNFSKCELFIQKTSYGLDNLKSKLNFLAPNIKIVDRKSLCLLGSPIFEESFPDYITNTISKFQSHANCLLEISPHYALIILKFCLFVPKFTYVLRCSPFWKHPNLLSPIDDLVKTSLETILNIQLNEPSWLQASLPIRFGGLGIRKISSVASPAFLSSTHSTSRLIGNVLRALPTNYETAGLEDAKNAFQIACPGKEFPDNLKSQRSWDDIYCDLTYKSILSRSSGPDRARLLAVGTREAGHWLHAHPSPYTGTFLDPTSLRLATGLRLGVTVCTPHTCPCGTDVDRLGHHGLCCQKSAGRFSRHATLNDIIRRSLASINVPALLEPTGIVRDDGKRPDGVSLVPWSLGRMLVWDATCVDTLAPSHLQRTTSKAGAAAENAENLKVIKYGGLGREYNFVPFGVETLGPWGPSAHKLFAEIAKRLVDVTGDRKAGGFLAQRISIAIQRGNAGSILGTMPRGPFLSLT

SEQ ID NO: 17759 - protein, 950 aa, Atethmia centrago
MHTATQSGDGTLNQNYICLHCDRSFQSKRGLNIHISKKHRLCISQNGPALNLDPVSLPAPVSDSPNSTPFHLYLSYLKNNVPVIKRVPRGARISVANHLSGLIKKCVESNQIVDWHNLFLFSYTTLHVKKDEATISLTQKIKNNCLTKTTSPFDSPKRGTLSRIKLIEGKIADGDLKGAARLLFTNDVLSPDTPDTLSALHSKHPPAPVIPYFFDSPTADQACLEIEGKDVIDAIISFKTGSAAGLDGISPQHLKDLTSYSVGDAGVQLICSITKLINFMFSGKINADIASLLFGANLIALTKKDGGVRPIAVGSTLRRLASKIAVRHIKSKLQSVFEPIQLGFGTKGGCEAAVHALRTYLSYDDCEIVVKIDVKNAFNSVNRDAMLTEVKNKIPELYQYLLTCYAEPSKLIYRSHELSSEVGCQQGDPIGPAIFSLAINPIIQNLKSKFNVWYLDDGTLGGDVDTVLSDLSDIKTNFENIGLELNFSKCELFIQKTSYGLDNLKSKLNFLAPNIKIVDRKSLCLLGSPIFEESFPDYITNTISKFQSHANCLLEISPHYALIILKFCLFVPKFTYVLRCSPFWKHPNLLSPIDDLVKTSLETILNIQLNEPSWLQASLPIRFGGLGIRKISSVASPAFLSSTHSTSRLIGNVLRALPTNYETAGLDDAKNAFQIACPGKEFPDNLKSQRSWDDIYCDLTYKSILSRSSGPDRARLLAVGTREAGLWLHAHPSPYTGTFLDPTSLRLATGLRLGVTVCTPHTCPCGTDVDRLGHHGLCCQKSAGRFSRHATLNDIIRRSLASINVPALLEPTGIVRDDGKRPDGVSLVPWSLGRMLVWDATCVDTLAPSHLQRTTSKAGAAAENAENLKVIKYVGLGREYNFVPFGVETLGPWGPSAHKLFAEIAKRLVDVTGDRKAGGFLAQRISIAIQRGNAASILGTMPRGPFLSLT

SEQ ID NO: 17760 - protein, 950 aa, Atethmia centrago
MHTATQSGDGTLNQNYICLHCDRSFQSKRGLNIHISKKHRLCISQNGPALNLDPVSLPAPVSDSPNSTPFHLYLSYLKNNVPVIKRVPRGARISVANHLSGLIKKCVESNQIVDWHNLFLFSYTTLHVKKDEATISLTQKIKNNCLTKTSSPFDSPKRGTLSRIKLIEGKIADGDLKGAARLLFTNDVLSPDTPDTLSALHSKHPPAPVIPYFFDSPTADQACLEIEGKDVIDAIISFKTGSAAGLDGISPQHLKDLTSYSVGDAGVQLICSITKLINFMFSGKINADIASLLFGANLIALTKKDGGVRPIAVGSTLRRLASKIAVRHIKSKLQSVFEPIQLGFGTKGGCEAAVHALRTYLSYDDCEIVVKIDVKNAFNSVNRDAMLTEVKNKIPELYQYLLTCYAEPSKLIYRSHELSSEVGCQQGDPLGPAIFSLAINPIIQNLKSKFNVWYLDDGTLGGDVDTVLSDLSDIKTNFENIGLELNFSKCELFIQKTSYGLDNLKSKLNFLAPNIKIVDRKSLCLLGSPIFEESFPDYITNTISKFQSHANCLLEISPHYALIILKFCLFVPKFTYVLRCSPFWKHPNLLSPIDDLVKTSLETILNIQLNEPSWLQASLPIRFGGLGIRKISSVASPAFLSSTHSTSRLIGNVLRALPTNYETAGLEDAKNAFQIACPGKEFPDNLKSQRSWDDIYCDLTYKSILSRSSGPDRARLLAVGTREAGHWLHAHPSPYTGTFLDPTSLRLATGLRLGVTVCTPHTCPCGTDVDRLGHHGLCCQKSAGRFSRHATLNDIIRRSLASINVPALLEPTGIVRDDGKRPDGVSLVPWSLGRMLVWDATCVDTLAPSHLQRTTSKAGAAAENAENLKVIKYGGLGREYNFVPFGVETLGPWGPSAHKLFAEIAKRLVDVTGDRKAGGFLAQRMSIAIQRGNAASILGTMPRGPFLSLT

SEQ ID NO: 17761 - protein, 950 aa, Atethmia centrago
MHTATQSGDGTLNQNYICLHCDRSFQSKRGLNIHISKKHRLCISQNGPALNLDPVSLPAPVSDSPNSTPFHLYLSYLKNNVPVIKRVPRGARISVANHLSGLIKKCVESNQIVDWHNLFLFSYTTLHVKKDEATISLTQKIKNNCLTKTTSPFDSPKRGTLSRIKLIEGKIADGDLKGAARLLFTNDVLSPDTPDTLSALHSKHPPAPVITYFFDSPTADQACLEIEGKDVIDAIISFKTGSAAGLDGISPQHLKDLTSYSVGDAGVQLICSITKLINFMFSGKINADIASLLFGANLIALTKKDGGVRPIAVGSTLRRLASKIAVRHIKSKLQSVFEPIQLGFGTKGGCEAAVHALRTYLSYDDCEIVVKIDVKNAFNSVNRDAMLTEVKNKIPELYQYLLTCYAEPSKLIYRSHELSSEVGCQQGDPLGPAIFSLAINPIIQNLKSKFNVWYLDDGTLGGDVDTVLSDLSDIKTNFENIGLELNFSKCELFIQKTSYGLDNLKSKLNFLAPNIKIVDRKSLCLLGSPIFEESFPDYITNTISKFQSHANCLLEISPHYALIILKFCLFVPKFTYVLRCSPFWKHPNLLSPIDDLVKTSLETILNIQLNEPSWLQASLPIRFGGLGIRKISSVASPAFLSSTHSTSRLIGNVLRALPTNYETAGLDDAKNAFQIACPGKEFPDNLKSQRSWDDIYCDLTYKSILSRSSGPDRARLLAVGTREAGLWLHAHPSPYTGTFLDPTSLRLATGLRLGVTVCTPHTCPCGTDVDRLGHHGLCCQKSAGRFSRHATLNDIIRRSLASINVPALLEPTGIVRDDGKRPDGVSLVPWSLGRMLVWDATCVDTLAPSHLQRTTSKAGAAAENAENLKVIKYVGLGREYNFVPFGVETLGPWGPSAHKLFAEIAKRLVDVTGDRKAGGFLAQRISIAIQRGNAASILGTMPRGPFLSLT

SEQ ID NO: 17762 - protein, 942 aa, Atethmia centrago
MHTATQSGDGTLNQNYICLHCDRSFQSKRGLNIHISKKHRLCISQNGPALNLDPVSLPAPVSDSPNSTPFHLYLSYLKNNVPVIKRVPRGARISVANHLSGLIKKCVESNQIVDWHNLFLFSYTTLHVKKDEATISLTQKIKNNCLTKTSSPFDSPKRGTLSRIKLIEGKIARLLFTNDVLSPDTPDTLSALHSKHPPAPVIPYFFDSPTADQACLEIEGKDVIDAIISFKTGSAAGLDGISPQHLKDLTSYSVGDAGVQLICSITKLINFMFSGKINADIASLLFGANLIALTKKDGGVRPIAVGSTLRRLASKIAVRHIKSKLQSVFEPIQLGFGTKGGCEAAVHALRTYLSYDDCEIVVKIDVKNAFNSVNRDAMLTEVKNKIPELYQYLLTCYAEPSKLIYRSHELSSEVGCQQGDPLGPAIFSLAINPIIQNLKSKFNVWYLDDGTLGGDVDTVLSDLSDIKTNFENIGLELNFSKCELFIQKTSYGLDNLKSKLNFLAPNIKIVDRKSLCLLGSPIFEESFPDYITNTISKFQSHANCLLEISPHYALIILKFCLFVPKFTYVLRCSPFWKHPNLLSPIDDLVKTSLETILNIQLNEPSWLQASLPIRFGGLGIRKISSVASPAFLSSTHSTSRLIGNVLRALPTNYETAGLEDAKNAFQIACPGKEFPDNLKSQRSWDDIYCDLTYKSILSRSSGPDRARLLAVGTREAAHWLHAHPSPYTGTFLDPTSLRLATGLRLGVTVCTPHTCPCGTDVDRLGHHGLCCQKSAGRFSRHATLNDIIRRSLASINVPALLEPTGIVRDDGKRPDGVSLVPWSLGRMLVWDATCVDTLAPSHLQRTTSKAGAAAENAENLKVIKYGGLGREYNFVPFGVETLGPWGPSARKLFAEIVKRLVDVTGDRKAGGFLAQRISIAIQRGNAASILGTMPRGPFLSLT

SEQ ID NO: 17763 - protein, 942 aa, Atethmia centrago
MHTATQSGDGTLNQNYICLHCDRSFQSKRGLNIHILKKHRLCISQNGPALNLDPVSLPAPVSDSPNSTPFHLYLSYLKNNVPVIKRVPRGARISVANHFSGLIKKCVESNQIVDWHNLFLFSYTILHVKKDEATISLTQKIKNNCLTKTSSPFDSPKRGTLSRIKLIEGKIADGDLKGAARLLFTNDVLSPDTPDTLSALHSKHPPAPVIPYFFDSPTADQACLEIEGKDVIYAIISFKTGSAAGLDGISPQHLKDLTSYSVGDAGVQLICSITKLINFMFSGKINADIASLLFGANLIALTKKDGGVRPIAVGSTLRRLASKIAVRHIKSKLQSVFEPIQLGFGTKGGCEAAVHALRTYLSYDDCEIVVKIDVKNAFNSVNRDAMLTEVKNKIPELYQYLLTCYAEPSKLIYRSHELSSEVGCQQGDPLGPAIFSLAINPIIQNLKSKFNVWYLDDGTLGGDVDTVLSDLSDIKTHFESIGLELNFSKCELFIQKTSYGLDNLKSKLNFLAPNIKIVDRKSLCLLGSPIFEESFPDYITNTISKFQSHANCLLEISPHYALIILKFCLFVPKFTYVLRCSPFWKHPNLLSPIDDLVKTSLETILNIQLNEPSWLQASLPIRFGGLGIRKISSVASPAFLSSTHSTSRLIGNVLRALPTNYETAGLEDAKNAFQIACPGKEFPDNLKSQRSWDDIYCDLTYKSILSRSSGPDRARLLAVGTREAGHWLHAHPSPYTGTFLDPTSLRLATGLRLGVTVCTPHTCPCGTDVDRLGHHGLCCQKSAGRFSRHATLNDIIRRSLASINVPALLEPTGIVRDDGKRPDGVSLVPWSLGRMLVWDATCVDTLAPSHLQRTTSKAGAAAENAENLKVIKYGGLGREYNFVPFGVETLGPWGPSAHKLFVEIAKRLVDVTGDRKAGGFLAQRISIAIQRGNAASILGTMP

SEQ ID NO: 17764 - protein, 950 aa, Atethmia centrago
MHTATQSGDGTLNQNYICLHCDRSFQSKRGLNIHISKKHRLCISQNGPALNLDPVSLPAPVSDSPNSTPFHLYLSYLKNNVPVIKRVPRGARISVANHLSGLIKKCVESNQIVDWHNLFLFSYTTLHVKKDEATISLTQKIKNNCLTKTSSPFDSPKRGTLSRIKLIEGKIADGDLKGAARLLFTNEVLSPDTPDTLSALHSKHPPAPVIPYFFDSPTADQACLEIEGKDVIDAIISFKTGSAAGLDGISPQHLKDLTSYSVGDAGVQLICSITKLINFMFSGKINADIASLLFGANLIALTKKDGGVRPIAVGSTLRRLASKIAVRHIKSKLQSVFEPIQLGFGTKGGCEAAVHALRTYLSYDDCEIVVKIDVKNAFNSVNRDAMLTEVKNKIPELYQYLLTCYAEPSKLIYRSHELSSEVGCQQGDPLGPAIFSLAINPIIQNLKSKFNVWYLDDGTLGGDVDTVLSDLSDIKTNFENIGLELNFSKCELFIQKTSYGLDNLKSKLNFLAPNIKIVDRKSLCLLGSPIFEESFPDYITNTISKFQSHANCLLEISPHYALIILKFCLFVPKFTYVLRCSPFWKHPNLLSPIDDLVKTSLETILNIQLNEPSWLQASLPIRFGGLGIRKISSVASPAFLSSTHSTSRLIGNVLRALPTNYETAGLEDAKNAFQIACPGKEFPDNLKSQRSWDDIYCDLTYKSILSRSSGPDRARLLAVGTREAGHWLHAHPSPYTGTFLDPTSLRLATGLRLGVTVCTPHTCPCGTDVDRLGHHGLCCQKSAGRFSRHATLNDIIRRSLASINVPALLEPTGIVRDDGKRPDGVSLVPWSLGRMLVWDATCVNTLAPSHLQRTTSKADAAAENAENLKVIKYGGLGREYNFVPFGVETLGPWGPSAHKLFAEIAKRLVDVTGDRKAGGFLAQRISIAIQRGNAASILGTMPRGPFLSLT

SEQ ID NO: 17765 - protein, 948 aa, Atethmia centrago
MHTATQSGDGTLNQNYICLHCDRSFQSKRGLNIHISKKHRLCISQNGPALNLDPVSLPVSDSPNSTPFHLYLSYLKNNVPVIKRVPRGARISVANHLSGLIKKCVESNQIVDWHNLFLFSYTTLHVKKDEATISLTQKIKNNCLTKTSSPFDSPKRGTLSRIKLIEGKIADGDLKGAARLLFTNDVLSPDTPDTLSALHSKHPPAPVIPYFFDSPTADQACLEIEGKDVIDAIISFKTGSAAGLDGISPQHLKDLTSYSVGDAGVQLICSITKLINFMFSGKINADIASLLFGANLIALTKKDGGVRPIAVGSTLRRLASKIAVRHIKSKLQSVFEPIQLGFGTKGGCEAAVHALRTYLSYDDCEIVVKIDVKNAFNSVNRDAMLTEVKNKIPELYQYLLTCYAEPSKLIYRSHELSSEVGCQQGDPLGPAIFSLAINPIIQNLKSKFNVWYLDDGTLGGDVDTVLSDLSDIKTNFENIGLELNFSKCELFIQKTSYGLDNLKSKLNFLAPNIKIVDRKSLCLLGSPIFEESFPDYITNTISKFQSHANCLLEISPHYALIILKFCLFVPKFTYVLRCSPFWKHPNLLSPIDDLVKTSLETILNIQLNEPSWLQASLPIRFGGLGIRKISSVASPAFLSSTHSTSRLIGNVLRALPTNYETAGLEDAKNAFQIACPGKEFPDNLKSQRSWDDIYCDLTYKSILSRSSGPDRARLLAVGTREAGHWLHAHPSPYTGTFLDPTSLRLATGLRLGVTVCTPHTCPCGTDVDRLGHHGLCCQKSAGRFSRHATLNDIIRRSLASINVPALLEPTGIVRDDGKRPDGVSLVPWSLGRMLVWDATCVDTLAPSHLQRTTSKAGAAAENAENLKVIKYGGLGREYNFVPFGVETLGPWGPSAHKLFAEIAKRLVDVTGDRKAGGFLAQRISIAIQRGNAASILGTMPRGPFLSLT

SEQ ID NO: 17766 - protein, 950 aa, Atethmia centrago
MHTATQSGDGTLNQNYICLHCDRSFQSKRGLNIHISKKHRLCISQNGPALNLDPVSLPAPVSDSPNSTPFHLYLSYLKNNVPVIKRVPRGARISVANHLSGLIKKCVESNQIVDWHNLFLFSYTTLHVKKDEATISLTQKIKNNCLTKTTSPFDSPKRGTLSRIKLIEGKIADGDLKGAARLLFTNDVLSPDTPDTLSALHSKHPPAPVIPYFFDSPTADQACLEIEGKDVIDAIISFKTGSAAGLDGISPQHLKDLTSYSVGDAGVQLICSITKLINFMFSGKINADIASLLFGANLIALTKKDGGVRPIAVGSTLRRLTSKIAVRHIKSNLQSVFEPIQLGFGTKGGCEAAVHALRTYLSYDDCEIIVKIDVKNAFNSVNRDAMLTEVKNKIPELYQYLLTCYAEPSKLIYRSHELSSEVGCQQGDPLGPAIFSLAINPIIQNLKSKFNVWYLDDGTLGGDVDTVLSDLSDIKTNFENIGLELNFSKCELFIQKTSYGLDNLKSKLNFLAPNIKIVDRKSLCLLGSPIFEESFPDYITNTISKFQSHANCLLEISPHYALIILKFCLFVPKFTYVLRCSPFWKHPNLLSPIDDLVKTSLETILNIQLNEPSWLQASLPIRFGGLGIRKISSVASPAFLSSTHSTSRLIGNVLRALPTNYETAGLDDAKNAFQIACPGKEFPDNLKSQRSWDDIYCDLTYKSILSRSSGPDRARLLAVGTREAGLWLHAHPSPYTGTFLDPTSLRLATGLRLGVTVCTPHTCPCGTDVDRLGHHGLCCQKSAGRFSRHATLNDIIRRSLASINVPALLEPTGIVRDDGKRPDGVSLVPWSLGRMLVWDATCVDTLAPSHLQRTTSKAGAAAENAENLKVIKYVGLGREYNFVPFGVETLGPWGPSAHKLFAEIAKRLVDVTGDRKAGGFLAQRISIAIQRGNAASILGTMPRGPFLSLT

SEQ ID NO: 17767 - protein, 950 aa, Atethmia centrago
MHTATQSGDGTLNQNYICLHCDRSFQSKRGLNIHISKKHRLCISQNGPALNLDPVSLPAPVSDSPNSTPFHLYLSYLKNNVPVIKRVPRGARISVANHLSGLIKKCVESNQIVDWHNLFLFSYTTLHVKKDEATITLTQKIKNNCLTKTTSPFDSPKRGTLSRIKLIEGKIADGDLKGAARLLFTNDVLSPDTPDTLSALHSKHPPAPVIPYFFDSPTADQACLEIEGKDVIDAIISFKTGSAAGLDGISPQHLKDLTSYSVGDAGVQLICSITKLINFMFSGKINADIASLLFGANLIALTKKDGGVRPIAVGSTLRRLASKIAVRHIKSKLQSVFEPIQLGFGTKGGCEAAVHALRTYLSYDDCEIVVKIDVKNAFNSVNRDAMLTEVKNKIPELYQYLLTCYAEPSKLIYRSHELSSEVGCQQGDPLGPAIFSLAINPIIQNLKSKFNVWYLDDGTLGGDVDTVLSDLSDIKTNFENIGLELNFSKCELFIQKTSYGLDNLKSKLNFLAPNIKIVDRKSLCLLGSPIFEESFPDYITNTISKFQSHANCLLEISPHYALIILKFCLFVPKFTYVLRCSPFWKHPNLLSPIDDLVKTSLETILNIQLNEPSWLQASLPIRFGGLGIRKISSVASPAFLSSTHSTSRLIGNVLRALPTNYETAGLDDAKNAFQIACPGKEFPDNLKSQRSWDDIYCDLTYKSILSRSSGPDRARLLAVGTREAGLWLHAHPSPYTGTFLDPTSLRLATGLRLGVTVCTPHTCPCGTDVDRLGHHGLCCQKSAGRFSRHATLNDIIRRSLASINVPALLEPTGIVRDDGKRPDGVSLVPWSLGRMLVWDATCVDTLAPSHLQRTTSKAGAAAENAENLKVIKYVGLGREYNFVPFGVETLGPWGPSAHKLFAEIAKRLVDVTGDRKAGGFLAQRISIAIQRGNAASILGTMPRGPFLSLT

SEQ ID NO: 17768 - protein, 950 aa, Atethmia centrago
MHTATQSGDGTLNQNYICLHCDRSFQSKRGLNIHISKKHRLCISQNGPALNLDPVSLPAPVSDSPNSTPFHLYLSYLKNNVPVIKRVPRGARISVANHLSGLIKKCVESNQIVDWHNLLLFSYTTLHVKKDEATISLTQKIKNNCLTKTSSPFDSPKRGTLSRIKLIEGKIADGDLKGAARLLFTNDVLSPDTPDTLSALHSKHPPAPVIPYFFDSPTADQACLEIEGKDVIDAIISFKTGSAAGLDGISPQHLKDLTSYSVGDAGVQLICSITKLINFMFSGKINADIASLLFGANLIALTKKDGGVRPIAVGSTLRRLASKIAVRHIKSKLQSVFEPIQLGFGTKGGCEAAVHALRTYLSYDDCEIVVKIDVKNAFNSVNRDAMLTEVKNKIPELYQYLLTCYAEPSKLIYRSHELSSEVGCQQGDPLGPAIFSLAINPIIQNLKSKFNVWYLDDGTLGGDVDTVLSDLSDIKTNFENIGLELNFSKCELFIQKTSYGLDNLKSKLNFLAPNIKIVDRKSLCLLGSPIFEESFPDYITNTISKFQSHANCLLEISPHYALIILKFCLFVPKFTYVLRCSPFWKHPNLLSPIDDLVKTSLETILNIQLNEPSWLQASLPIRFGGLGIRKISSVASPAFLSSTHSTSRLIGNVLRALPTNYETAGLEDAKNAFQIACPGKEFPDNLKSQRSWDDIYCDLTYKSILSRSSGPDRARLLAVGTREAGHWLHAHPSPYTGTFLDPTSLRLATGLRLGVTVCTPHTCPCGTDVDRLGHHGLCCQKSAGRFSRHATLNDIIRRSLASINVPALLEPTGIVRDDGKRPDGVSLVPWSLGRMLVWDATCVDTLAPSHLQRTTSKAGAAAENAENLKVIKYGGLGREYNFVPFGVETLGPWGPSAHKLFAEIAKRLVDVTGDRKAGGFLAQRISIAIQRGNAASILGTMPRGPFLSLT

SEQ ID NO: 17769 - protein, 967 aa, Atethmia centrago
MEKKGKKLHRYCFKMFYNIMHTATQSGDGTLNQNYICLHCDRSFQSKRGLNIHISKKHRLCISQNGPALNLDPVSLPVSDSPNSTPFHLYLSYLKNNVPVIKRVPRGARISVANHLSGLIKKCVESNQIVDWHNLFLFSYTTLHVKKDEATISLTQKIKNNCLTKTSSPFDSPKRGTLSRIKLIEGKIADGDLKGAARLLFTNDVLSPDTPDTLSALHSKHPPAPVIPYFFDSPTADQACLEIEGKDVIDAIISFKTGSAAGLDGISPQHLKDLTSYSVGDAGVQLICSITKLINFMFSGKINADIASLLFGANLIALTKKDGGVRPIAVGSTLRRLASKIAVRHIKSKLQSVFEPIQLGFGTKGGCEAAVHALRTYLSYDDCEIVVKIDVKNAFNSVNRDAMLTEVKNKIPELYQYLLTCYAEPSKLIYRSHELSSEVGCQQGDPLGPAIFSLAINPIIQNLKSKFNVWYLDDGTLGGDVDTVLSDLSDIKTNFENIGLELNFSKCELFIQKTSYGLDNLKSKLNFLAPNIKIVDRKSLCLLGSPIFEESFPDYITNTISKFQSHANCLLEISPHYALIILKFCLFVPKFTYVLRCSPFWKHPNLLSPIDDLVKTSLETILNIQLNEPSWLQASLPIRFGGLGIRKISSVASPAFLSSTHSTSRLIGNVLRALPTNYETAGLEDAKNAFQIACPGKEFPDNLKSQRSWDDIYCDLTYKSILSRSSGPDRARLLAVGTREAGHWLHAHPSPYTGTFLDPTSLRLATGLRLGVTVCTPHTCPCGTDVDRLGHHGLCCQKSAGRFSRHATLNDIIRRSLASINVPALLEPTGIVRDDGKRPDGVSLVPWSLGRMLVWDATCVDTLAPSHLQRTTSKAGAAAENAENLKVIKYGGLGREYNFVPFGVETLGPWGPSAHKLFAEIAKRLVDVTGDRKAGGFLAQRISIAIQRGNAASILGTMPRGPFLSLT

SEQ ID NO: 17770 - protein, 950 aa, Atethmia centrago
MHTATQSGDGTLNQNYICLHCDRSFQSKRGLNIHISKKHRLCISQNGPALNLDPVSLPAPVSDSPNSTPFHLYLSYLKNNVPVIKRVPRGARISVANHLSGLIKKCVESNQIVDWHNLFLFSYTTLHVKKDEATISLTQKIKNNCLTKTSSPFDSPKRGTLSRIKLIEGKIADGDLKGAARLLFTNDVLSPDTPDTLSALHSKHPPAPVIPYFFDSPTADQACLEIEGKDVIDAIISFKTGSAAGLDGISPQHLKDLTSYSVGDAGVQLICSITKLINFMFSGKINADIASLLFGANLIALTKKDGGVRPIAVGSTLRRLASKIAVRHIKSKLQSVFEPIQLGFGTKGGCEAAVHALRTYLSYDDCEIVVKIDVKNAFNSVNRDAMLTEVKNKIPELYQYLLTCYAEPSKLIYRSHELSSEVGCQQGDPLGPAIFSLAINPIIQNLKSKFNVWYLDDGTLGGDVDTVLSDLSDIKTNFENIGLELNFSKCELFIQKTSYGLDNLKSKLNFLAPNIKIVDRKSLCLLGSPIFEESFPDYITNTISKFQSHANCLLEISPHYALIILKFCLFVPKFTYVLRCSPFWKHPNLLSPIDDLVKTSLETILNIQLNEPSWLQASLPIRFGGLGIRKISSVASPAFLSSTHSTSRLIGNVLRALPTNYETAGLEDAKNAFQIACPGKEFPDNLKSQRSWDDIYCDLTYKSILSRSSGPDRARLLAVGTREAGHWLHAHPSPYTGTFLDPTSLRLATGLRLGVTVCTPHTCPCGTDVDRLGHHGLCCQKSAGRFSRHATLNDIIRRSLASINVPALLEPTGIVRDDGKRPDGVSLVPWSLGRMLVWDATCVDTLAPSHLQRTTSKAGAAAENAENLKVIKYGGLGREYNFVPFGVETLGPWGPSAHKLFAEIAKRLVDVTGDRKAGGFLAQRISIAIHRGNAASILGTMPRGPFLSLT

SEQ ID NO: 17771 - protein, 950 aa, Atethmia centrago
MHTATQSGDGTLNQNYICLHCDRSFQSKRGLNIHISKKHRLCISQNGPALNLDPVSLPAPVSDSPNSTPFHLYLSYLKNNVPVIKRVPRGARISVANHLSGLIKKCVESNQIVDWHNLFLFSYTTLHVKKDEATISLTQKIKNNCLTKTTSPFDSPKRGTLSRIKLIEGKIADGDLKGAARLLFTNDVLSPDTPDTLSALHSKHPPAPVIPYFFDSPTADQACLEIEGKDVIDAIISFKTGSAAGLDGISPQHLKDLTSYSVGDAGVQLICSITKLINFMFSGKINADIASLLFGANLIALTKKDGGVRPIAVGSTLRRLASKIAVRHIKSKLQSVLEPIQLGFGTKGGCEAAVHALRTYLSYDDCEIVVKIDVKNAFNSVNRDAMLTEVKNKIPELYQYLLTCYAEPSKLIYRSHELSSEVGCQQGDPLGPAIFSLAINPIIQNLKSKFNVWYLDDGTLGGDVDTVLSDLSDIKTNFENIGLELNFSKCELFIQKTSYGLDNLKSKLNFLAPNIKIVDRKSLCLLGSPIFEESFPDYITNTISKFQSHANCLLEISPHYALIILKFCLFVPKFTYVLRCSPFWKHPNLLSPIDDLVKTSLETILNIQLNEPSWLQASLPIRFGGLGIRKISSVASPAFLSSTHSTSRLIGNVLRALPTNYETAGLDDAKNAFQIACPGKEFPDNLKSQRSWDDIYCDLTYKSILSRSSGPDRARLLAVGTREAGLWLHAHPSPYTGTFLDPTSLRLATGLRLGVTVCTPHTCPCGTDVDRLGHHGLCCQKSAGRFSRHATLNDIIRRSLASINVPALLEPTGIVRDDGKRPDGVSLVPWSLGRMLVWDATCVDTLAPSHLQRTTSKAGAAAENAENLKVIKYVGLGREYNFVPFGVETLGPWGPSAHKLFAEIAKRLVDVTGDRKAGGFLAQRISIAIQRGNAASILGTMPRGPFLSLT

SEQ ID NO: 17772 - protein, 950 aa, Atethmia centrago
MHTATQSGDGTLNQNYICLHCDRSFQSKRGLNIHISKKHRLCISQNGPALNLDPVSLPAPVSDSPNSTPFHLYLSYLKNNVPVIKRVPRGARISVANHLSGLIKKCVESNQIVDWHNLFLFSYTTLHVKKDEATISLTQKIKNNCLTKTSSPFDSPKRGTLSRIKLIEGKIADGDLKGAARLLFTNDVLSPDTPDTLSALHSKHPPAPVIPYFFDSPTADQACLEIEGKDVIDAIISFKTGSAAGLDGISPQHLKDLTSYSVGDAGVQLICSITKLINFIFSGKINADIASLLFGANLIALTKKDGGVRPISVGSTLRRLASKIAVRHIKSKLQSVFEPIQLGFGTKGGCEAAVHALRTYLSYDDCEIVVKIDVKNAFNSVNRDAMLTEVKNKIPELYQYLLTCYAEPSKLIYRSHELSSEVGCQQGDPLGPAIFSLAINPIIQNLKSKFNVWYLDDGTLGGDVDTVLSDLSDIKTNFENIGLELNFSKCELFIQKTSYGLDNLKSKLNFLAPNIKIVDRKSLCLLGSPIFEESFPDYITNTISKFQSHANCFLEISPHYALIILKFCLFVPKFTYVLRCSPFWKHPNLLSPIDDLVKTSLETILNIQLNEPSWLQASLPIRFGGLGIRKISSVASPAFLSSTHSTSRLIGNVLRALPTNYETAGLEDAKNAFQIACPGKEFPDNLKSQRSWDDIYCDLTYKSILSRSSGPDRARLLAVGTREAGHWLHAHPSPYTGTFLDPTSLRLATGLRLGVTVCTPHTCPCGTDVDRLGHHGLCCQKSAGRFSRHATLNDIIRRSLASINVPALLEPTGIVRDDGKRPDGVSLVPWSLGRMLVWDATCVDTLAPSHLQRTTSKAGAAAENAENLKVIKYGGLGREYNFVPFGVETLGPWGPSAHKLFAEIAKRLVDVTGDRKAGGFLAQRISIAIQRGNAASILGTMPRGPFLSLT

SEQ ID NO: 17773 - protein, 671 aa, Atethmia centrago
MFSGKINADIASLLFGANLIALTKKDGGVRPIAVGSTLRRLASKIAVRHIKSKLQSVFEPIQLGFGTKGGCEAAVHALRTYLSYDDCEIVVKIDVKNAFNSVNRDAMLTEVKNKIPELYQYLLTCYAEPSKLIYRSHELSSEVGCQQGDPLGPAIFSLAINLIIQNLKSKFNVWYLDDGTLGGDVDTVLSDLSDIKTHFESIGLELNFSKCELFIQKTSYGLDNLKSKLNFLAANIKIVDRKSLCLLGSPIFEESFPDYITNTISKFQSHANCLLEISPHYALIILKFCLFVPKFTYVLRCSPFWKHPNLLSPIDDLVKTSLETILNIQLNEPSWLQASLPIRFGGLGIRKISSVASPAFLSSTHSTSRLIGNVLRALPTNYETAGLEDAKNAFQIACPGKEFPDNLKSQRSWDDIYCDLTYKSILSRSSGPDRARLLAVGTREAGHWLHAHPSPYTGTFLDPTSLRLATGLRLGVTVCTPHTCPCGTDVDRLGHHGLCCQKSAGRFSRHATLNDIIRRSLASINVPALLEPIGIVRDDGKRPDGVSLVPWSLGRMLVWDATCVDTLARSHLQRTTSKAGAAAENAENLKVIKYGGLGREYNFVPFGVETLGPWGPSAHKLFAEIAKRLVDVTGDRKAGGFLAQRISIAIQRGNAASILGTMPRGPFLSLT

SEQ ID NO: 17774 - protein, 950 aa, Atethmia centrago
MHTATQSGDGTLNQNYICLHCDRSFQSKRGLNIHISKKHRLCISQNGPALNLDPVSLPAPVSDSPNSTPFHLYLSYLKNNVPVIKRVPRGARISVANHLSGLIKKCVESNQIVDWHNLFLFSYTTLHVKKDEATISLTQKIKNNCLTKTSSPFDSPKRGTLSRIKLIEGKIADGDLKGAARLLFTNDVLSPDTPDTLSALHSKHPPAPVIPYFFNSPTADQACLEIEGKDVIDAIISFKTGSAAGLDGISPQHLKDLTSYSVGDAGVQLICSITKLINFMFSGKINADIASLLFGANLIALTKKDGGVRPIAVGSTLRRLASKIAVRHIKSKLQSVFEPIQLGFGTKGGCEAAVHALRTYLSYDDCEIVVKIDVKNAFNSVNRDAMLTEVKNKIPELYQYLLTCYAEPSKLIYRSHELSSEVGCQQGDPLGPAIFSLAINPIIQNLKSKFNVWYLDDGTLGGDVDTVLSDLSDIKTNFENIGLELNFSKCELFIQKNSYGLDNLKSKLNFLAPNIKIVDRKSLCLLGSPIFEESFPDYITNTISKFQSHANCLLEISPHYALIILKFCLFVPKFTYVLRCSPFWKHPNLLSPIDDLVKTSLETILNIQLNEPSWLQASLPIRFGGLGIRQISSVASPAFLSSTHSTSRLIGNVLRALPTNYETAGLEDAKNAFQIACPGKEFPDNLKSQRSWDDIYCDLTYKSILSRSSGPDRARLLAVGTREAGHWLHAHPSPYTGTFLDPTSLRLATGLRLGVTVCTPHTCPCGTDVDRLGHHGLCCQKSAGRFSRHATLNDIIRRSLASINVPALLEPTGIVRDDGKRPDGVSLVPWSLGRMLVWDATCVDTLAPSHLQRTTSKAGAAAENAENLKVIKYGGLGREYNFVPFGVETLGPWGPSAHKLFAEIAKRLVDVTGDRKAGGFLAQRISIAIQRGNAASILGTMPRGPFLSLT

SEQ ID NO: 17775 - protein, 952 aa, Atethmia centrago
MHTATQSGDGTLNQNYICLHCDRSFQSKRGLNIHISKKHRLCTSISQNGPALNLDPVSLPAPVSDSPNSTPFHLYLSYLKNNVPVIKRVPRGARISVANHLSGLIKKCVESNQIVDWHNLFLFSYTTLHVKKDEATISLTQKIKNNCLTKTSSPFDSPKRGTLSRIKLIEGKIADGDLKGAARLLFTNDVLSPDTPDTLSALHSKHPPAPVIPYFFDSPTADQACLEIEGKDVIDAIISFKTGSAAGLDGISPQHLKDLTSYSVGDAGVQLICSITKLINFMFSGKINADIASLLFGANLIALTKKDGGVRPIAVGSTLRRLASKIAVRHIKSKLQSVFEPIQLGFGTKGGCEAAVHALRTYLSYDDCEIVVKIDVKNAFNSVNRDAMLTEVKNKIPELYQYLLTCYAEPSKLIYRSHELSSEVGCQQGDPLGPAIFSLAINPIIQNLKSKFNVWYLDDGTLGGDVDTVLSDLSDIKTNFENIGLELNFSKCELFIQKTSYGLDNLKSKLNFLAPNIKIVDRKSLCLLGSPIFEESFPDYITNTISKFQSHANCLLEISPHYALIILKFCLFVPKFTYVLRCSPFWKHPNLLSPIDDLVKTSLETILNIQLNEPSWLQASLPIRFGGLGIRKISSVASPAFLSSTHSTSRLIGNVLRALPTNYETAGLEDAKNAFQIACPGKEFPDNLKSQRSWDDIYCDLTYKSILSRSSGPDRARLLAVGTREAGHWLHAHPSPYTGTFLDPTSLRLATGLRLGVTVCTPHTCPCGTDVDRLGHHGLCCQKSAGRFSRHATLNDIIRRSLASINVPALLEPTGIVRDDGKRPDGVSLVPWSLGRMLVWDATCVDTLAPSHLQRTTSKAGAAAENAENLKVIKYGGLGREYNFVPFGVETLGPWGPSAHKLFAEIAKRLVDVTGDRKAGGFLAQRISIAIQRGNAASILGTMPRGPFLSLT

SEQ ID NO: 17776 - protein, 950 aa, Atethmia centrago
MHTATQSGDGTLNHNYICLHCDRSFQSKRGLNIHISKKHRLCISQNGPALNLDPVSLPAPVSDSPNSTPFHLYLSYLKNNVPVIKRVPRGARISVANHLSGLIKKCVESNQIVDWHNLFLFSYTTLHVKKDEATISLTQKIKNNCLTKTSSPFDSPKRGTLSRIKLIEGKIADGDLKGAARLLFTNDVLSPDTPDTLSALHSKHPPAPVIPYFFDSPTADQACLEIEGKDVIDAIISFKTGSAAGLDGISPQHLKDLTSYSVGDAGVQLICSITKLINFIFSGKINADIASLLFGANLIALTKKDGGVRPIAVGSTLRRLASKIAVRHIKSKLQSVFEPIQLGFGTKGGCEAAVHALRTYLSYDDCEIVVKIDVKNAFNSVNRDAMLTEVKNKIPELYQYLLTCYAEPSKLIYRSHELSSEVGCQQGDPLGPAIFSLAINPIIQNLKSKFNVWYLDDGTLGGDVDTVLSDLSDIKTNFENIGLELNFSKCELFIQKTSYGLDNLKSKLNFLAPNIKIVDRKSLCLLGSPIFEESFPDYITNTISKFQSHANCLLEISPHYALIILKFCLFVPKFTYVLRCSPFWKHPNLLSPIDDLVKTSLETILNIQLNEPSWLQASLPIRFGGLGIRKISSVASPAFLSSTHSTSRLIGNVLRALPTNYETAGLEDAKNAFQIACPGKEFPDNLKSQRSWDDIYCDLTYKSILSRSSGPDRARLLAVGTREAGHWLHAHPSPYTGTFLDPTSLRLATGLRLGVTVCTPHTCPCGTDVDRLGHHGLCCQKSAGRFSRHATLNDIIRRSLASINVPALLEPTGIVRDNGKRPDGVSLVPWSLGRMLVWDATCVDTLAPSHLQRTTSKAGAAAENAENLKVIKYGGLGREYNFVPFGVETLGPWGPSAHKLFAEIAKRLVDVTGDRKAGGFLAQRISIAIQRGNAASILGTMPRGPFLSLT

SEQ ID NO: 17777 - protein, 671 aa, Atethmia centrago
MFSGKINADIASLLFGANLIALTKKDGGVRPIAVGSTLRRLASKIAVRHIKSKLQSVFEPIQLGFGTKGGCEAAVHALRTYLSYDDCEIVVKIDVKNAFNSVNRDAMLTEVKNKIPELYQYLLTCYAEPSKLIYRSHELSSEVGCQQGDPLGPAIFSLAINPIIQNLKSKFNVWYLDDGTLGGDVDTVLSDLSDIKTNFENIGLELNFSKCELFIQKTSYGLDNLKSKLNFLAPNIKIVDRKSLCLLGSPIFEEYFPDYITNTISKFQSHANCLLEISPHYALIILKFCLFVPKFTYVLRCSPFWKHPNLLSPIDDLVKTSLETILNIQLNEPSWLQASLPIRFGGLGIRKISSVASPAFLSSTHSTSRLIGNVLRALPTNYETAGLEDAKNAFQIACPGKEFPDNLKSQRSWDDIFCDLTYKSILSRSSGPDRARLLAVGTREAGHWLHAHPSPYTGTFLDPTSLRLATGLRLGVTVCTPHTCPCGTDVDRLGHHGLCCQKSAGRFSRHATLNDIIRRSLASINVPALLEPTGIVRDDGKRPDGVSLVPWSLGRMLVWDATCVDTLAPSHLQRTTSKAGAAAENAENLKVIKYGGLGKEYNFVPFGVETLGPWGPSAHKLFAEIAKRLVDVTGDRKAGGFLAQRISIAIQRGNAASILGTMPRGPFLSLT

SEQ ID NO: 17778 - protein, 909 aa, Atethmia centrago
MHTATQSGDGTLNQNYICLHCDRSFQSKRGLNIHISKKHRLCISQNGPALNLDPVSLPAPVSDSPNSTPFHLYLSYLKNNVPVIKRVPRGARISVANHLSGLIKKCVESNQIVDWHNLFLFSYTTLHVKKDEATISLTQKIKNNCLTKTSSPFDSPKRGTLSRIKLIEGKIADGDLKGAARLLFTNDVLSPDTPDTLSALHSKHPPAPVIPYFFDSPTADQACLEIEGKDVIDAIISFKTGSAAGLDGISPQHLKDLTSYSVGDAGVQLICSITKLINFMFSGKINADIASLLFGANLIALTKKDGGVRPIAVGSTLRRLASKIAVRHIKSKLQSVFEPIQLGFGTKGGCEAAVHALRTYLSYDDCEIVVKIDVKNAFNSVNRDAMLTEVKNKIPELYQYLLTCYAEPSKLIYRSHELSSEVGCQQGDPLGPAIFSLAINPIIQNLKSKFNVWYLDDGTLGGDVDTVLSDLSDIKTNFENIGLELNFSKCELFIQKTSYGLDNLKSKLNFLAPNIKIVDRKSLCLLGSPIFEESFPDYITNTISKFQSHANCLLEISPHYALIILKFCLFVPKFTYVLRCSPFWKHPNLLSPIDDLVKTSLETILNIQLIEPSWLQASLPIRFGGLGIRKISSVASPAFLSSTHSTSRLIGNVLRALPTNYETAGLEDAKNAFQIACPGKEFPDNLKSQRSWDDIYCDLTYKSILSRSSGPDRARLLAVGTREAGHWLHAHPSPYTGTFLDPTSLRLATGLRLGVTVCTPHTCPCGTDVDRLGHHGLCCQKSAGRFSRHATLNDIIRRSLASINVPALLEPTGIVRDDGKRPDGVSLVPWSLGRMLVWDATCVDTLAPSHLQRTTSKAGAAAENAENLKVIKYGGLGREYNFVPFGVETLGPWGPSAHKLFAEIAKRLV

SEQ ID NO: 17779 - protein, 950 aa, Atethmia centrago
MHTATQSGDGTLNQNYICLHCDRSFQSKRGLNIHISKKHRLCISQNGPALNLDPVSLPAPVSDSPNSTPFHLYLSYLKNNVPVIKRVPRGARISVANHLSGLIKKCVESNQIVDWHNLFLFSYTTLHVKKDEATISLTQKIKNNCLTKTSSPFDSPKRGTLSRIKLIEGKIADGDLKGAARLLFTNDVLSPDTPDTLSALHSKHPPAPVIPYFFDSPTADQACFEIEGKDVIDAIISFKTGSAAGLDGISPQHLKDLTSYSVGDAGVQLICSITKLINFMFSGKINADIASLLFGANLIALTKKDGGVRPIAVGSTLRRLASKIAVRHIKSKLQSVFEPIQLGFGTKGGCEAAVHALRTYLSYDDCEIVVKIDVKNAFNSVNRDAMLTEVKNKIPELYQYLLTCYAEPSKLIYRSHELSSEVGCQQGDPLGPAIFSLAINPIIQNLKSKFNVWYLDDGTLGGDVDTVLSDLSDIKTNFENIGLELNFSKCELFIQKTSYGLDNLKSKLNFLAPNIKIVDRKSLCLLGSPIFEESFPDYITNTISKFQSHANCLHEISPHYALIILKFCLFVPKFTYVLRCSPFWKHPNLLSPIDDLVKTSLETILNIQLNEPSWLQASLPIRFGGLGIRKISSVASPAFLSSTHSTSRLIGNVLRALPTNYETAGLEDAKNAFQIACPGKEFPDNLKSQRSWDDIYCDLTYKSILSRSSGPDRARLLAVGTREAGHWLHAHPSPYTGTFLDPTSLRLATGLRLGVTVCTPHTCPCGTDVDRLGHHGLCCQKSAGRFSRHATLNDIIRRSLASINVPALLEPTGIVRDDGKRPDGVSLVPWSLGRMLVWDATCVDTLAPSHLQRTTSKAGAAAENAENLKVIKYGGLGREYNFVPFGVETLGPWGPSAHKLFAEIAKRLVDVTGDRKAGGFLAQRISIAIQRGNAASILGTMPRGPFLSLT

SEQ ID NO: 17780 - protein, 950 aa, Atethmia centrago
MHTATQSGDGTLNQNYICLHCDRSFQSKRGLNIHISKKHRLCISQNGPALNLDPVSLPAPVSDSPNSTPFHLYLSYLKNNVPVIKRVPRGARISVANHLSGLIKKCVESNQIVDWHNLFLFSYTTLHVKKDEATISLTQKIKNNCLTKISSPFDSPKRGTLSRIKLIEGKIADGDLKGAARLLFTNDLLSPDTPDTLSALHSKHPPAPVIPYFFDSPTADQACLEIEGKDIIDEIISFKTGSAAGLDGISPQHLKDLTSYSVGDAGVQLICSITKLINFMFSGKINADIASLLFGANLIALTKKDGGVRPIAVGSTLRRLASKIAVRHIKSKLQSVFEPIQLGFGTKGGCEAAVHALRTYLSYDDCEIVVKIDVKNAFNSVNRDAMLTEVKNKIPELYQYLLTCYAEPSKLIYRSHELSSEVGCQQGDPLGPAIFSLAINPIIQNLKSKFNVWYLDDGTLGGDVDTVLSDLSDIKTNFENIGLELNFSKCELFIQKTSYGLDNLKSKLNFLAPNIKIVDRKSLCLLGSPIFEESFPDYITNTISKFQSHANCLFEISPHYALIILKFCLFVPKFTYVLRCSPFWKHPNLLSPIHDLVKTSLETILNIQLNEPSWLQASLPIRFGGLGIRKISSVASPAFLSSTHSTSRLIGNVLRALPTNYETAGLEDAKNAFQIACPGKEFPDNLKSQRSWDDIYCDLTYKSILSRSSGPDRARLLAVGTREAGHWLHAHPSPYTGTFLDPTSLRLATGLRLGVTVCTPHTCPCGTDVDRLGHHGLCCQKSAGRFSRHATLNDIIRRSLASINVPALLEPTGIVRDDGKRPDGVSLVPWSLGRMLVWDATCVDTLAPSHLQRTTSKAGAAAENAENLKVIKYGGLGREYNFVPFGVETLGPWGPSAHKLFAEIAKRLVDVTGDRKAGGFLAQRISIAIQRGNAASILGTMPRGPFLSLT

SEQ ID NO: 17781 - protein, 950 aa, Atethmia centrago
MHTATQSGDGTLNQNYICLHCDRSFQSKRGLNIHISKKHRLCISQNGPALNLDPVSLPAPVSDSPNSTPFHLYLSYLKNNVPVIKRVPRGARISVANHLSGLIKKCVESNQIVDWHNLFLFSYTTLHVKKDEATISLTQKIKNNCLTKTSSPFDSPKRGTLSRIKLIEGKIADGDLKGAARLLFTNDVLSPDTPDTLSALHSKHPPAPVIPYFFDSPTADQACLEIEGKDVIDAIISFKTGSAAGLDGISPQHLKDLTSYSVGDAGVQLICSITKLINFMFSGKINADIASLLFGANLIALTKKDGGVRPIAVGSTLRRLASKIAVRHIKSKLQSVFEPIQLGFGTKGGCEAAVHALRTYLSYDDCEIVVKIDVKNAFNSVNRDAMLTEVKNKIPELYQYLLTCYAEPSKLIYRSHELSSEVGCQQGDPLGPAIFSLAINPIIQNLKSKFNVWYLDDGTLGGDVDTVLSDLSDIKTNFENIGLELNFSKCELFIQKTSYGLDNLKSKLNFLAPNIKIVDRKSLCLLGSPIFEESFPDYITNTISKFQSHANCLLEISPHYALIILKFCLFVPKFTYVLRCSPFWKHPNLLSPIDDLVKTSLETILNIQLNEPSWLQASLPIRFGGLGIRKISSVASPAFLSSTHSTSRLIGNVLRALPTNYETAGLEDAKNAFQIACPGKEFPDNLKSQRSWDDIYCDLTYKSILNRSSGPDRARLLAVGTREAGHWLHAHPSPYTGTFLDPTSLRLATGLRLGVTVCTPHTCPCGTDVDRLGHHGLCCQKSAGRFSRHATLNDIIRRSLASINVPALLEPTGIVRDDGKRPDGVSLVPWSLGRMLVWDATCVDTLAPSHLQRTTSKAGAAAENAENLKVIKYGGLGREYNFVPFGVETLGPWGPSAHKLFAEIAKRLVDVTGDRKAGGFLTQRISIAIQRGNAASILGTMPRRPFLSLT

SEQ ID NO: 17782 - protein, 950 aa, Atethmia centrago
MNTATQSGDGTLNQNYICLHCDRSFQSKRGLNIHISKKHRLCISQNGPALNLDPVSLPAPVSDSPNSTPFHLYLSYLKNNVPVIKRVPRGARISVANHLSGLIKKCVESNQIVDWHNLFLFSYTTLHVKKDEATISLTQKIKNNCLTKTSSPFDSPKRGTLSRIKLIEGKIADGDLKGAARLLFTNDVLSPDTPDTLSALHSKHPPAPVIPYFFDSPTADQACLEIEGKDVIDAIISFKTGSAAGLDGISPQHLKDLTSYSVGDAGVQLICSITKLINFMFSGKINADIASLLFGANLIALTKKDGGVRPIAVGSTLRRLASKIAVRHTKSKLQSVFEPIQLGFGTKGGCEAAVHALRTYLSYDDCEIVVKIDVKNAFNSVNRDAMLTEVKNKIPELYQYLLTCYAEPSKLIYRSHELSSEVGCQQGDPLGPAIFSLAINPIIQNLKSKFNVWYLDDGTLGGDVDTVLSDLSDIKTNFENIGLELNFSKCELFIQKTSYGLDNLKSKLNFLAPNIKIVDRKSLCLLGSPIFEESFPDYITNTISKFQSHANCLLEISPHYALIILKFCLFVPKFTYVLRCSPFWKHPNLLSPIDDLVKTSLETILNIQLNEPSWLQASLPIRFGGLGIRKISSVASPAFLSSTHSTSRLIGNVLRALPTNYETAGLEDAKNAFQIACPGKEFPDNLKSQRSWDDIYCDLTYKSILSRSSGPDRARLLAVGTREAGHWLHAHPSPYTGTFLDPTSLRLATGLRLGVTVCTPHTCPCGTDVDRLGHHGLCCQKSAGRFSRHATLNDIIRRSLASINVPALLEPTGIVRDDGKRPDGVSLVPWSLGRMLVWDATCVDTLAPSHLQRTTSKAGAAAENAENLKVIKYGGLGREYNFVPFGVETLGPWGPSAHKLFAEIAKRLVDVTGDRKAGGFLAQRISIAIQRGNAASILGTMPRGPFLSLT

SEQ ID NO: 17783 - protein, 950 aa, Atethmia centrago
MHIATQSGDGTLNQNYICLHCDRSFQSKRGLNIHISKKHRLCISQNGPALNLDPVSLPAPVSDSPNSTPFHLYLSYLKNNVPVIKRVPRGARISVANHLSGFIKKCVESNQIVDWHNLFLFSYTTLHVKKDEATISLTQKIKNNCLTKTSSPFDSPKRGTLSRIKLIEGKIADGDLKGAARFLFTNDVLSPDTPDTLSALHSKHPPAPVIPYFFDSPTADQACLEIEGKDVIDAIISFKTGSAAGLDGISPQHLKDLTSYSVGDAGVQLICSITKLINFMFSGKINADIASLLFGANLIALTKKDGGVRPIAVGSTLRRLASKIAVRHIKSKLQSVFEPIQLGFGTKGGCEAAVHALRTYLSYDNCEIVVKIDVKNAFNSVNRDAMLTEVKNKIPELYQYLLTCYAEPSKLIYRSHELSSEVGCQQGDPLGPAIFSLAINPIIQNLKSKFNVWYLDDGTLGGDVDTVLSDLSDIKTYFENIGLELNFSKCELFIQKTSYGLDNLKSKLNFLAPNIKIVDRKSLCLLGSPIFEESLPDYITNTISKFQSHANCLLEISPHYALIILKFCLFVPKFTYVLRCSPFWKHPNLLSPIDDLVKTSLETILNIQLNEPSWLQASLPIRFGGLGIRKISSVASPAFLSSTHSTSRLVGNVLRALPTNYETAGLEDAKNAFQIACPGKEFPDNLKSQRSWDDIYCDLTYKSILSRSSGPDRARLLAVGTREAGHWLHAHPSPYTGTFLDPTSLRLATGLRLGVTVCTPHTCPCGTDVDRLGHHGLCCQKSAGRFSRHATLNDIIRRSLASINVPALLEPTGIVRDDGKRPDGVSLVPWSLGRMLVWDATCVDTLAPSHLQRTTSKAGAAAENAENLKVIKYGGLGREYNFVPFGVETLGPWGPSAHKLFAEITKRLVDVTGDRKAGGFLAQRISIAIQRGNAASILGTMPRGPFLSLT

SEQ ID NO: 17784 - protein, 876 aa, Atethmia centrago
MDHLSDVLVKCFTDSDIAKEFSCKRTKAAAIIYNVLGPNFEKDMIEDILGTASPSGKPVYSIIIDESTDVATVKVLAIVIKYFSETKCTFEIPVGKIADGDLKGAARLLFTNDVLSPDTPDTLSALHSKHPPAPVIPYFFDSPTADQACLEIEGKDVIDAIISFKTGSAAGLDGISPQHLKDLTSYSVGDAGVQLICSITKLINFMFSGKINADIASLLFGANLIALTKKDGGVRPIAVGSTLRRLASKIAVRHIKSKLQSVFEPIQLGFGTKGGCEAAVHALRTYLSYDDCEIVVKIDVKNAFNSVNRDAMLTEVKNKIPELYQYLLTCYAEPSKLIYRSHELSSEVGCQQGDPLGPAIFSLAINPIIQNLKSKFNVWYLDDGTLGGDVDTVLSDLSDIKTNFENIGLELNFSKCELFIQKNSYGLDNLKSKLNFLAPNIKIVDRKSLCLLGSPIFEESFPDYITNTISKFQSHANCLLEISPHYALIILKFCLFVPKFTYVLRCSPFWKHPNLLSPIDDLVKTSLETILNIQLNEPSWLQASLPIRFGGLGIRKISSVASPAFLSSTHSTSRLIGNVLRALPTNYETAGLEDAKNAFQIACPGKEFPDNLKSQRSWDDIYCDLTYKSILSRSSGPDRARLLAVGTREAGHWLHAHPSPYTGTFLDPTSLRLATGLRLGVTVCTPHTCPCGTDVDRLGHHGLCCQKSAGRFSRHATLNDIIRRSLASINVPALLEPTGIVRDDGKRPDGVSLVPWSLGRMLVWDATCVDTLAPSHLQRTTSKAGAAAENAENLKVIKYGGLGREYNFVPFGVETLCPWGPSAHKLFAEIAKRLVDVTGDRKAGGFLAQRISIAIQRGNAASILGTMPRGPFLSLT

SEQ ID NO: 17785 - protein, 950 aa, Atethmia centrago
MHTATQSGDGTLNQNYICLHCDRSFQSKRGLNIHISKKHRLSISQNGPALNLDPVSLPAPVSDSPNSTPFHLYLSYLKNNVPVIKRVPRGARISVANHLSGLIKKCVESNQIVDWHNLFLFSYTTLHVKKDEATISLTQKIKNNCLTKTSSPFDSPKRGTLSRIKLIEGKIADGDLKGAARLLFTNDVLSPDTPDTLSALHSKHPPAPVIPYFFDSPTADQACLEIEGKDVIDAIISFKTGSAAGLDGISPQHLKDLTSYSVGDAGVQLICSITKLINFMFSGKINADIASLLFGANLIALTKKDGGVRPIAVGSTLRRLASKIAVRHIKSKLQSVFEPIQLGFGTKGGCEAAVHALRTYLSYDDCEIVVKIDVNNAFNSVNRDAMLTEVKNKILELYQYLLTCYAEPSKLIYRSHELSSEVGCQQGDPLGPAIFSLAINPIIQNLKSKFNVWYLDDGTLGGDVDTVLSDLSDIKTNFENIGLELNFSKCELFIQKTSYGLDNLKSKLNFLAPNIKIVDRKSLCLLGSPIFEESFPDYITNTISKFQSHANCLLEISPHYALIILKFCLFVPKFTYVLRCSPFWKHPNLLSPIDDLVKTSLETILNIQLNEPSWLQASLPIRFGGLGIRKISSVASPAFLSSTHSTSRLIGNVLRALPTNYETAGLEDAKNAFQIACPGKEFPDNLKSQRSWDDIYCDLTYKSILSRSSGPDRARLLAVGTREAGHWLHAHPSPYTGTFLDPTSLRLATGLRLGVTVCTPHTCPCGTDVDRLGHHGLCCQKSAGRFSRHATLNDIIRRSLASINVPALLEPTGIVRDDGKRPDGVSLVPWSLGRMLVWDATCVDTLAPSHLQRTTSKAGAAAENAENLKVIKYGGLGREYNFVPFGVETLGPWGPSAHKLFAEIAKRLVDVTGDRKAGGFLAQRISIAIQRGNAASILGTMPRGPFLSLT

SEQ ID NO: 17786 - protein, 689 aa, Atethmia centrago
MGDAGVQLICSITKLINFMFSGKINADIASLLFGANLIALTKKDGGVRPIAVGSTLRRLASKIAVRHIKSKLQSVFEPIQLGFGTKGGCEAAVHALRTYLSYDDCEIVVKIDVKNAFNSVNRDAMLTEVKNKIPELYQYLLTCYAEPSKLIYRSHELSSEVGCQQGDPLGPAIFSLAINPIIQNLKSKFNVWYLDDGTLGGDVDTVLSDLSDIKTNFENIGLESNFSKCELFIQKTSYGLDNLKSKLNFLAPNIKIVDRKSLCLLGSPIFEESFPDYITNTISKFQSHANCLLEISPHYALIILKFCLFVPKFTYVLRCSPFWKHPNLLSPIDDLVKTSLETILNIQLNEPSWLQASLPIRFGGLGIRKISSVASPAFLSSTHSTSRLIGNVLRALPTNYETAGLDDAKNAFQIACPGKEFPDNLKSQRSWDDIYCDLTYKSILSRSSGPDRARLLAVGTREAGLWLHAHPSPYTGTFLDPTSLRLATGLRLGVTVCTPHTCPCGTDVDRLGHHGLCCQKSAGRFSRHATLNDIIRRSLASINVPALLEPTGIVRDDGKRPDGVSLVPWSLGRMLVWDATCVDTLAPSHLQRTTSKAGAAAENAKNLKVIKYVGLGREYNFVPFGVETLGPWGPSAHKLFAEIAKRLVDVTGDRKAGGFLAQRISIAIQRGNAASILGTMPRGPFLSLT

SEQ ID NO: 17787 - protein, 892 aa, Atethmia centrago
MHTATQSGDGTLNQNYICLHCDRSFQSKRGLNIHISKKHRLCISQNGPALNLDPVSLPAPVSDSPNSTPFHLYLSYLKNNVPVIKRVPRGARISVANHLSGLIKKCVESNQIVDWHNLFLFSYTTLHVKKDEATISLTQKIKNNCLTKTSSPFDSPKRGTLSRIKLIEGKIADGDLKGAARLLFTNDVLSPDTPDTLSTLHSKHPPAPVIPYFFDSPTADQACLEIEGKDVIDAIISFKTGSAAGLDGISPQHLKDLTSYSVGDAGVQLICSITKLINFMFSGKINADIASLLFGANLIALTKKDGGVRPIAVGSTLRRLASKIAVRHIKSKLQSVFEPIQLGFGTKGGCEAAVHALRTYLSYDDCEIVVKIDVKNAFNSVNRDAMLTEVKNKIPELYQYLLTCYAEPSKLIYRSHELSSEVGCQQGDPLGPAIFSLAINPIIQNLKSKFNVWYLDDGTLGGDVDTVLSDLSDIKTNFENIGLELNFSKCELFIQKTSYGLDNLKSKLNFLAPNIKIVDRKSLCLLGSPIFEESFPDYITNTISKFQSHANCLLEISPHYALIILKFCLFVPKFTYVLRCSPFWKHPNLLSPIDDLVKTSLETILNIQLNEPSWLQASLPIRFGGLGIRKISSVASPAFLSSTHSTSRLIGNVLRALPTNYETAGLEDAKNAFQIACPGKEFPDNLKSQRSWDDIYCDLTYKSILSRSSGPDRARLLAVGTREAGHWLHAHPSPYTGTFLDPTSLRLATGLRLGVTVCTPHTCPCGTDVDRLGHHGLCCQKSAGRFSRHATLNDIIRRSLASINVPALLEPTGIVRDDGKRPDGVSLVPWSLGRMLVWDATCVDTLAPSHLQRTTSKAGAAAENAENLKVIKYGGLGREYNFVPFGVETLGP

SEQ ID NO: 17788 - protein, 950 aa, Atethmia centrago
MHTATQSGDGTLNQNYICLHCDRSFQSKRGLNIHISKKHRLCISQNGPALNLDPVSLPAPVSDSPNSTPFHLYLSYLKNNVPVIKRVPRGARISVANHLSGLIKKCVESNQIVDWHNLFLFSYTTLHVKKDEATISLTQKIKNNCLTKTSSPFDSPKRGTLSRIKLIEGKIADGDLKGAARLLFTNDVLSPDTPDTLSALHSKHPPAPVIPYFFDSPTADQACLEIEGKDVIDAIISFKTGSAAGLDGISPQHLKDLTSYSVGDAGVQLICSITKLINFMFSGKINADIASLLFGANLIALTKKDGGVRPIAVGSTLRRLASKIAVRHIKSKLQSVFEPIQLGFGTKGGCEAAVHALRTYLSYDDCEIVVKIDVKNAFNSVNRDAMLTEVKNKIPELYQYLLTCYAEPSKLIYRSHELSSEVGCQQGDPLGPAIFSLAINPIIQNLKSKFNVWYLDDGTLGGDVDTVLSDLSDIKTNFENIGLELNFSKCELFIQKTSYGLDNLKSKLNFLAPNIKIVDRKSLCLLGSPIFEESFPDYINNTISKFQSHANCLLEISPHYALIILKFCLFVPKFTYVLRCSPFWKHPNLLSPIDDLVKTSLETILNIQLNEPSWLQASLPIRFGGLGIRKISSVASPAFLSSTHSTSRLIGNVLRALPTNYETAGLEDAKNAFQIACPGKEFPDNLKSQRSWDDIYCDLTYKSILSRSSGPDRARLLAVGTREAGHWLHAHPSPYTGTFLDPTSLRLATGLRLGVTVCTPHTCPCGTDVDRLGHHGLCCQKSAGRFSRHATLNDIIRRSLASINVPALLEPTGIVRDDGKRPDGVSLVPWSLGRMLVWDATCVDTLAPSHLQRTTSKAGAAAENAENLKVFKYGGLGREYNFVPFGVETLGPWGPSAHKLFAEIAKRLVDVTGDRKAGGFLAQRISIAIQRGNAASILGTMPRGPFLSLT

SEQ ID NO: 17789 - protein, 950 aa, Atethmia centrago
MHTATQSGDGTLNQNYICLHCDRSFQSKRGLNIHISKKHRLCISQNGPALNLDPVSLPAPVSDSPNSTPFHLYLSYLKNNVPVIKRVPRGARISVANHLSGLIKKCVESNQIVDWHNLFLFSYTTLHVKKDEATISLTQKIKNNCLTKTSSPFDSPKRGTLSRIKLIEGKIADGDLKGAARLLFTNDVLSPDTPDTLSALHSKHPPAPVIPYFFDSPTADQACLEIEGKDVIDAIISFKTGSAAGLDGISPQHLKDLTSYSVGDAGVQLICSITKLINFMFSGKINADIASLLFGANLIALTKKDGGVRPIAVGSTLRRSASKIAVRHIKSKLQSVFEPIQLGFGTKGGCEAAVHALRTYLSYDDCEIVVKIDVKNAFNSVNRDAMLTEVKNKIPELYQYLLICYAEPSKLIYRSHELSSEVGCQQGDPLGPAIFSLAINPIIQNLKSKFNVWYLDDGTLGGDVDTVLSDLSDIKTNFENIGLELNFSKCELFIQKTSYGLDNLKSKLNFLAPNIKIVDRKSLCLLGSPIFEESFPDYITNTISKFQSHANCLLEISPHYALIILKFCLFVPKFTYVLRCSPFWKHPNLLSPIDDLVKTSLETILNIQLNEPSWLQASLPIRFGGLGIRKISSVASPAFLSSTHSTSRLIGNVLRALPTNYETAGLEDAKNAFQIACPGKEFPDNLKSQRSWDDIYCDLTYKSILSRSSGPDRARLLAVGTREAGHWLHAHPSPYTGTFLDPTSLRLATGLRLGVTVCTPHTCPCGTDVDRLGHHGLCCQKSAGRFSRHATLNDIIRRSLASINVPALLEPTGIVRDDGKRPDGVSLVPWSLGRMLVWDATCVDTLAPSHLQRTTSKAGAAAENAENLKVIKYGGLGREYNFVPFGVETLGPWGPSAHKLFAEIAKRLVDVTGDRKAGGFLAQRISIAIQRGNAASILGTMPRGPFLSLT

SEQ ID NO: 17790 - protein, 949 aa, Atethmia centrago
MHTATQSGDGTLNQNYICLHCDRSFQSKRGLNIHISKKHRLCISQNGPALLDPVSLPAPVSDSPNSTPFHLYLSYLKNNVPVIKRVPRGARISVANHLSGLIKKCVESNQIVDWHNLFLFSYTTLHVKKDEATISLTQKIKNNCLTKTSSPFDSPKRGTLSRIKLIEGKIADGDLKGAARLLFTNDVLSPDTPDTLSALHSKHPPAPVIPYFFDSPTADQACLEIEGKDVIDAIISFKTGSAAGLDGISPQHLKDLTSYSVGDAGVQLICSITKLINFMFSGKINADIASLLFGANLIALTKKDGGVRPIAVGSTLRRLASKIAVRHIKSKLQSVFEPIQLGFGTKGGCEAAVHALRTYLSYDDCEIVVKIDVKNAFNSVNRDAMLTEVKNKIPELYQYLLTCYAEPSKLIYRSHELSSEVGCQQGDPLGPAIFSLAINPIIQNLKSKFNVWYLDDGTLGGDVDTVLSDLSDIKTNFENIGLELNFSKCELFIQKTSYGLDNLKSKLNFLAPNIKIVDRKSLCLLGSPIFEESFPGYITNTISKFQSHANCLLEISPHYALIILKFCLFVPKFTYVLRCSPFWKHPNLLSPIDDLVKTSLETILNIQLNEPSWLQASLPIRFGGLGIRKISSVASPAFLSSTHSTSRLIGNVLRALPTNYETAGLEDAKNAFQIACPGKEFPDNLKSQRSWDDIYCDLTYKSILSRSSGPDRARLLAVGTREAGHWLHAHPSPYTGTFLDPTSLRLATGLRLGVTVCTPHTCPCGTDVDRLGHHGLCCQKSAGRFSRHATLNDIIRRSLASINVPALLEPTGIVRDDGKRPDGVSLVPWSLGRMLVWDATCVDTLAPSHLQRTTSKAGAAAENAENLKVIKYGGLGREYNFVPFGVETLGPWGPSAHKLFAEIAKRLVDVTGDRKAGGFLAQRISIAIQRGNAASILGTMPRGPFLSLT

SEQ ID NO: 17791 - protein, 950 aa, Atethmia centrago
MHTATQSGDGTLNQNYICLHCDRSFQSKRGLNIHISKKHRLCISQNGPALNLDPVSLPAPVSDSPNSTPFHLYLSYLKNNVPVIKRVPRGARISVANHLSGLIKKCVESNQIVDWHNLFLFSYTTLHVKKDEATISLTQKIKNNCLTKTSSPFDSPKKGTLSRIKLIEGKIADGDLKGAARLLFTNDVLSLDTPDTLSALHSKHPPAPVIPYFFDSPTADQACLEIEGKDVIDAIISFKTGSAAGLDGISPQHLKDLTSYSVGDAGVQLICSITKLINFMFSGKINADIASLLFGANLIALTKKDGGVRPIAVGSTLRRLASKIAVRHIKSKLQSVFEPIQLGFGTKGGCEAAVHALRTYLSYDDCEIVVKIDVKNAFNSVNRDAMLTEVKNKIPELYQYLLTCYAEPSKLIYRSHELSSEVGCQQGDPLGPAIFSLAINPIIQNLKSKFNVWYLDDGTLGGDVDTVLSDLSDIKTNFENIGLELNFSKCELFIQKTSYGLDNLKSKLNFLAPNIKIVDRKSLCLLGSPIFEESFPDYITNTISKFQSHANCLLEISPHYALIILKFCLFVPKFTYVLRCSPFWKHPNLLSPIDDLVKTSLETILNIQLNEPSWLQASLPIRFGGLGIRKISSVASPAFLSSTHSTPRLIGNVLRALPTNYETAGLEDAKNAFQIACPGKEFPDNLKSQRSWDDIYCDLTYKSILSRSSGPDRARLLAVGTREAGHWLHAHPSPYTGTFLDPTSLRLATGLRLGVTVCTPHTCPCGTDVDRLGHHGLCCQKSAGRFSRHATLNDIIRRSLASINVPALLEPTGIVRDDGKRPDGVSLVPWSLGRMLVWDATCVDTLAPSHLQRTTSKAGAAAENAENLKVIKYGGLGREYNFVPFGVETLGPWGPSAHKLFAEIAKRLVDVTGDRKAGGFLAQRISIAIQRGNAASILGTMPRGPFLSLT

SEQ ID NO: 17792 - protein, 950 aa, Atethmia centrago
MHTATQSGDGTLNQNYICLHCDRSFQSKRGLNIHISKKHRLCISQNGPALNLDPVSLPAPVSDSPNSTPFHLYLSYLKNNVPVIKRVPRGARISVANHLSGLIKKCVESNQIVDWHNLFLFSYTTLHVKKDEATISLTQKIKNNCLTKTSSPFDSPKRGTLSRIKLIEGKIADGDLKGAARLLFTNDVLSPDTPDTLSALHSKHPPAPVIPYFFDSPTADQACLEIEGKDVIDAIISFKTGSAAGLDGISPQHLKDLTSYSVGDAGVQLICSITKLINFIFSGKINADIASLLFGANLIALTKKDGGVRPIAVGSTLRRLASKIAVRHIKSKLQSVFEPIQLGFGTKGGCEAAVHALRTYLSYDDCEIVVKIDVKNAFNSVNRDAMLTEVKNKIPELYQYLLTCYAEPSKLIYRSHELSSEVGCQQGDALGPAIFSLAINPIIQNLKSKFNVWYLDDGTLGGDVDTVLSDLSDIKTNFENIGLELNFSKCELFIQKTSYGLDNLKSKLNFLAPNIKIVDRKSLCLLGSPIFEESFPDYITNTISKFQSHANCLLEISPHYALIILKFCLFVPKFTYVLRCSPFWKHPNLLSPIDDLVKTSLETILNIQLNEPSWLQASLPIRFGGLGIRKISSVASPAFLSSTHSTSRLIGNVLRALPTNYETAGLEDAKNAFQIACPGKEFPDNLKSQRSWDDIYCDLTYKSILSRSSGPDRARLLAVGTREAGHWLHAHPSPYTGTFLDPTSLRLATGLRLGVTVCTPHTCPCGTDVDRLGHHGLCCQKSAGRFSRHATLNDIIRRSLASINVPALLEPTGIVRDDGKRPDGVSLVPWSLGRMLVWDATCVDTLAPSHLQRTTSKAGAAAENAENLKVIKYGGLGREYNFVPFGVETLGPWGPSAHKLFAEIAKRLVDVTGDRKAGGFLAQRISIAIQRGNAASILGTMPRGPFLSLT

SEQ ID NO: 17793 - protein, 950 aa, Atethmia centrago
MHTATQSGDGTLNQNYICLHCDRSFQSKRGLNIHISKKHRLCISQNGPALNLDPVSLPAPVSDSPNSTPFHLYLSYLKNNVPVIKRVPRGARISVANHLSGLIKKCVESNQIVDWHNLFLFSYTTLHVKKDEATISLTQKIKNNCLTKTSSPFDSPKRGTLSRIKLIEGKIADGDLKGAARLLFTNDVLSPDTPDTLSALHSKHPPAPVIPYFFDSPTADQACLEIEGKDVIDAIISFKTGSAAGLDGISPQHLKDLTSYSVGDAGVQLICSITKLINFMFSGKINADIASLLFGANLIALTKKDGGVRPIAVGSTLRRLASKIAVRHIKSKLQSVFEPIQLGFGTKGGCEAAVHALRTYLSYDDCEIVVKIDVKNAFNSVNRDAMLTEVKNKIPELYQYLLTCYAEPSKLIYRSHELSSEVGCQQGDPLGPAIFSLAINPIIQNLKSKFNVWYLDDGTLGGDVDTVLSDLSDIKTNFENIGLELNFSKCELFIQKSSYGLDNLKSKLNFLAPNIKIVDRKSLCLLGSPIFEESFPDYITNTISKFQSHANCLLEISPHYALIILKFCLFVPKFTYVLRCSPFWKHPNLLSPIDDLVKTSLETILNIQLNEPSWLQASLPIRFGGLGIRKISSVASPAFLSSTHSTSRLIGNVLRALPTNYETAGLEDAKNAFQIACPGKEFPDNLKSQRSWDDIYCDLTYKSILSRSSGPDRARLLAVGTREAGHWLHAHPSPYTGTFLDPTSLRLATGLRLGVTVCTPHTCPCGTDVDRLGHHGLCCQKSAGRFSRHATLNDIIRRSLASINVPALLEPTGIVRDDGKRPDGVSLVPWSLGRMLVWDATCVDTLAPSHLQRTTSKAGAAAENAENLKVIKYGGLGREYNFVPFGVETLGPWGPSAHNLFAEIAKRLVDVTGDRKAGGFLAQRISIAIQRGNAASILGTMPRGPFLSLT

SEQ ID NO: 17794 - protein, 950 aa, Atethmia centrago
MHTATQSGDGTLNQNYICLHCDRSFQSKRGLNIHISKKHRLCISQNGPALNLDPVSLPAPVSDSPNSTPFHLYLSYLKNNVPVIKRVPRGARISVANHLSGLIKKCVESNQIVDWHNLFLFSYTTLHVKKDEATISLTQKIKNNCLTKTSSPFDSPKRGTLSRIKLIEGKIADGDLKGAARLLFTNDVLSPDTPDTLSALHSKHPPAPVIPYFFDSPTADQACLEIEGKDVIDAIISFKTGSAAGLDGISPQHLKDLTSYSVGDAGVQLICSITKLINFMFSGKINADIASLLFGANLIALTKKDGGVRPIAVGSTLRRLASKIAVRHIKSKLQSVFEPIQLGFGTKGGCEAAVHALRTYLSYDDCEIVVKIDVKNAFNSVNRDAMLTEVKNKIPELYQYLLTCYAEPSKLIYRSHELSSEVGCQQGDPLGPAIFSLAINPIIQNLKSKFNVWYLDDGTLGGDVDTVLSDLSDIKTNFENIGLELNFSKCELFIQKTSYGLDNLKSKLNFLAPNIKIVDRKSLCLLGSPIFEESFPDYITNTISKFQSHANCLLEISPHYALIILKFCLFVPKFTYVLRCSPFWKHPNLLSPIDDLVKTSLETILNIQLNEPSWLQASLPIRFGGLGIRKISSVASPAFLSSTHSTSRLIGNVLRALPTNYDTAGLEDAKNAFQIACPGKEFPDNLKSQRSWDDIYCDLTYKSILSRSSGPDRARLLAVGTREAGHWLHAHPSPYTGTFLDPTSLRLATGLRLGVTVCTPHTCPCGTDVDRLGHHGLCCQKSAGRFSRHATLNDIIRRSLASINVPALLEPTGIVRDDGKRPDGVSLVPWSLGRMLVWDATCVDTLAPSHLQRTTSKAGAAAENAENLKVIKYGGLGREYNFVPFGVETLGPWGPSAHKLFAEIAKRLVDVTGDRKAGGFLAQRISIAIQRGNAASILGTMPRGPFLSLT

SEQ ID NO: 17795 - protein, 671 aa, Atethmia centrago
MFSGKINADIASLLFGANLIALTKKDGGVRPIAVGSTLRRLASKIAVRHIKSKLQSVFEPIQLGFGTKGGCEAAVHALRTYLSYDDCEIVVKIDVKNAFNSVNRDAMLTEVKNKIPELYQYLLTCYAEPSKLIYRSHELSSEVGCQQGDPFGPAIFSLAINPIIQNLKSKFNVWYLDDGTLGGDVDTVLSDLSDIKTNFENIGLELNFSKCELFIQKTSYGLDNLKSKLNFLAPNIKIVDRKSLCLLGSPIFEESFPDYITNTISKFQSHANCLLEISPHYALIILKFCLFVPKFTYVLRCSPFWKHPNLLSPIDDLVKTSLETILNIQLNEPSWLQASLPIRFGGLGIRKISSVASPAFLSSTHSTSRLIGNVLRALPTNYETAGLEDAKNAFQIACPGKEFPDNLKSQRSWDDIYCDLTYKSILSRSSGPDRARLLAVGTREAGHWLHAHPSPYTGTFLDPTSPRLATGLRLGVTVCTPHTCPCGTDVDRLGHHGLCCQKSAGRFSRHATLNDIIRRSLASINVPALLEPTGIVRDDGKRPDGVSLVPWSLGRMLVWDATCVDTLAPSHLQRTTSKAGAAAENAENLKVIKYGGLGREYNFVPFGVETLGPWGPSAHKLFAEIAKRLVDVTGDRKAGGFLAQRISIAIQRGNAASILGTMPRGPFLSLT

SEQ ID NO: 17796 - protein, 948 aa, Atethmia centrago
MHTATQSGDGTLNQNYICLHCERSFQSKRGLNIHISKKHRLCISQNGPALNLDPVSLPVSDSPNSTPFHLYLSYLKNNVPVIKRVPRGARISVANHLSGLIKKCVESNQIVDWHNLFLFSYTTLHVKKDEATISLTQKIKNNCLTKTSSPFDSPKRGTLSRIKLIEGKIADGDIKGAARLLFTNDVLSPDTPDTLSALHSKHPPAPVIPYFFDSPTADQACLEIEGKDVIDAIISFKTGSAAGLDGISPQHLKDLTSYSVGDAGVQLICSITKLINFMFSGKINADIASLLFGANLIALTKKDGGVRPIAVGSTLRRLASKIAVRHIKSKLQSVFEPIQLGFGTKGGCEAAVHALRTYLSYDDCEIVVKIDVKNAFNSVNRDAMLTEVKNKIPELYQYLLTCYAEPSKLIYRSHELSSEVGCQQGDPLGPAIFSLAINPIIQNLKSKFNVWYLDDGTLGGDVDTVLSDLSDIKTNFENIGLELNFSKCELFIQKTSYGLDNLKSKLNFLAPNIKIVDRKSLCLLGSPIFEESFPDYITNTISKFQSHANCLLEISPHYALIILKFCLFVPKFTYALRCSPFWKHPNLLSPIDDLVKTSLETILNIQLNDPSWLQASLPIRFGGLGIRKISSVASPAFLSSTHSTSRLIGNVLRALPTNYETAGLEDAKNAFQIACPGKEFPDNLKSQRSWDDIYCDLTYKSILSRSSGPDRARLLAVGTREAGHWLHAHPSQYTGTFLDPTSLRLATGLRLGVTVCTPHTCPCGTDVDRLGHHGLCCQKSAGRFSRHATLNDIIRRSLASINVPALLELTGIVRDDGKRPDGVSLVPWSLGRMLVWDATCVDTLAPSHLQRTTSKAGAAAENAENLKVIKYGGLGREYNFVPFGVETLGPWGPSAHKLFAEIAKRLVDVTGDRKAGGFLAQRISIAIQRGNAASILGTMPRGPFLSLT

SEQ ID NO: 17797 - protein, 950 aa, Atethmia centrago
MHTATQSGDGTLNQNYICLHCDRSFQSKRGLNIHISKKHRLCISQNGPALNLDPVSLPAPVSDSPNSTPFHLYLSYLKNNVPVIKRVPRGARISVANHLSGLIKKCVESNQIVDWHNLFLFSYTTLHVKKDEATISLTQKIKNNCLTKTSSPFDSPKRGTLSRIKLIEGKIADGDLKGAARLLFTNDVLSPDTPDTLSALHSKHPPAPVIPYFFDSPTADQACLEIEGKDVIDAIISFKTGSAAGLDGISPQHLKDLTSYSVGDAGVQLICSITKLINFMFSGKINADIASLLFGANLIALTKKDGGVRPIAVGSTLRRLASKIAVRHIKSKLQSVFEPIQLGFGTKGGCEAAVHALRTYLSYDDCEIVVKIDVKNAFNSVNRDAMLTEVKNKIPELYQYLLTCYAEPSKLIYRSHELSSEVGCQQGDPLGPAIFSLAINPIIQNLKSKFNVWYLDDGTLGGDVDTVLSDLSDIKTNFENIGLELNFSKCELFIQKTSYGLDNLKSKLNFLAPNIKIVDRKSLCLLGSPIFEESFPDYITNTISKFQSHANCLLEISPHYALIILKFCLFVPKFTYVLRCSPFWKHPNLLSPIDDLVKTSLETILNIQLNEPSWLQASLPIRFGGLGIRKISSVASPAFLSSTHSTSRLIGNVLRALPTNYETAGLEDAKNAFQIACPGKEFPDNLKSQRSWDDIYCDLTYKSILSRSSGPDRARLLAVGTREAGHWLHAHPSPYTGTFLDPTSLRLATGLRLGVTVCTPHTCPCGTDVDRLGHHGLCCQKSAGRFSRHATLNDIIRRSLASINVPALLEPTGIVRDDGKRPDGVSLVPWSLGRMLVWDATSVDTLAPSHLQRTTSKAGAAAENAENLKVIKYGGLGREYNFVPFGVETLGPWGPSAHKLFAEIAKRLVDVTGDRKAGGFLAQRISIAIQRGNAASILGTMPRGPFLSLT

SEQ ID NO: 17798 - protein, 950 aa, Atethmia centrago
MHTATQSGDGTLNQNYICLHCDRSFQSKRGLNIHISKKHRLCISQNGPALNLDPVSLPAPVSDSPNSTPFHLYLSYLKNNVPVIKRVPRGARISVANHLSGLIKKCVESNQIVDWHNLFLFSYTTLHVKKDEATISLTQKIKNNCLTKTSSPFDSPKRGTLSRIKLIEGKIADGDLKGAARLLFTNDVLSPDTPDTLSALHSKHPPAPVIPYFFDSPTADQACLEIEGKDVIDAIISFKTGSAAGLDGISPQHLKDLTSYSVGDAGVQLICSITKLINFMFSGKINADIASLLFGANLIALTKKDGGVRPIAVGSTLRRLASKIAVRHIKSKLQSVFEPIQLGFGTKGGCEAAVHALRTYLSYDDCEIVVKIDVKNAFNSVNRDAMLTEVKNKIPELYQYLLTCYAEPSKLIYRSHELSSEVGCQQGDPFGPAIFSLAINPIIQNLKSKFNVWYLDDGTLGGDVDTVLSDLSDIKTNFENIGLELNFSKCELFIQKTSYGLDNLKSKLNFLAPNIKIVDRKSLCLLGSPIFEESFPDYITNTISKFQSHANCLLEISPHYALIILKFCLFVPKFTYVLRCSPFWKHPNLLSPIDDLVKTSLETILNIQLNEPSWLQASLPIRFGGLGIRKISSVASPAFLSSTHSTSRLIGNVLRALPTNYETAGLEDAKNAFQIACPGKEFPDNLKSQRSWDDIYCDLTYKSILSRSSGPDRARLLAVGTREAGHWLHAHPSPYTGTFLDPTSLRLATGLRLGVTVCTPHTCPCGTDVDRLGHHGLCCQKSAGRFSRHATLNDIIRRSLASINVPALLEPTGIVRDDGKRPDGVSLVPWSLGRMLVWDATCVDTLAPSHLQRTTSKAGAAAENAENLKVIKYGGLGREYNFVPFGVETLGPWGPSAHKLFAEIAKRLVDVTGDRKAGGFLAQRISIAIQRGNAASILGTMPRGPFLSLT

SEQ ID NO: 17799 - protein, 950 aa, Atethmia centrago
MHTATQSGDGTLNQNYICLHCDRSFQSKRGLNIHISKKHRLCISQNGPALNLDPVSLPAPVSDSPNSTPFHLYLSCLKNNVPVIKRVPRGARISVANHLSGLIKKCVESNQIVDWHNLFLFSYTTLHVKKDEATISLTQKIKNNCLTKTSSPFDSPKRGTLSRIKLIEGKIADGDLKGAARLLFTNDVLSPDTPDTLSALHSKHPPAPVIPYFFDSPTADQACLEIEGKDVIDAIISFKTGSAAGLDGISPQHLKDLTSYSVGDAGVQLICSITKLINFMFSGKINADIASLLFGANLIALTKKDGGVRPIAVGSTLRCLASKIAVRHIKSKLQSVFEPIQLGFGTKGGCEAAVHALRTFLSYDDCEIVVKIDVKNAFNSVNRDAMLTEVKNKIPELYQYLLTCYAEPSKLIYRSHELSSEVGCQQGDPLGPAIFSLAINPIIQNLKSKFNVWYLDDGTLGGDVDTVLSDLSDIKTNFENIGLELNFSKCELFIQKTSYGLDNLKSKLNFLAPNIKIVDRKSLCLLGSPIFEESFPDYITNTISKFQSHANCLLEISPHYALIILKFCLFVPKFTYVLRCSTFWKHPNLLSPINDLVKTSLETILNIQLNEPSWLQASLPIRFGGLGIRKISSVASPAFLSSTHSTSRLIGNVLRALPTNYETAGLEDAKNAFQIACPGKEFPENLKSQRSWDDIYCDLTYKSILSRSSGPDRARLLAVGTREAGHWLHAHPSPYTGTFLDPTSLRLATGLRLGVTVCTPHTCPCGTDVDRLGHHGLCCQKSAGRFSRHATLNDIIRRSLASINVPALLEPTGIVRDDGKRPDGVSLVPWSLGRMLVWDATCVDTLAPSHLQRTTSKAGAAAENAENLKVIKYGGLGREYNFVPFGVETLGPWGPSAHKLFAEIAKRLVDVTGDRKAGGFLAQRISIAIQRGNAASILGTMPRGPFLSLT

SEQ ID NO: 17800 - protein, 950 aa, Atethmia centrago
MHTATQSGDGTLNQNYICLHCDRSFQSKRGLNIHISKKHRLCISQNGPALNLDPVSLPAPVSDSPNSTPFHLYLSYLKNNVPVIKRVPRGARISVANHLSGLIKKCVESNQIVDWHNLFLFSYTTLHVKKDEATISLTQKIKNNCLTKTTSPFDSPKRGTLSRIKLIEGKIADGDLKGAARLLFTNDVLSPDTPDTLSALHSKHPPAPVIPYFFDSPTADQACLEIEGKDVIDAIISFKTGSAAGLDGISPQHLKDLTSYSVGDAGVQLICSITKLINFMFSGKINADIASLLFGANLIALTKKDGGVRPIAVGSTLRRLASKIAVRHIKSKLQSVFEPIQLGFGTKGGCEAAVHALRTYLSYDDCEIVVKIDVKNAFNSVNRDAMLTEVKNKIPELYQYLLTCYAEPSKLIYRSHELSSEVGCQQGDPLGPAIFSLAINPIIQNLKSKFNVWYLDDGTLGGDVDTVLSDLSDIKTNFENIGLELNFSKCELFIQKTSYGLDNLKSKLNFLAPNIKIVDRKSLCLLGSPIFEESFPDYITNTISKFQSHANCLLEISPHYALIILKFCLFVPKFTYVLRCSPFWKHPNLLSPIDDLVKTSLETILNIQLNEPSWLQASLPIRFGGLGIRKISSVASPAFLSSTHSTSRLIGNVLRALPTNYETAGLDDAKNAFQIACPGKEFPDNLKSQRSWDDIYCDLTYKSILSRSSGPDRARLLAVGTREAGLWLHAHPSPYTGTFLDPTSLRLATGLRLGVTVCTPHTCPCGTDVDRLGHHGLCCQKSAGRFSRHATLNDIIRRPLASINVPALLEPTGIVRDDGKRPDGVSLVPWSLGRMLVWDATCVDTLAPSHLQRTTSKAGAAAENAENLKVIKYVGLGREYNFVPFGVETLGPWGPSAHKLFAEIAKRLVDVTGDRKAGGFLAQRISIAIQRGNAASILGTMPRGPFLSLT

SEQ ID NO: 17801 - protein, 950 aa, Atethmia centrago
MHTATQSGDGTLNQNYICLHCDRSFQSKRGLNIHISKKHRLCISQNGPALNLDPVSLPAPVSDSPNSTPFHLYLSYLKNNVPVIKRVPRGARISVANHLSGLIKKCVESNQIVDWHNLFLFSYTTLHVKKDEATISLTQKIKNNCLTKTSSPFDSPKRGTLSRIKLIEGKIADGDLKGAARLLFTNDVLSPDTPDTLSALHSKHPLAPVIPYFFDSPTADQACLEIEGKDVIDAIISFKTGSAAGLDGISPQHLKDLTSYSVGDAGVQLICSITKLINFMFSGKINADIASLLFGANLIALTKKDGGVRPIAVGSTLRRLASKIAVRHIKSKLQSVFEPIQLGFGTKGGCEAAVHALRTYLSYDDCEIVVKIDVKNAFNSVNRDAMLTEVKNKIPELYQYLLTCYAEPSKLIYRSHELSSEVGCQQGDPLGPAIFSLAINPIIQNLKSKFNVWYLDDGTLGGDVDTVLSDLSDIKTNFENIGLELNFSKCELFIQKTSYGLDNLKSKLNFLAPNIKIVDRKSLCLLGSPIFEESFPDYITNTISKFQSHANCLLEISPHYALIILKFCLFVPKFTYVLRCSPFWKHPNLLSPIDDLVKTSLETILNIQLNEPSWLQASLPIRFGGLGIRKISSVASPAFLSSTHSTSRLIGNVLRALPTNHETAGLEDAKNAFQIACPGKEFPDNLKSQRSWDDIYCDLTYKSILSRSSGPDRARLLAVGTREAGHWLHAHPSPYTGTFLDPTSLRLATGLRLGVTVCTPHTCPCGTDVDRLGHHGLCCQKSAGRFSRHATLNDIIRRSLASINVPALLEPTGIVRVDGKRPDGVSLVPWSLGRMLVWDATCVDTLAPSHLQRTTSKAGAAAENAENLKVIKYGGLGREYNFVPFGVETLGPWGPSAHKLFAEIAKRLVDVTGDRKAGGFLAQRISIAIQRGNAASILGTMPRGPFLSLT

SEQ ID NO: 17802 - protein, 950 aa, Atethmia centrago
MHTATQSGDGTLNQNYICLHCDRSFQSKRGLNIHISKKHRLCISQNGPALNLDPVSLPAPVSDSPNSTPFHLYLSYLKNNVPVIKRVPRGARISVANHLSGLIKKCVESNQIVDWHNLFLFSYTTLHVKKDEATISLAQKIKNNCLTKTSSPFDSPKRGTLSRIKLIEGKIADGDLKGAARLLFTNDVLSPDTPDTLSALHSKHPPAPVIPYFFDSPTADQACLEIEGKDVIDAIISFKTGSAAGLDGISPQHLKDLTSYSVGDAGVQLICSITKLINFMFSGKINADIASLLFGANLIALTKKDGGVRPIAVGSTLRRLASKIAVRHIKSKLQSVFEPIQLGFGTKGGCEAAVHALRTYLSYDDCEIVVKIDVKNAFNSVNRDAMLTEVKNKIPELYQYLLTCYAEPSKLIYRSHELSSKVGCQQGDPLGPAIFSLAINPIIQNLKSKFNVWYLDDGTLGGDVDTVLSDLSDIKTNFENIGLELNFSKCELFIQKTSYGLDNLKSKLNFLAPNIKIVDRKSLCLLGSPIFEESFPDYITNTISKFQSHANCLLEISPHYALIILKFCLFVPKFTYVLRCSPFWKHPNLLSPIDDLVKTSLETILNIQLNEPSWLQASLPIRFGGLGIRKISSVASPAFLSSTHSTSRLIGNVLRALPTNYETAGLEDAKNAFQIACPGKEFPDNLKSQRSWDDIYCDLTYKSILSRSSGPDRARLLAVGTREAGHWLHAHPSPYTGTFLDPTSLRLATGLRLGVTVCTPHTCPCGTDVDRLGHHGLCCQKSAGRFSRHATLNDIIRRSLASINVPALLEPTGIVRDDGKRPDGVSLVPWSLGRMLVWDATCVDTLAPSHLQRTTSKAGAAAENAENLKVIKYGGLGREYNFVPFGVETLGPWGPSAHKLFAEIAKRLVDVTGDRKAGGFLAQRISIAIQRGNAASILGTMPRGPFLSLT

SEQ ID NO: 17803 - protein, 906 aa, Atethmia centrago
MHTATQSGDGTLNQNYICLHCDRSFQSKRGLNIHISKKHRLCISQNGPALNLDPVSLPAPVSDSPNSTPFHLYLSYLKNNVPVIKRVPRGARISVANHLSGLIKKCVESNQIVDWHNLFLFSYTTLHVKKDEATISLTQKIKNNCLTKTSSPFDSPKRGTLSRIKLIEGKIADGDLKGAARLLFTNDVLSPDTPDTLSALHSKHPPAPVIPYFFDSPTADQACLEIEGKDVIDAIISFKTGSAAGLDGISPQHLKDLTSYSVGDAGVQLICSITKLINFMFSGKINADIASLLFGANLIALTKKDGGVRPIAVGSTLRRLASKIAVRHIKSKLQSVFEPIQLGFGTKGGCEAAVHALRTYLSYDDCEIVVKIDVKNAFNSVNRDAMLTEVKNKIPELYQYLLTCYAEPSKLIYRSHELSSEVGCQQGDPLGPAIFSLAINPIIQNLKSKFNVWYLDDGTLGGDVDTVLSDLSDIKTNFENIGLELNFSKCELFIQKTSYGLDNLKSKLNFLAPNIKIVDRKSLCLLGSPIFEESFPDYITNTISKFQSHANCLLEISPHYALIILKFCLFVPKFTYVLRCSPFWKHPNLLSPIDDLVKTSLETILNIQLNEPYWLQASLPIRFGGLGIRKISSVASPAFLSSTHSTSRLIGNVLRALPTNYETAGLEDAKNAFQIACPGKEFPDNLKSQRSWDDIYCDLTYKSILSRSSGPDRARLLAVGTREAGHWLHAHPSPYTGTFLDPTSLRLATGLRLGVTVCTPHTCPCGTDVDRLGHHGLCCQKSAGRFSRHATLNDIIRRSLASINVPALLEPTGIVRDDGKRPDGVSLVPWSLGRMLVWDATCVDTLAPSHLQRTTSKAGAAAENAENLKVIKYALAESTTLCPLASRPSVRGVPVRISYLRKSRNV

SEQ ID NO: 17804 - protein, 950 aa, Atethmia centrago
MHTATQSGDGTLNQNYICLHCDRSFQSKRGLNIHISKKHRLCISQNGPALNLDPVSLPAPVSDSPNSTPFHLYLSYLKNNVPVIKRVPRGARISVANHLSGLIKKCVESNQIVDWHNLFLFSYTTLHVKKDEATISLTQKIKNNCLTKTSSPFDSPKRGTLSRIKLIEGKIADGDLKGAACLLFTNDVLSPDTPDTLSALHSKHPPAPVIPYFFDSPTADQACLEIEGKDVIDAIISFKTGSAAGLDGISPQHLKDLTSYSVGDAGVQLICSITKLINFIFSGKINADIASLLFGANLIALTKKDGGVRPIAVGSTLRRLASKIAVRHIKSKLQSVFEPIQLGFGTKGGCEAAVHALRTYLSYDDCEIVVKIDVKNAFNSVNRDAMLTEVKNKIPELYQYLLTCYAEPSKLIYRSHELSSEVGCQQGDPLGPAIFSLAINPIIQNLKSKFNVWYLDDGTLGGDVDTVLSDLSDIKTNFENIGLELNFSKCELFIQKTSYGLDNLKSKLNFLAPNIKIVDRKSLCLLGSPIFEESFPDYITNTISKFQSHANCLLEISPHYALIILKFCLFVPKFTYVLRCSPFWKHPNLLSPIDDLVKTSLETILNIQLNEPSWLQASLPIRFGGLGIRKISSVASPAFLSSTHSTSRLIGNVLRALPTNYETAGLEDAKNAFQIACPGKEFPDNLKSQRSWDDIYCDLTYKSILSRSSGPDRARLLAVGTREAGHWLHAHPSPYTGTFLDPTSLRLATGLRLGVTVCTPHTCPCGTDVDRLGHHGLCCQKSAGRFSRHATLNDIIRRSLASINVPALLEPTGIVRDDGKRPDGVSLVPWSLGRMLVWDATCVDTLAPSHLQRTTSKAGAAAENAENLKVIKYGGLGREYNFVPFGVETLGPWGPSAHKLFAEIAKRLVDVTGDRKAGGFLAQRISIAIQRGNAASILGTMPRGPFLSLT

SEQ ID NO: 17805 - protein, 950 aa, Atethmia centrago
MHTATQSGDGTLNQNYICLHCDRSFQSKRGLNIHISKKHRLCISQNDPALNLDPVSLPAPVSDSPNSTPFHLYLSYLKNNVPVIKRVPRGARISVANHLSGLIKKCVESNQIVDWHNLFLFSYTTLHVKKDEATISLTQKIKNNCLTKTSSPFDSPKRGTLSRIKLIEGKIADGDLKGAARLLFTNDVLSPDTPDTLSALHSKHPPAPVIPYFFDSPTADQACLEIEGKDVIDAIISFKTGSAAGLDGISPQHLKDLTSYSVGYAGVQLICSITKLINFMFSGKINADIASLLFGANLIALTKKDGGVRPIAVGSTLRRLASKIAVRHIKSKLQSVFEPIQLGFGTKGGCEAAVHALRTYLSYDDCEIVVKIDVKNAFNSVNRDAMLTEVKNKIPELYQYLLTCYAEPSKLIYRSHELSSEVGCQQGDPLGPAIFSLAINPIIQNLKSKFNVWYLDDGTLGGDVDTVLSDLSDIKTNFENIGLELNFSKCELFIQKTSYGLDNLKSKLNFLAPNIKIVDRKSLCLLGSPIFEESFPDYITNTISKFQSHANCLLEISPHYALIILKFCLFVPKFTYVLRCSPFWKHPNLLSPIDDLVKTSLETILNIQLNEPSWLQASLPIRFGGLGIRKISSVASPAFLSSTHSTSRLIGNVLRALPTNYETAGLEDAKNAFQIACPGKEFPDNLKSQRSWDDIYCDLTYKSILSRSSGPDRARLLAVGTREAGHWLHAHPSPYTGTFLDPTSLRLATGLRLGVTVCTPHTCPCGTDVDRLGHHGLCCQKSAGRFSRHATLNDIIRRSLASINVPALLEPTGIVRDDGKRPDGVSLVPWSLGRMLVWDATCVDTLAPSHLQRTTSKAGAAAENAENLKVIKYGGLGREYNFVPFGVETLGPWGPSAHKLFAEIAKRLVDVTGDRKAGGFLAQRISIAIQRGNAASILGTMPRGPFLSLT

SEQ ID NO: 17806 - protein, 950 aa, Atethmia centrago
MHTATQSGDGTLNQNYICLHCDRSFQSKRGLNIHISKKHRLCISQNGPALNLDPVSLPAPISDSPNSTPFHLYLSYLKNNVPVIKRVPRGARISVANHLSGLIKKCVESNQIVDWHNLFLFSYTTLHVKKDEATISVTQKIKNNCLTKTSSPFDSPKRGTLSRIKLIEGKIADGDLKGAARLLFTNDVLSPDTPDTLSALHSKHPPAPVIPYFFDSPTADQACLEIEGKDVIDAIISFKTGSAAGLDGISPQHLKDLTSYSVGDAGVQLIYSITKLINFMFSGKINADIASLLFGANLIALTKKDEGVRPIAVGSTLRRLASKIAVRHIKSKLQSVFEPIQLGFGTKGGCEAAVHALRTYLSYDDCEIVVKIDVKNAFNSVNRDAMLTEVKNKIPELYQYLLTCYAEPSKLIYRSRELSSEVGCQQGDPLGPAIFSLAINPIIQNLKSKFNVWYLDDGTLGGDVDTVLSDLSDIKTNFENIGLELNFSKCELFIQKTSYGLDNLKSKLNFLAPNIKIVDRKSLCLLGSPIFEESFPDYITNTISKFQSHANCLLEISPHYALIILKFCLFVPKFTYVLRCSPFWKHPNLLSPIDDLVKTSLETILNIQLNEPSWLQASLPIRFGGLGIRKISSVASPAFLSSTHSTSRLIGNVLRALPTNYETAGLEDAKNAFQIACPGKEFPDNLKSQRSWDDIYCDLTYKSILSRSSGLDRARLLAVGTREAGHWLHAHPSPYTGTFLDPTSLRLATGLRLGVTVCTPHTCPCGTDVDRLGHHGLCCQKSAGRFSRHATLNDIIRRSLASINVPALLEPTGIVRDDGKRPDGVSLVPWSLGRMLVWDATCVDTLAPSHLQRTTSKAGAAAENAENLKVIKYGGLGREYNFVPFGVETLGPWGPSAHKLFAEIAKRLVDVTGDRKAGGFLAQRISIAIQRGNAASILGTMPRGPFLSLT

SEQ ID NO: 17807 - protein, 950 aa, Atethmia centrago
MHTATQSGDGTLNQNYICLHCDRSFQSKRGLNIHISKKHRLCISQNGPALNLDPVSLPAPVSDSPNSTPFHLYLSYLKNNVPVIKRVPRGARISVANHLSGLIKKCVESNQIVDWHNLFLFSYTTLHVKKDEATISLTQKIKNNCLTKTTSPFDSPKRGTLSRIKLIEGNIADGDLKGAARLLFTNDVLSPDTPDTLSALHSKHPPAPVIPYFFDSPTADQACLEIEGKDVIDAIISFKTGSAAGLDGISPQHLKDLTSYSVGDAGVQLICSITKLINFMFSGKINADIASLLFGANLIALTKKDGGVRPIAVGSTLRRLASKIAVRHIKSKLQSVFEPIQLGFGTKGGCEAAVHALRTYLSYDDCEIVVKIDVKNAFNSVNRDAMLTEVKNKIPELYQYLLTCYAEPSKLIYRSHELSSEVGCQQGDPLGPAIFSLAINPIIQNLKSKFNVWYLDDGTLGGDVDTVLSDLSDIKTNFENIGLELNFSKCELFIQKTSYGLDNLKSKLNFLAPNIKIVDRKSLCLLGSPIFEESFPDYITNTISKFQSHANCLLEISPHYALIILKFCLFVPKFTNVLRCSPFWKHPNLLSPIDDLVKTSLETILNIQLNEPSWLQASLPIRFGGLGIRKISSVASPAFLSSTHSTSRLIGNVLRALPTNYETAGLDDAKNAFQIACPGKEFPDNLKSQRSWDDIYCDLTYKSILSRSSGPDRARLLAVGTREAGLWLHAHPSPYTGTFLDPTSLRLATGLRLGVTVCTPHTCPCGTDVDRLGHHGLCCQKSAGRFSRHATLNDIIRRSLASINVPALLEPTGIVRDDGKRPDGVSLVPWNLGRMLVWDATCVDTLAPSHLQRTTSKAGAAAENAENLKVIKYVGLGREYNFVPFGVETLGPWGPSAHKLFAEIAKRLVDVTGDRKAGGFLAQRISIAIQRGNAASILGTMPRGPFLSLT

SEQ ID NO: 17808 - protein, 950 aa, Atethmia centrago
MHTATQSGDGTLNQNYICLHCDRSFQSKRGLNIHISKKHRLCISQNGPALNLDPVSLPAPVSDSPNSTPFHLYLSYLKNNVPVIKRVPRGARISVANHLSGLIKKCVESNQIVDWHNLFLFSYTTLHVKKDEATISLTQKIKNNCLTKTSSPFDSPKRGTLSRIKLIEGKIADGDLKGAARLLFTNDVLSPDTPDTLSALHSKHPPAPVIPYFFDSPTADQACLEIEGKDVIDAIISFKTGSAAGLDGISPQHLKDLTFYSVGDAGVQLICSITKLINFMFSGKINADIASLLFGANLIALTKKDGGVRPIAVGSTLRRLASKIAVRHIKSKLQSVFEPIQLGFGTKGGCEAAVHALRTYLSYDDCEIVVKIDVKNAFNSVNRDAMLTEVKNKIPELYQYLLTCYAEPSKLIYRSHELSSEVGCQQGDPLGPAIFSLAINPIIQNLKSKFNVWYLDDGTLGGDVDTVLSDLSDIKTNFENIGLELNFSKCELFIQKTSYGLDNLKSKLNFLAPNIKIVDRKSLCLLGSPIFEESFPDYITNTISKFQSHANCLLEISPHYALIILKFCLFVPKFTYVLRCSPFWKHPNLLSPIDDLVKTSLETILNIQLNEPSWLQASLPIRFGGLGIRKISSVASPAFLSSTHSTSRLIGNVLRALPTNYETAGLEDAKNAFQIACPGKEFPDNLKSQRSWDDIYCDLTYKSILSRSSGPDRARLLAVGTREAGHWLHAHPSPYTGTFLDPTSLRLATGLRLGVTVCTPHTCPCGTDVDRLGHHGLCCQKSAGRFSRHAALNDIIRRSLASINVPALLEPTGIVRDDGKRPDGVSLVPWSLGRMLVWDATCVDTLAPSHLQRTTSKAGAAAENAENLKVIKYGGLGREYNFVPFGVETLGPWGPSAHKLFAEIAKRLVDVTGDRKAGGCLAQRISIAIQRGNAASILGTMPRGPFLSLT

SEQ ID NO: 17809 - protein, 950 aa, Atethmia centrago
MHTATQSGDGTLNQNYICLHCDRSFQSKRGLNIHISKKHRLCTSISQNGPALNLDPVSLPVSDSPNSTPFHLYLSYLKNNVPVIKRVPRGARISVANHLSGLIKKCVESNQIVDWHNLFLFSYTTLHVKKDEATISLTQKIKNNCLTKTSSPFDSPKRGTLSRIKLIEGKIADGDLKGAARLLFTNDVLSPDTPDTLSALHSKHPPAPVIPYFFDSPTADQACLEIEGKDVIDAIISFKTGSAAGLDGISPQHLKDLTSYSVGDAGVQLICSITKLINFMFSGKINADIASLLFGANLIALTKKDGGVRPIAVGSTLRRLASKIAVRHIKSKLQSVFEPIQLGFGTKGGCEAAVHALRTYLSYDDCEIVVKIDVKNAFNSVNRDAMLTEVKNKIPELYQYLLTCYAEPSKLIYRSHELSSEVGCQQGDPLGPAIFSLAINPIIQNLKSKFNVWYLDDGTLGGDVDTVLSDLSDIKTNFENIGLELNFSKCELFIQKTSYGLDNLKSKLNFLAPNIKIVDRKSLCLLGSPIFEESFPDYITNTISKFQSHANCLLEISPHYALIILKFCLFVPKFTYVLRCSPFWKHPNLLSPIDDLVKTSLETILNIQLNEPSWLQASLPIRFGGLGIRKISSVASPAFLSSTHSTSRLIGNVLRALPTNYETAGLEDAKNAFQIACPGKEFPDNLKSQRSWDDIYCDLTYKSILSRSSGPDRARLLAVGTREAGHWLHAHPSPYTGTFLDPTSLRLATGLRLGVTVCTPHTCPCGTDVDRLGHHGLCCQKSAGRFSRHATLNDIIRRSLASINVPALLEPTGIVRDDGKRPDGVSLVPWSLGRMLVWDATCVDTLAPSHLQRTTSKAGAAAENAENLKVIKYGGLGREYNFVPFGVETLGPWGPSAHKLFAEIAKRLVDVTGDRKAGGFLAQRISIAIQRGNAASILGTMPRGPFLSLT

SEQ ID NO: 17810 - protein, 950 aa, Atethmia centrago
MHTATQSGDGTLNQNYICLHCDRSFQSKRGLNIHISKKHRLCISQNGPALNLDPVSLPAPVSDSPNSTPFHLYLSYLKNNVPVIKRVPRGARISVANHLSGLIKKCVESNQIVDWHNLFLFSYTTLHVKKDEATISLTQKIKNNCLTKTSSPFDSPKRGTLSRIKLIEGKIADGDLKGAARLLFTNDVLSPDTPDTLSALHSKHPPAPVIPYFFDSPTADQACLEIEGKDVIDAIISFKTGSAAGLDGISPQHLKDLTSYSVGDAGVQLICSITKLINFMFSGKINADIASLLFGANLIALTKKDGGVRPIAVGSTLRRLASKIAVRHIKSKLQSVFEPIQLGFGTKGGCEAAVHALRTYLSYDDCEIVVKIDVKNAFNSVNRDAMLTEVKNKIPELYQYLLTCYAEPSKLIYRSHELSSEVGCQQGDPLGPAIFSLAINPIIQNLKSKFNVWYLDDGTLGGDVDTVLSDLSDIKTNFENIGLELNFSKCELFIQKTSYGLDNLKSKFNFLAPNIKIVDRKSLCLLGSPIFEESFPDYITNTISKFQSHANCLLEISPHYALIILKFCLFVPKFTYVLRCSPFWKHPNLLSPIDDLVKTSLETILNIQLNEPSWLQASLPIRFGGLGIRKISSVASPAFLSSTHSTSRLIGNVLRALPTNYETAGLEDAKNAFQIACPGKEFPDNLKSQRSWDDIYCDLTYKSILSRSSGPDRARLLAVGTREAGHWLHAHPSPYTGTFLDPTSLRLATGLRLGVTVCTPHTCPCGTDVDRLGHHGLCCQKSAGRFSRHATLNDIIRRSLASINVPALLEPTGIVRDDGKRPDGVSLVPWSLGRMLVWDATCVDTLAPSHLQRTTSKAGAAAENAENLKVIKYGGLGREYNFVPFGVETLGPWGPSAHKLFAEIAKRLVDVTGDRKAGGFLAQRISIAIQRGNAASILGTMPRGPFLSLT

SEQ ID NO: 17811 - protein, 950 aa, Atethmia centrago
MHTATQSGDGTLNQNYICLHCDRSFQSKRGLNIHISKKHRLCISQNGPALNLDPVSLPAPVSDSPNSTPFHLYLSYLKNNVPVIKRVPRGARISVANHLSGLIKKCVESNQIVDWHNLFLFSYTTLHVKKDEATISLTQKIKNNCLTKTSSPFDSPKRGTLSRIKLIEGKIADGDLKGAARLLFTNDVLSPDTPDTLSALHSKHPPAPVIPYFFDSPTADQACLEIEGKDVIDAIISFKTGSAAGLDGISPQHLKDLTSYSVGDAGVQLICSITKLINFMFSGKINADIASLLFGANLIALTKKDGGVRPIAVGSTLRRLASKIAVRHIKSKLQSVFEPIQLGFGTKGGCEAAVHALRTYLSYDDCEIVVKIDVKNAFNSVNRDAMLTEVKNKIPELYQYLLTCYAEPSKLIYRSHELSSEVGCQQGDPLGPAIFSLAINPIIQNLKSKFNVWYLDDGTLGGDVDTVLSDLSDIKTNFENIGLELNFSKCELFIQKTSYGLDNLKSKLNFLAPNIKIVDRKSLCLLGSPIFEESFPDYITNTISKFQSHANCLLEISPHYALIILKFCLFVPKFTYVLRCSPFWKHPNLLSPIDDLVKTSLETILNIQLNEPSWLQASLPIRFGGLGIRKISSVASPAFLSSTHSTSRLIGNVLRALPTNYETAGLEDAKNAFQIACPGKEFPDNLKSQRSWDDIYCDLTYKSILSRSSGPDRARLLAVGTREAGHWLHAHPSPYTGTFLDPTSLRLATGLRLGVTVCTPHTCPCGTDVDRLGHHGLCCQKSAGRFSRHATLNDIIRRSLASINVPALLEPTGIVRVDGKRPDGVSLVPWSLGRMLVWDATCVDTLAPSHLQRTTSKAGAAAENAENLKVIKYGGLGREYNFVPFGVETLGPWGPSAHKLFAEIAKRLVDVTGDRKAGGFLAQRISIAIQRGNAASILGTMPRGPFLSLT

SEQ ID NO: 17812 - protein, 952 aa, Atethmia centrago
MHTATQSGDGTLNQNYICLHCDRSFQSKRGLNIHISKKHRLCISQNGPALNLDPVSLPPFAPVSDSPNSTPFHLYLSYLKNNVPVIKRVPRGARISVANHLSGLIKKCVESNQIVDWHNLFLFSYTTLHVKKDEATISLTQKIKNNCLTKTSSPFDSPKRGTLSRIKLIEGKIADGDLKGAARLLFTNDVLSPDTPDTLSALHSKHPPAPVIPYFFDSPTADQACLEIEGKDVIDAIISFKTGSAAGLDGISPQHLKDLTSYSVGDAGVQLICSITKLINFMFSGKINADIASLLFGANLIALTKKDGGVRPIAVGSTLRRLASKIAVRHIKSKLQSVFEPIQLGFGTKGGCEAAVHALRTYLSYDDCEIVVKIDVKNAFNSVNRDAMLTEVKNKIPELYQYLLTCYAEPSKLIYRSHELSSEVGCQQGDPLGPAIFSLAINPIIQNLKSKFNVWYLDDGTLGGDVDTVLSDLSDIKTNFENIGLELNFSKCELFIQKTSYGLDNLKSKLNFLAPNIKIVDRKSLCLLGSPIFEESFPDYITNTISKFQSHANCLLEISPHYALIILKFCLFVPKFTYVLRCSPFWKHPNLLSPIDDLVKTSLETILNIQLNEPSWLQASLPIRFGGLGIRKISSVASPAFLSSTHSTSRLIGNVLRALPTNYETAGLEDAKNAFQIACPGKEFPDNLKSQRSWDDIYCDLTYKSILSRSSGPDRARLLAVGTREAGHWLHAHPSPYTGTFLDPTSLRLATGLRLGVTVCTPHTCPCGTDVDRLGHHGLCCQKSAGRFSRHATLNDIIRRSLASINVPALLEPTGIVRDDGKRPDGVSLVPWSLGRMLVWDATCVDTLAPSHLQRTTSKAGAAAENAENLKVIKYGGLGREYNFVPFGVETLGPWGPSAHKLFAEIAKRLVDVTGDRKAGGFLAQRISIAIQRGNAASILGTMPRGPFLSLT

SEQ ID NO: 17813 - protein, 950 aa, Atethmia centrago
MHTATQSGDGTLNQNYICLHCDRSFQSKRGLNIHISKKHRLCISQNGPALNLDPVSLPAPVSDSPNSTPFHLYLSYLKNNVPVIKRVPRGARISVANHLSGLIKKCVESNQIVDWHNLFLFSYTTLHVKKDEATISLTQKIKNNCLTKTTSPFDSPKRGTLSRIKLIEGKIADGDLKGAARLLFTNDVLSPDTPDTLSALHSKHPPAPVIPYFFDSPTADQACLEIEGKDVIDAIISFKTSSAAGLDGISPQHLKDLTSYSVGDAGVQLICSITKLINFMFSGKINADIASLLFGANLIALTKKDGGVRPIAVGSTLRRLASKIAVRHIKSKLQSVFEPIQLGFGTKGGCEAAVHALRTYLSYDDCEIVVKIDVKNAFNSVNRDAMLTEVKNKIPELYQYLLTCYAEPSKLIYRSHELSSEVGCQQGDPLGPAIFSLAINPIIQNLKSKFNVWYLDDGTLGGDVDTVLSDLSDIKTNFENIGLELNFSKCELFIQKTSYGLDNLKSKLNFLAPNIKIVDRKSLCLLGSPIFEESFPDYITNTISKFQSHANCLLEISPHYALIILKFCLFVPKFTYVLRCSPFWKHPNLLSPIDDLVKTSLETILNIQLNEPSWLQASLPIRFGGLGIRKISSVASPAFLSSTHSTSRLIGNVLRALPTNYETAGLDDAKNAFQIACPGKEFPDNLKSQRSWDDIYCDLTYKSILSRSSGPDRARLLAVGTREAGLWLHAHPSPYTGTFLDPTSLRLATGLRLGVTVCTPHTCPCGTDVDRLGHHGLCCQKSAGRFSRHATLNDIIRRSLASINVPALLEPTGIVRDDGKRPDGVSLVPWSLGRMLVWDATCVDTLAPSHLQRTTSKAGAAAENAENLKVIKYVGLGREYNFVPFGVETLGPWGPSAHKLFAEIAKRLVDVTGDRKAGGFLAQRISIAIQRGNAASILGTMPRGPFLSLT

SEQ ID NO: 17814 - protein, 950 aa, Atethmia centrago
MHTATQSCDGTLNQNCICLHCDRSFQSKRGLNIHISKKHRLCISQNGPALNLDPVSLPAPVSDSPNSTPFHLYLSYLKNNVPVIKRVPRGARISVANHLSGLIKKCVESNQIVDWHNLFLFSYTTLHVKKDEATISLTQKIKNNCLTKTSSPFDSPKRGTLSRIKLIEGKIADGDLKGAARLLFTNDVLSPDTPDTLSALHSKHPPAPVIPYFFDSPTADQACLEIEGKDVIDAIISFKTGSAAGLDGISPQHLKDLTSYSVGDAGVQLICSITKLINFMFSGKINADIASLLFGANLIALTKKDGGVRPIAVGSTLRRLASKIAVRHIKSKLQSVFEPIQLGFGTKGGCEAAVHALRTYLSYDYCEIVVKIDVKNAFNSVNRDAMLTEVKNKIPELYQYLLTCYAEPSKLIYRSHELSSEVGCQQGDPLGPAIFSLAINPIIQNLKSKFNVWYLDDGTLGGDVDTVLSDLSDIKTYFENIGLELNFSKCELFIQKTSYGLDNLKSKLNFLAPNIKIVDRKSLCLLGSPIFEESFPDYITNTISKFQSHANCLLEISPHYALIILKFCLFVPKFTYVLRCSPFWKHPNLLSPIDDLVKTSLETILNIQLNEPSWLQASLPIRFGGLGIRKISSVASPAFLSSTHSTSRLVGNVLRALPTNYETAGLEDAKNAFQIACPGKEFPDNLKSQRSWDDIYCDLTYKSILSRSSGPDRARLLAVGTREAGHWLHAHPSPYTGTFLDPTSLRLATGLRLGVTVCTPHTCPCGTDVDRLGHHGLCCQKSAGRFSRHATLNDIIRRSLASINVPALLEPTGIVRDDGKRPDGVSLVPWSLGRMLVWDATCVDTLAPSHLQRTTSKAGAAAENAENLKVIKYVGLGREYNFVPFGVETLGPWGPSAHKLFAEIAKRLVDVTGDRKAGGFLAQRISIAIQRGNAASILGTMPRGPFLSLT

SEQ ID NO: 17815 - protein, 950 aa, Atethmia centrago
MHTATQSGDGTLNQNYICLHCDRSFQSKRGLNIHISKKHRLCISQNGPALNLDPVSLPAPVSDSPNSTPFHLYLSYLKNNVPVIKRVPRGARISVANHLSGLIKKCVESNQIVDWHNLFLFSYTTLHVKKDEATISLTQKIKNNCLTKTSSPFDSPKRGTLSRIKLIEGKIADGDLKGAARLLFTNDVLSPDTPDTLSALHSKHPPAPVIPYFFDSPTADQACLEIEGKDVIDAIISFKTGSAAGLDGISPQHLKDLTSYSVGDAGVQLICSITKLINFMFSGKINADIASLLFGANLIALTKKDGGVRPIAVGSTLRRLASKIAVRHIKSKLQSVFEPIQLGFGTKGGCEAAVHALRTYLSYDDCEIVVKIDVKNAFNSVNRDAMLTEVKNKIPELYQYLLTCYAEPSKLIYRSHELSSEVGCQQGDPLGPAIFSLAINPIIQNLKSKFNVWYLDDGTLGGDVDTVLSDLSDIKTNFENIGLELNFSKCELFIQKTSYGLDNLKSKLNFLAPNIKIVDRKSLCLLGSPIFEESFPDYITNTISKFQSHANCLLEISPHYALIILKFCLFVPKFTYVLRCSPFWKHPNLLSPIDDLVKTSLETILNIQLNEPSWLQASLPIRFGGLGIRKISSVASPAFLSSTHSTSRLIGNVLRALPTNYETAGLEDAKNAFQIACPGKEFPDNLKSQRSWDDIYCDLTYKSILSRSSGPDRARLLAVGTREAGHWLHAHPSPYTGTFLDPTSLRLATGLRLGVTVCTPHTCPCGTDVDRLGHHGLCCQKSAGRFSRHATLNDIIRRSLASINVPALLEPTGIVRDDGKRPDGVSLVPWSLGRMLVWDATCVDTLAPSHLQRTTSKAGAAAENAENLKVIKYGGLGREYNFVPFGVETLGPWGPSAHKLFAEIAKHLVDVTGDRKAGGFLAQRISIAIQRGNAASILGTMPRGPFLSLT

SEQ ID NO: 17816 - protein, 950 aa, Atethmia centrago
MHTATQSGDGTLNQNYICLHCDRSFQSKRGLNIHISKKHRLCISQNGPALNLDPVSLPAPVSDSPNSTPFHLYLSYLKNNVPVIKRVPRGARISVANHLSGLIKKCVESNQIVDWHNLFLFSYTTLHVKKDEATISLTQKIKNNCLTKTSSPFDSPKRGTLSRIKLIEGKIADGDLKGAARLLFTNDVLSPDTPDTLSALHSKHPPAPVIPYFFDSPTADQACLEIEGKDVIDAIISFKTGSAAGLDGISPQHLKDLTSYSVGDAGVQLICSITKLINFMFSGKINADIASLLFGANLIALTKKDGGVRPIAVGSTLRRLASKIAVRHIKSKLQSVFEPIQLGFGTKGGCEAAVHALRTYLSYDDCEIVVKIDVKNAFNSVNRDAMLTEVKNKIPELYQYLLTCYAEPSKLIYRSHELSSEVGCQQGDPLGPAIFSLAINPIIQNLKSKFNVWYLDDGTLGGDVDTVLSDLSDIKTNFENIGLELNFSKCELFIQKTSYGLDNLKSKLNFLAPNIKIVDRKSLCHLGSPIFEESFPDYITNTISKFQSHANCLLEISPHYALIILKFCLFVPKFTYVLRCSPFWKHPNLLSPIDDLVKTSLETILNIQLNEPSWLQASLPIRFGGLGIRKISSVASPAFLSSTHSTSRLIGNVLRALPTNYETAGLEDAKNAFQIACPGKEFPDNLKSQRSWDDIYCDLTYKSILSRSSGPDRARLLAVGTREAGHWLHAHPSPYTGTFLDPTSLRLATGLRLGVTVCTPHTCPCGTDVDRLGHHGLCCQKSAGRFSRHATLNDIIRRSLASINVPALLEPTGIVRDDGKRPDGVSLVPWSLGRMLVWDATCVDTLAPSHLQRTTSKAGAAAENAENLKVIKYGGLGREYNFVPFGVETLGPWGPSAHKLFAEIAKRLVDVTGDRKAGGFLAQRISIAIQRGNAASILGTMPRGPFLSLT

SEQ ID NO: 17817 - protein, 950 aa, Atethmia centrago
MHTATQSGDGTLNQNYICLHCDRSFQSKRGLNIHISKKHRLCISQNGPALNLDPVSLPAPVSDSPNSTPFHLYLSYLKNNVPVIKRVPRGARISVANHLSGLIKKCVESNQIVDWHNLFLFSYTTLHVKKDEATISLTQKIKNNCLTKTSSPFDSPKRGTLSRIKLIEGKIADGDLKGAARLLFTNDVLSPDTPDTLSALHSKHPPAPVIPYFFDSPTADQACLEIEGKDVIDAIISFKTGSAAGLDGISPQHLKDLTSYSVGDAGVQLICSITKLINFMFSGKINADIASLLFGANLIALTKKDGGVRPIAVGSTLRRLASKIAVRHIKSKLQSVFELIQLGFGTKGGCEAAVHALRTYLSYDDCEIVVKIDVKNAFNSVNRDAMLTEVKNKIPELYQYLLTCYAEPSKLIYRSHELSSEVGCQQGDPLGPAIFSLAINPIIQNLKSKFNVWYLDDGTLGGDVDTVLSDLSDIKTNFENIGLELNFSKCELFIQKTSYGLDNLKSKLNFLAPNIKIVDRKSLCLLGSPIFEESFPDYITNTISKFQSHANCLLEISPHYALIILKFCLFVPKFTYVLRCSPFWKHPNLLSPIDYLVKTSLETILNIQLNEPSWLQASLPIRFGGLGIRKISSVASPAFLSSTHSTSRLIGNVLRALPTNYETAGLEDAKNAFQIACPGKEFPDNLKSQRSWDDIYCDLTYKSILSRSSGPDRARLLAVGTREAGHWLHAHPSPYTGTFLDPTSLRLATGLRLGVTVCTPHTCPCGTDVDRLGHHGLCCQKSAGRFSRHATLNDIIRRSLASINVPALLEPTGIVRDDGKRPDGVSLVPWSLGRMLVWDATCVDTLAPSHLQRTTSKAGAAAENAENLKVIKYGGLGREYNFVPFGVETLGPWGPSAHKLFAEIAKRLVDVTGDRKAGGFLAQRISIAIQRGNAASILGTMPRGPFLSLT

SEQ ID NO: 17818 - protein, 955 aa, Atethmia centrago
MHTATQSGDGTLNQNYICLHCDRSFQSKRGLNIHISKKHRLCISQNGPALNLDPVSLQSVQSVTVSSDSPNSTPFHLYLSYLKNNVPVIKRVPRGARISVANHLSGLIKKCVESNQIVDWHNLFLFSYTTLHVKKDEATISLTQKIKNNCLTKTSSPFDSPKRGTLSRIKLIEGKIADGDLKGAARLLFTNDVLSPDTPDTLSALHSKHPPAPVIPYFFDSPTADQACLEIEGKDVIDAIISFKTGSAAGLDGISPQHLKDLTSYSVGDAGVQLICSITKLINFMFSGKINADIASLLFGANLIALTKKDGGVRPIAVGSTLRRLASKIAVRHIKSKLQSVFEPIQLGFGTKGGCEAAVHALRTYLSYDDCEIVVKIDVKNAFNSVNRDAMLTEVKNKIPELYQYLLTCYAEPSKLIYRSHELSSEVGCQQGDPLGPAIFSLAINPIIQNLKSKFNVWYLDDGTLGGDVDTVLSDLSDIKTNFENIGLELNFSKCELFIQKTSYGLDNLKSKLNFLAPNIKIVDRKSLCLLGSPIFEESFPDYITNTISKFQSHANCLLEISPHYALIILKFCLFVPKFTYVLRCSPFWKHPNLLSPIDDLVKTSLETILNIQLNEPSWLQASLPIRFGGLGIRKISSVASPAFLSSTHSTSRLIGNVLRALPTNYETAGLEDAKNAFQIACPGKEFPDNLKSQRSWDDIYCDLTYKSIRSRSSGPDRARLLAVGTREAGHWLHAHPSPYTGTFLDPTSLRLATGLRLGVTVCTPHTCPCGTDVDRLGHHGLCCQKSAGRFSRHATLNDIIRRSLASINVPALLEPTGIVRDDGKRPDGVSLVPWSLGRMLVWDATCVDTLAPSHLQRTTSKAGAAAENAENLKVIKYGGLGREYNFVPFGVETLGPWGPSAHKLFAEIAKRLVDVTGDRKAGGFLAQRISIAIQRGNAASILGTMPRGPFLSLT

SEQ ID NO: 17819 - protein, 950 aa, Atethmia centrago
MHTATQSGDGTLNHNYICLHCDRSFQSKRGLNIHISKKHRLCISQNGPALNLDPVSLPAPVSDSPNSTPFHLYLSYLKNNVPVIKRVPRGARISVANHLSGLIKKCVESNQIVDWHNLFLFSYTTLHVKKDEATISLTQKIKNNCLTKTSSPFDSPKRGTLSRIKLIEGKIADGDLKGAARLLFTNDVLSPDTPDTLSALHSKHPPAPVIPYFFDSPTADQACLEIEGKDVIDAIISFKTGSAAGLDGISPQHLKDLTSYSVGDAGVQLIYSITKLINFIFSGKINADIASLLFGANLIALTKKDGGVRPIAVGSTLRRLASKIAVRHIKSKLQSVFEPIQLGFGTKGGCEAAVHALRTYLSYDDCEIVVKIDVKNAFNSVNRDAMLTEVKNKIPELYQYLLTCYAEPSKLIYRSHELSSEVGCQQGDPLGPAIFSLAINPIIQNLKSKFNVWYLDDGTLGGDVDTVLSDLSDIKTNFENIGLELNFSKCELFIQKTSYGLDNLKSKLNFLAPNIKIVDRKSLCLLGSPIFEESFPDYITNTISKFQSHANCLLEISPHYALIILKFCLFVPKFTYVLRCSPFWKHPNLLSPIDDLVKTSLETILNIQLNEPSWLQASLPIRFGGLGIRKISSVASPAFLSSTHSTSRLIGNVLRALPTNYETAGLEDAKNAFQIACPGKEFPDNLKSQRSWDDIYCDLTYKSILSRSSGPDRARLLAVGTREAGHWLHAHPSPYTGTFLDPTSLRLATGLRLGVTVCTPHTCPCGTDVDRLGHHGLCCQKSAGRFSRHATLNDIIRRSLASINVPALLEPTGIVRDDGKRPDGVSLVPWSLGRMLVWDATCVDTLAPSHLQRTTSKAGAAAENAENLKVIKYGGLGREYNFVPFGVETLGPWGPSAHKLFAEIAKRLVDVTGDRKAGGFLAQRISIAIQRGNAASILGTMPRGPFLSLT

SEQ ID NO: 17820 - protein, 906 aa, Atethmia centrago
MLAAKCLLPPVSLPAPVSDSPNSTPFHLYLSYLKNNVPVIKRVPRGARISVANHLSGLIKKCVESNQIVDWHNLFLFSYTTLHVKKDEATISLTQKIKNNCLTKTSSPFDSPKRGTLSRIKLIEGKIADGDLKGAARLLFTNDVLSPDTPDTLSALHSKHPPAPVIPYFFDSPTADQACLEIEGKDVIDAIISFKTGSAAGLDGISPQHLKDLTSYSVGDAGVQLICSITKLINFMFSGKINADIASLLFGANLIALTKKDGGVRPIAVGSTLRRLTSKIAVRHIKSKLQSVFEPIQLGFGTKGGCEAAVHALRTYLSYDDCEIVVKIDVKNAFNSVNRDAMLTEVKNKIPELYQYLLTCYAEPSKLIYRSHELSSEVGCQQGDPLGPAIFSLAINPIIQNLKSKFNVWYLDDGTLGGDVDTVLSDLSDIKTNFENIGLEFNFSKCELFIQKTSYGLDNLKSKLNFLAPNIKIVDRKSLCLLGSPIFEESFPDYITNTISKFQSHANCLLEISPHYALIILKFCLFVPKFTYVLRCSPFWKHPNLLSPIDDLVKTSLETILNIQLNEPSWLQASLPIRFGGLGIRKISSVASPAFLSSTHSTSRLIGNVLRALPTNYETAGLEDAKNAFQIACPGKEFPDNLKSQRSWDDIYCDLTYKSILSRSSGPDRARLLAVGTREAGHWLHAHPSPYTGTFLDPTSLRLATGLRLGVTVCTPHTCPCGTDVDRLGHHGLCCQKSAGRFSRHATLNDIIRRSLASINVPALLEPTGIVRDDGKRPDGVSLVPWSLGRMLVWDATCVDTLAPSHLQRTTSKAGAAAENAENLKVIKYGGLGREYNFVPFGVETLGPWGPSAHKLFAEIAKRLVDVTGDRKAGGFLAQRISIAIQRGNAASILGTMPRGPFLSLT

SEQ ID NO: 17821 - protein, 950 aa, Atethmia centrago
MHTATQSGDGTLNQNYICLHCDRSFQSKRGLNIHISKKHRLCISQNGPALNLDPVSLPAPVSDSPNSTPFHLYLSYLKNNVPVIKRVPRGARISVANHLSGLIKKCVESNQIVDWHNLFLFSYTTLHVKKDEATISLTQKIKNNCLTKTTSPFDSPKRGTLSRIKLIEGKIADGDLKGAARLLFTNDVLSPDTPDTLSALHSKHPPAPVIPYFFDSPTADQACLEIEGKDVIDAIISFKTGSAAGLDGISPQHLKDLTSYSVGDAGVQLICSITKLINFMFSGKINADIASLLFGANLIALTKKDGGVRPIAVGSTLRRLASKIAVRHIKSKLQSVFEPIQLGFGTKGGCEAAVHALRTYLSYDDCEIVVKIDVKNAFNSVNRDAMLTEVKNKIPELYQYLLTCYAEPSKLIYRSHELSSEVGCQQGDPLGPAIFSLAINPIIQNLKSKFNVWYLDDGTLGGDVDTVLSDLSDIKTNFENIGLELNFSKCELFIQKTSYGLDNLKSKLNFLAPNIKIVDRKSLCLLGSPIFEESFPDYITNTISKFQSHANCLLEISPHYALIILKFCLFVPKFTYVLRCSPFWKHPNLLSPIDDLVKTSLETILNIQLNEPSWLQASLPIRFGGLGIRKISSVASPAFLSSTHSTSRLIGNVLRALPTNYETAGLDDAKNAFQIACPGKEFPDNLKSQRSWDDIFCDLTYKSILSRSSGPDRARLLAVGTREAGLWLHAHPSPYTGTFLDPTSLRLATGLRLGVTVCTPHTCPCGTDVDRLGHHGLCCQKSAGRFSRHATLNDIIRRSLASINVPALLEPTGIVRDDGKRPDGVSLVPWSLGRMLVWDATCVDTLAPSHLQRTTSKAGAAAENAENLKVIKYVGLGREYNFVPFGVETLGPWGPSAHKLFAEIAKRLVDVTGDRKAGGFLAQRISIAIQRGNAASILGTMPRGPFLSLT

SEQ ID NO: 17822 - protein, 948 aa, Atethmia centrago
MHTATQSGDGTLNQNYICLHCDRSFQSKRGLNIHISKKHRLCISQNGPALNLDPVSLPAPVSDSPNSTPFHLYLSYLKNNVPVIKRVPRGARISVANHLSGLIKKCVESNQIVDWHNLFLFSYTTLHVKKDEATISLTQKIKNNCLTKTSSPFDSPKRGTLSRIKLIEGKIADGDLKGAARLLFTNDVLSPDTPDTLSALHSKHPPAPVIPYFFDSPAADQACLEIEGKDVIDAIISFKTGSAAGLDGISPQHLKDLTSYSVGDAGVQLICSITKLINFMFSGKINADIASLLFGANLIALTKKDGGVRPIAVGSTLRRLASKIAVRHIKSKLQSVFEPIQLGFGTKGGCEAAVHALRTYLSYDDCEIVVKIDVKNAFNSVNRDAMLTEVKNKIPELYQYLLTCYAEPSKLIYRSHELSSEVGCQQGDPLGPAIFSLAINPIIQNLKSKFNVWYLDDGTLGGDVDTVLSDLSDIKTNFENIGLELNFSKCELFIQKTSYGLDNLKSKLNFLAPNIKIVDRKSLCLLGSPIFEESFPDYITNTISKFQSHANCLLEISPHYALIILKFCLFVPKFTYVLRCSPFWKHPNLLSPIDDLVKTSLETILNIQLNEPSWLQASLPIRFGGLGIRKISSVASPAFLSSTHSTSRLIGNVLRALPTNYETAGLEDAKNAFQIACPGKEFPDNLKSQRSWDDIYCDLTYKSILSRSSGPDRARLLAVGTREAGHWLHAHPSPYTGTFLDPTSLRLATGLRLGVTVCTPHTCPCGTDVDRLGHHGLCCQKSAGRFSRHATLNDIIRRSLASINVPALLEPTGIVRDDGKRPDGVSLVPWSLGRMLVWDATCVDTLAPSHLQRTTSKAGAAAENAENLKVIKYGGLGREYNFVPFGVETLGPWGPSAHKLFAEIAKRLVDVTGDRKAGGFLAQRISIAIQRGNAASILGTMPRGPFLS

SEQ ID NO: 17823 - protein, 565 aa, Atethmia centrago
MLTEVKNKIPELYQYLLTCYAEPSKLIYRSHELSSEVGCQQGDPLGPAIFSLAINPIIQNLKSKFNVWYLDDGTLGGDVDTVLSDLSDIKTNFENIGLELNFSKCELFIQKTSYGLDNLKSKLNFLAPNIKIVDRKSLCLLGSPIFEESFPDYITNTISKFQSHANCLLEISPHYALIILKFCLFVPKFTYVLRCSPFWKHPNLLSPIDDLVKTSLETILNIQLNEPSWLQASLPIRFGGLGIRKISSVASPAFLSSTHSTSRLIGNVLRALPTNYETAGLEDAKNAFQIACPGKEFPDNLKSQRSWDDIYCDLTYKSILSRSSGPDRARLLAVGTREAGHWLHAHPSPYTGTFLDSTSLRLATGLRLGVTVCTPHTCPCGTDVDRLGHHGLCCQKSAGRFSRHATLNDIIRRSLASINVPALLEPTGIVRDDGKRPDGVSLVPWSMGRMLVWDATCVDTLAPSHLQRTTSKAGAAAENAENLKVIKYGGLGREYNFVPFGVETLGPWGPSAHKLFAEIAKRLVDVTGDRKAGGFLAQRISIAIQRGNAASILGTMPRGPFLSLT

SEQ ID NO: 17824 - protein, 671 aa, Atethmia centrago
MFSGKINADIASLLFGANLIALTKKDGGVRPIAVGSTLRRLASKIAVRHIKSKLQSVFEPIQLGFGTKGGCEAAVHALRTYLSYDDCEIVVKIDVKNAFNSVNRDAMLTEVKNKIPELYQYLLTCYAEPSKLIYRSHELSSEVGCQQGDPLGPAIFSLAINPIIQNLKSKFNVWYLDDGTLGGDVDTVLSDLSDIKTNFENIGLELNFSKCELFIQKTSYGLDNLKSKLNFLAPNIKIVDRKSLCLLGSPIFEESFPDYITNTISKFQSHANCLLEISPHYALIILKFCLFVPKFTYVLRCSPFWKHPNLLSPIDDLVKTSLETILNIQLNEPSWLQASLPIRFGGLGIRKISSVASPAFLSSTHSTSRLVGNVLRALPTNYETAGLEDAKNAFQIACPGKEFPDNLKSQGSWDDIYCDLTYKSILSRSSGPDRARLLAVGTREAGHWLHAHPSPYTGTFLDPTSLRLATGLRLGVTVCTPHTCPCGTDVDRLGHHGLCCQKSAGRFSRHATLNDIIRRSLASINVPALLEPTGIVRDDGKRPDGVSLVPWSLGRMLVWDATCVDTLAPCHLQRTTSKAGAAAENAENLKVIKYGGLGREYNFVPFGVETLGPRGPSAHKLFAEIAKRLVDVTGDRKAGGFLAQRISIAIQRGNAASILGTMPRGPFLSLT

SEQ ID NO: 17825 - protein, 950 aa, Atethmia centrago
MHTATQSGDGTLNQNYICLHCDRSFQSKRGLNIHISKKHRLCISQNGPALNLDPVSLPAPVSDSPNSTPFHLYLSYLKNNVPVIKRVPRGARISVANHLSGLIKKCVESNQIVDWHNLFLFSYTTLHVKKDKATISLTQKIKNNCLTKTSSPFDSPKRGTLSRIKLIEGKIADGDLKGAARLLFTNDVLSPDTPDTLSALHSKHPPAPVIPYFFDSPTADQACLEIEGKDVIDAIISFKTGSAAGLDGISPQHLKDLTSYSVGDAGVQLICSITKLINFMFSGKINADIASLLFGANLIALTKKDGGVRPIAVGSTLRRLASKIAVRHIKSKLQSVFEPIQLGFGTKGGCEAAVHALRTYLSYDDCEIVVKIDVKNAFNSVNRDAMLTEVKNKIPELYQYLLTCYAEPSKLIYRSHELSSEVGCQQGDPLGPAIFSLAINPIIQNLKSKFNVWYLDDGTLGGDVDTVLSDLSDIKTNFENIGLELNFSKCELFIQKTSYGLDNLKSKLNFLAPNIKIVDRKSLCLLGSPIFEESFPDYITNTISKFQSHANCLLEISPHYALIILKFCLFVPKFTYVLRCSPFWKHPNLLSPIDDLVKTSLETILNIQLNEPSWLQASLPIRFGGLGIRKISSVASPAFLSSTHSTSRLIGNVLRALPTNYETAGLEDAKNAFQIACPGKEFPDNLKSQRSWDDIYCDLTYKSILSRSSGPDRARLLAVGTREAGHWLHAHPSPYTGTFLDPTSLRLATGLRLGVTICTPHTCPCGTDVDRLGHHGLCCQKSAGRFSRHATLNDIIRRSLASINVPALLEPTGIVRDDGKRPDGVSLVPWSLGRMLVWDATCVDTLAPSHLQRTTSKAGAAAENAENLKVIKYGGLGREYNFVPFGVETLGPWGPSAHKLFAEIAKRLVDVTGDRKAGGFLAQRISIAIQRGNAASILGTMPRGPFLSLT

SEQ ID NO: 17826 - protein, 950 aa, Atethmia centrago
MHTATQSGDGTLNQNYICLHCDRSFQSKRGLNIHISKKHRLCISQNGPALNLDPVSLPAPVSDSPNSTPFHLYLSYLKNNVPVIKRVPRGARISVANHLSGLIKKCVESNQIVDWHNLFLFSYTTLHVKKDEATISLTQKIKNNCLTKTSSPFDSPKRGTLSRIKLIEGKIADGDLKGAARLLFTNDVLSPDTPDTLSALHSKHPPAPVIPYFFDSPTADQACLEIEGKDVIDAIISFKTGSAAGLDGISPQHLKDLTSYSVGDAGVQLICSITKLINFMFSGKINADIASLLFGANLIALTKKDGGVRPIAVGSTLRRLASKIAVRHIKSKLQSVFEPIQLGFGTKGGCEAAVHALRTYLSYDDCEIVVKIDVKNAFNSVNRDAMLTEVKNKIPELYQYLLTCYAEPSKLIYRSHELSSEVGCQQGDPLGPAIFSLAINPIIQNLKSKFNVWYLDDGTLGGEVDTVLSDLSDIKTNFENIGLELNFSKCELFIQKTSYGLDNLKSKLNFLAPNIKIVDRKSLCLLGSPIFEESFPDYITNTISKFQSHANCLLEISPHYALIILKFCLFVPKFTYVLRCSPFWKHPNLLSPIDDLVKSSLETILNIQLNEPSWLQASLPIRFGGLGIRKISSVASPAFLSSTHSTSRLIGNVLRALPTNYETAGLEDAKNAFQIACPGKEFPDNLKSQRSWDDIYCDLTYKTILSRSSGPDRARLLAVGTREAGHWLHAHPSPYTGTFLDPTSLRLATGLRLGVTVCTPHTCPCGTDVDRLGHHGLCCQKSAGRFSRHATLNDIIRRSLASINVPALLEPTGIVRDDGKRPDGVSLVPWSLGRMLVWDATCVDTLAPSHLQRTTSKAGAAAENAENLKVIKYGGLGREYNFVPFGVETLGPWGPSAHKLFAEIAKRLVDVTGDRKAGGFLAQRISIAIQRGNAASILGTMPRGPFLSLT

SEQ ID NO: 17827 - protein, 950 aa, Atethmia centrago
MHTATQSGDGTLNKNYICLHCDRSFQSKRGLNIHISKKHRLCISQNGPALNLDPVSLPAPVSDSPNSTPFHLYLSYLKNNVPVIKRVPRSARISVANHLSGLIKKCVESNQIVDWHNLFLFSYTTLHVKKDEATISLTQKIKNNCLTKTSSPFDSPKRGTLSRIKLIEGKIADGDLKGAARLLFTNDVLSPDTPDTLSALHSKHPPAPVIPYFFDSPTADQACLEIEGKDVIDAIISFKTGSAAGLDGISPQHLKDLTSYSVGDAGVQLICSITKLINFIFSGKINADIASLLFGANLIALTKKDGGVRPIAVGSTLRRLATKIAVRHIKSKLQSVFEPIQLGFGTKGGCEAAVHALRTYLSYDDCEIVVKIDVKNAFNSVNRDAMLTEVKNKIPELYQYLLTCYAEPSKLIYRSHELSSEVGCQQGDPLGPAIFSLAINPIIQNLKSKFNVWYLDDGTLGGDVDTVLSDLSDIKTNFENIGLELNFSKCELFIQKTSYGLDNLKSKLNFLAPNIKIVDRKSLCLLGSPIFEESFPDYITNTISKFQRHANCLLEISPHYALIILKFCLFVPKFTYVLRCSPFWKHPNLLSPIDDLVKTSLETILNIQLNEPSWLQASLPIRFGGLGIRKISSVASPAFLSSTHSTSRLIGNVLRALPTNYETAGLEDAKNAFQIACPGKEFPDNLKSQRSWDDIYCDLTYKSILSRSSGPDRARLLAVGTREAGHWLHAHSSPYTGTFLDPTSLRLATGLRLGVTVCTPHTCPCGTDVDRLDHHGLCCQKSAGRFSRHATLNDIIRRSLASINVPALLEPTGIVRDDGKRPDGVSLVPWSLGRMLVWDATCVDTLAPSHLQRTTSKAGAAAENAENLKVIKYGGLGREYNFVPFGVETLGPWGPSAHKLFAEIAKRLVDVTGDRKAGGFLAQRISIAIQRGNAASILGTMPRGPFLSLT

SEQ ID NO: 17828 - protein, 950 aa, Atethmia centrago
MHTATQSGDGTLNQNYICLHCDRSFQSKRGLNIHISKKHRLCISQNGPALNLDPVSLPAPVSDSPNSTPFHLYLSYLKNNVPVIKRVPRGARISVANHLSGLIKKCVESNQIVDWHNLFLFSYTTLHVKKDEATISLTQKIKNNCLTKTTSPFDSPKRGTLSRIKLIEGKIADGDLKGAARLLFTNDVLSPDTPDTLSALHSKHPPAPVIPYFFDSPTADQACLEIEGKDVIDAIISFKTGSAAGLDGISPQHLKDLTSYSVGDAGVQLICSITKLINFMFSGKINADIASLLFGANLIALTKKDGGVRPIAVGSTLRRLASKIAVRHIKSKLQSVFEPIQLGFGTKGGCEAAVHALRTYLSYDDCEIVVKIDVKNAFNSVNRDAMLTEVKNKIPELYQYLLTCYAEPSKLIYRSHELSSEVGCQQGDPLGPAIFSLAINPIIQNLKSKFNVWYLDDGTLGGDVDTVLSDLSDIKTNFENIGLELNFSKCELFIQKTSYGLDNLKSKLNFLAPNIKIVDRKSLCLLGSPIFEESFPDYINNTISKFQSHANCLLEISPHYALIILKFCLFVPKFTYVLRCSPFWKHPNLLSPIDDLVKTSLETILNIQLNEPSWLQASLPIRFGGLGIRKISSVASPAFLSSTHSTSRLIGNVLRALPTNYETAGLDDAKNAFQIACPGKEFPDNLKSQRSWDDIYCDLTYKSILSRSSGPDRARLLAVGTREAGLWLHAHPSPYTGTFLDPTSLRLATGLRLGVTVCTPHTCPCGTDVDRLGHHGLCCQKSAGRFSRHATLNDIIRRSLASINVPALLEPTGIVRDDGKRPDGVSLVPWSLGRMLVWDATCVDTLAPSHLQRTTSKAGAAAENAENLKVIKYVGLGREYNFVPFGVETLGPWGPSAHKLFAEIAKRLVDVTGDRKAGGFLAQRISIAIQRGNAASILGTMPRGPFLSLT

SEQ ID NO: 17829 - protein, 950 aa, Atethmia centrago
MHTATQSGDGTLNQNYICLHCDRSFQSKRGLNIHISKKHRLCISQNGPALNLDPVSLPAPVSDSPNSTPFHLYLSYLKNNVPVIKRVPRGARISVANHLSGLIKKCVESNQIVDWHNLFLFSYTTLHVKKDEATISLTQKIKNNCLTKTSSPFDSPKRGTLSRIKLIEGKIADGDLKGAARLLFTNDVLSPDTPDTLSALHSKHPPAPVIPHFFDSPTADQACLEIEGKDVIDAIISFKTGSAAGLDGISPQHLKDLTSYSVGDAGVQLICSITKLINFMFSGKINADIASLLFGANLIALTKKDGGVRPIAVGSTLRRLASKIAVRHIKSKLQSVFEPIQLGFGTKGGCEAAVHALRTYLSYDDCEIVVKIDVKNAFNSVNRDAMLTEVKNKIPELYQYLLTCYAEPSKLIYRSHELSSEVGCQQGDPLGPAIFSLAINPIIQNLKSKFNVWYLDDGTLGGDVDTVLSDLSDIKTNFENIGLELNFSKCELFIQKTSYGLDNLKSKLNFLAPNIKIVDRKSLCLLGSPIFEESFPDYITNTISKFQSHANCLLEISPHYALIILKFCLFVPKLTYVLRCSPFWKHPNLLSPIDDLVKTSLETILNIQLNEPSWLQASLPIRFGGLGIRKISSVASPAFLSSTHSTSRLIGNVLRALPTNYETAGLEDAKNAFQIACPGKEFPDNLKSQRSWDDIYCDLTYKSILSRSSGPDRARLLAVGTREAGHWLHAHPSPYTGTFLDPTSLRLATGLRLGVTVCTPHTCPCGTDVDRLGHHGLCCQKSAGRFSRHATLNDIIRRSLASINVPALLEPTGIVRDDGKRPDGVSLVPWSLGRMLVWDATCVDTLAPSHLQRTTSKAGAAAENAENLKVIKYGGLGREYNFVPFGVETLGPWGPSAHKLFAEIAKRLVDVTGDRKAGGFLAQRISIAIQRGNAASIFGTMPRGPFLSLT

SEQ ID NO: 17830 - protein, 671 aa, Atethmia centrago
MFSGKINADIASLLFGANLIALTKKDGGVRPIAVGSTLRRLASKIAVRHIKSKLQSVFEPIQLGFGTKGGCEAAVHALRTYLSYDDCEIVVKIDVKNAFNSVNRDAMLTEVKNKIPELYQYLLTCYAEPSKLIYRSHELSSEVGCQQGDPLGPAIFSLAINPIIQNLKSKFNVWYLDDGTLGGDVDTVLSDLSDIKTNFENIGLELNFSKCELFIQKTSYGLDNLKSKLNFLAPNIKIVDRKSLCLLGSPIFEESFPDYITNTISKFQSHANCLLEISPHYALIILKFCLFVPKFTYVLRCSPFWKHPNLLSPIDDLVKTSLETILNIQLIEPSWLQASLPIRFGGLGIRKISSVASPAFLSSTHSTSRLIGNVLRALPTNYETAGLEDAKNAFQIACPGKEFPDNLKSQRSWDDIYCDLTYKSILSRSSGPDRARLLAVGTREAGHWLHAHPSPYTGTFLDPTSLRLATGLRLGVTVCTPHTCPCGTDVDRLGHHALCCQKSAGRFSRHATLNDIIRRSLASINVPALLEPTGIVRDDGKRPDGVSLVPWSLGRMLVWDATCVDTLAPSHLQRTTSKAGAAAENAENLKVIKYGGLGREYNFVPFGVETLGPWGPSAHKLFAEIAKRLVDVTGDRKAGGFLAQRISIAIQRGNAASILGTMPRGPFLSLT

SEQ ID NO: 17831 - protein, 950 aa, Atethmia centrago
MHTATQSGDGTLNQNYICLHCDRSFQSKRGLNIHISKKHRLCISQNGPALNLDPVSLPAPVSDSPNSTPFHLYLSYLKNNVPVIKRVPRGARISVANHLSGLIKKCVESNQIVDWHNLFLFSYTTLHVKKDEATISLTQKIKNNCLTKTSSPFDSPKRGTLSRIKLIEGKIADGDLKGAARLLFTNDVLSPDTPDTLSALHSKHPPAPVIPYFFDSPTADQACLEIEGKDVIDAIISFKTGSAAGLDGISPQHLKDLTSYSVGDAGVQLICSITKLINFMFSGKINADIASLLFGANLIALTKKDGGVRPIAVGSTLRRLASKIAVRHIKSKLQSVFEPIQLGFGTKGGCEAAVHALRTYLSYDDCEIVVKIDVKNAFNSVNRDAMLTEVKNKIPELYQYLLTCYAEPSKLIYRSHELSSEVGCQQGDPLGPAIFSLAINPIIQNLKSKFNVWYLDDGTLGGDVDTVLSDLSDIKTNFENIGLELNFSKCELFIQKTSYGLDNLKSKLNFLAPNIKIVDRKSLCLLGSPNFEESFPDYITNTISKFQSHANCLLEISPHYALIILKFCLFVPKFTYVLRCSPFWKHPNLLSPIDDLVKTSLETILNIQLNEPSWLQASLPIRFGGLGIRKISSVASPAFLSSTHSTSRLIGNVLRALPTNYETAGLEDAKNAFQIACPGKEFPDNLKSQRSWDDIYCDLTYKSILSRSSGPDRARLLAVGTREAGHWLHAHPSPYTGTFLDPTSLRLATGLRLGVTVCTPHTCPCGTDVDRLGHHGLCCQKSAGRFSRHATLNDIIRRSLASINVPALLEPTGIVRDDGKRPDGVSLVPWSLGRMLVWDATCVDTLAPSHLQRTTSKAGAAAENAENLKVIKYGGLGREYNFVPFGVETLGPWGPSAHKLFAEIAKRLVDVTGDRKAGGFLAQRISIAIQRGNAASILGTMPRGPFLSLT

SEQ ID NO: 17832 - protein, 950 aa, Atethmia centrago
MHTATQSGDDTLNQNYICLHCDRSFQSKRGLNIHISKKHRLCISQNGPALNLDPVSLPAPVSDSPNSTPFHLYLSYLKNNVPVIKRVPRGARISVANHLSGLIKKCVESNQIVDWHNLFLFSYTTLHVKKDEATISLTQKIKNNCLTKTSSPFDSPKRGTLSRIKLIEGKIADGDLKGAARLLFTNDVLSPDTPDTLSALHSKHPPAPVIPYFFDSPTADQACLEIEGKDVIDAIISFKTGSAAGLDGISPQHLKDLTSYSVGDAGVQLICSITKLINFMFSGKINADIASLLFGANLIALTKKDGGVRPIAVGSTLRRLASKIAVRHIKSKLQSVFEPIQLGFGMKGGCEAAVHALRTYLSYDDCEIVVKIDVKNAFNSVNRDAMLTEVKNKIPELYQYLLTCYAEPSKLIYRSHELSSEVGCQQGDPLWPAIFSLAINPIIQNLKSKFNVWYLDDGTLGGDVDTVLSDLSDIKTNFENIGLELNFSKCELFIQKTSYGLDNLKSKLNFLAPNIKIVDRKSLCLLGSPIFEESFPDYITNTISKFQSHANCLLEISPHYALIILKFCLFVPKFTYVLRCSPFWKQPNLLSPIDDLVKTSLETILNIQLNEPSWLQASLPIRFGGLGIRKISSVASPAFLSSTHSTSRLIGNVLRALPTNYETAGLEDAKNAFQIACPGKEFPDNLKSQRSWDDIYCDLTYKSILSRSSGPDRARLLAVGTREAGHWLHAHPSPYTGTFLDPTSLRLATGLRLGVTVCTPHTCPCGTDVDRLGHHGLCCQKSAGRFSRHATLNDIIRRSLASINVPALLEPTGIVRDDGKRPDGVSLVPWSLGRMLVWDATCVDTLAPSHLQRTTSKAGAAAENAENLKVIKYGGLGREYNFVPFGVETLGPWGPSAHKLFAEIAKRLVDVTGDRKAGGFLAQRISIAIQRGNAASILGTMPRGPFLSLT

SEQ ID NO: 17833 - protein, 950 aa, Atethmia centrago
MHTATQSGDGTLNQNYICLHCDRSFQSKRGLNIHISKKHRLCISQNGPALNLDPVSLPAPVSDSPNSTPFHLYLSYLKNNVPVIKRVPRGARISVANHLSGLIKKCVESNQIVDWHNLFLFSYTTLHVKKDEATISLTQKIKNNCLTKTSSPFDSPKRGTLSRIKLIEGKIADGDLKGAARLLFTNDVLSPDTPDTLSALHSKHPPAPVIPYFFDSPTADQACLEIEGKDVIDAIISFKTGSAAGLDGISPQHLKDLTSYSVGDAGVQLICSITKLINFIFSGKINADIASLLFGANLIALTKKDGGVRPIAVGSTLRRLASKIAVRHIKYKLQSVFEPIQLGFGTKGGCEAAVHALRTYLSYDDCEIVVKIDVKNAFNSVNRDAMLTEVKNKIPELYQYLLTCYAEPSKLIYRSHELSSEVGCQQGDPLGPAIFSLAINPIIQNLKSKFNVWYLDDGTLGGDVDTVLSDLSDIKTNFENIGLELNFSKCELFIQKTSYGLDNLKSKLNFLAPNIKIVDRKSLCLLGSPIFEESFPDYITNTISKFQSHANCLLEISPHYALIILKFCLFVPKFTYVLRCSPFWKHPNLLSPIDDLVKTSLETILNIQLNEPSWLQASLPIRFGGLGIRKISSVASPAFLSSTHSTSRLIGNVLRALPTNYETAGLEDAKNAFQIACPGKEFPDNLKSQRSWDDIYCDLTYKSILSRSSGPDRARLLAVGTREAGHWLHAHPSPYTGTFLDPTSLRLATGLRLGVTVCTPHTCPCGTDVDRLGHHGLCCQKSAGRFSRHATLNDIIRRSLASINVPALLEPTGIVRDDGKRPDGVSLVPWSLGRMLVWDATCVDTLAPSHLQRTTSKAGAAAENAENLKVIKYGGLGREYNFVPFGVETLGPWGPSAHKLFAEIAKRLVDVTGDRKAGGFLAQRISIAIQRGNAASILGTMPRGPFLSLT

SEQ ID NO: 17834 - protein, 950 aa, Atethmia centrago
MHTATQSGDGTLNQNYICLHCDRSFQSKRGLNIHISKKHRLCISQNGPALNLDPVSLPAPVSDSPNSTPFHLYLSYLKNNVPVIKRVPRGARISVANHLSGLIKKCVESNQIVDWHNLFLFSYTTLHVKKDEATISLTQKIKNNCLTKTSSPFDSPKRGTLSRIKLIEGKIADGDLKGAARLLFTNDVLSPDTPDTLSALHSKHPPAPVIPYFFDSPTADQACLEIEGKDVIDSIISFKTGSAAGLDGISPQHLKDLTSYSVGDAGVQLICSITKLINFMFSGKINADIASLLFGANLIALTKKDGGVRPIAVGSTLRRLASKIAVRHIKSKLQSVFEPIQLGFGTKGGCEAAVHALRTYLSYDDCEIVVKIDVKNAFNSVNRDAMLTEVKNKIPELYQYLLTCYAEPSKLIYRSHELSSEVGCQQGDPLGPAIFSLAINPIIQNLKSKFNVWYLDDGTLGGDVDTVLSDLSDIKTNFENIGLELNFSKCELFIQKTSYGLDNLKSKLNFLAPNIKIVDRKSLCLLGSPIFEESFPDYITNTISKFQSHANCLLEISPHYALIILKFCLFVPKFTYVLRCSPFWKHPNLLSPIDDLVKTSLETILNIQLNEPSWLQASLPIRFGGLGIRKISSVASPAFLSSTHSTSRLIGNVLRALPTNYETAGLEDAKNAFQIACPGKEFPDNLKSQRSWDDIYCDLTYKSILSRSSGPDRARLLAVGTREAGHWLHAHPSPYTGTFLDPTSLRLATGLRLGVTVCTPHTCPCGTDVDRLGHHGLCCQKSAGRFSRHATLNDIIRRSLASINVPALLEPTGIVRDDGKRPDGVSLVPWSLGRMLVWDATCVDTLAPSHLQRTTSKAGAAAENAENLKVIKYGGLGREYNFVPFGVETLGPWGPSAHKLFAEIAKRLVDVTGDRKAGGFLAQRISIAIQRGNAASILGTMPRGPFLSLT

SEQ ID NO: 17835 - protein, 950 aa, Atethmia centrago
MHTATQSGDGTLNQNYICLHCDRSFQSKRGLNIHISKKHRLCISQNGPALNLDPVSLPAPVSDSPNSTPFHLYLSYLKNNVPVIKRVPRGARISIANHLSGLIKKCVESNQIVDWHNLFLFSYTTLHVKKDDATISLTQKIKNNCLTKTSSPFDSPKRGTLSRIKLIEGKIADGDLKGAARLLFTNDVLSPDTPDTLSALHSKHPPAPVIPYFFDSPTADQACLEIEGKDVIDAIISFKTGSAAGLDGISPQHLKDLTSYSVGDAGVQLICSITKLINFMFSGKINADIASLLFGANLIALTKKDGGVRPIAVGSTLRRLASKIAVRHIKSKLQSVFEPIQLGFGTKGGCEAAVHALRTYLSYDNCEIVVKIDVKNAFNSVNRDAMLTEVKNKIPELYQYLLTCYAEPSKLIYRSHELSSEVGCQQGDPLGPAIFSLAINPIIQNLKSKFNVWYLDDGTLGGDVDTVLSDLSDIKTNFENIGLELNFSKCELFIQKTSYGLDNLKSKLNFLAPNIKIVDRKSLCLLGSPIFEESFPDYITNTISKFQSHANCLLEISPHYALIILKFCLFVPKFTYVLRCSPFWKHPNLLSPIDDLVKTSLETILNIQLNEPSWLQASLPIRFGGLGIRKISSVASPAFLSSTHSTSRLIGNVLRALPTNYETAGLEDAKNAFQIACPGKEFPDNLKSQRSWDDIYCDLTYKSILSRSSGPDRARLLAVGTREAGHWLHAHPSPYTGTFLDPTSLRLATGLRLGVTVCTPHTCPCGTDVDRLGHHGLCCQKSAGRFSRHATLNDIICRSLASINVPALLEPTGIVRDDGKRPDGVSLVPWSLGRMLVWDATCVDTLAPSHLQRTTSKAGAAAENAENLKVIKYGGLGREYNFVPFGVETLGPWGPSEHKLFAEIAKRLVDVTGDRKAGGFLAQRISIAIQRGNAASILGTMPRGPFLSLT

SEQ ID NO: 17836 - protein, 671 aa, Atethmia centrago
MFSGKINADIASLLFGANLIALTKKDGGVRPIAVGSTLRRLASKIAVRHIKSKLQSVFEPIQLGFGTKGGCEAAVHALRTYLSYDDCEIVVKIDVKNAFNSVNRDAMLTEVKNKIPELYQYLLTCYAEPSKLIYRSHELSSEVGCQQGDPLGPAIFSLAINPIIQNLKSKFNVWYLDDGTLGGDVDTVLSDLSDIKTNFENIGLELNFSKCELFIQKTSYGLDNLKSKLNFLAPNIKIVDRKSLCLLGSPIFEESFPDYITNTISKFQSHANCLLEISPHYALIILKFCLFVPKFTYVLRCSPFWKHPNLLSPIDDLVKTSLETILNIQLNEPSWLQASLPIRFGGLGIRKISSVASPAFLSSTHSTSRLIGNVLRALPTNYETAGLEDAKNAFQIACPGKEFQDNLKSQRSWDDIYCDLTYKSILSRSSGPDRARLLAVGTREAGHWLHAHPSPYTGTFLDPTSLRLATGLRLGVTVCTPHTCPCGTDVDRLGHHGLCCQKSAGRFSRHATLNDIIRRSLASINVPALLEPTGIVRDDGKRPDGVSLVPWSLGRMLVWDATCVDTLAPSHLQRTTSKAGAAAENAENLKVIKYGGLGREYNFVPFGVETLGPWGPSAHKLFAEIAKRLVDVTGDRKAGGFLAQRISIAIQRGNAASILGTMPRGPFLSLT

SEQ ID NO: 17837 - protein, 950 aa, Atethmia centrago
MHTATQSGDGTLNQNYICLHCDRSFQSKRGLNIHISKKHRLCISQNGPALNLDPVSLPAPVSDSPNSTPFHLYLSYLKNNVPVIKRVPRGARISVANHLSGLIKKCVESNQIVDWHNLFLFSYTTLHVKKDEATISLTQKIKNNCLTKTSSPFDSPKRGTLSRIKLIEGKIADGDLKGAARLLFTNDVLSPDTPDTLSALHSKHPPAPVIPYFFDSPTADQACLEIEGKDVIDAIISFKTGSAAGLDGISPQHLKDLTSYSVGDAGVQLICSITKLINFMFSGKINADIASLLFGANLIALTKKDGGVRPIAVGSTLRRLASKIAVRHIKSKLQSVFEPIQLGFGTKGGCEAAVHALRTYLSYDDCEILVKIDVKNAFNSVNRDAMLTEVKNKIPELYQYLLTCYAEPSKLIYRSHELSSEVGCQQGDPLGPAIFSLAINPIIQNLKSKFNVWYLDDGTLGGDVDTVLSDLSDIKTNFENIGLELNFSKCELFIQKNSYGLDNLKSKLNFLAPNIKIVDRKSLCLLGSPIFEESFPDYITNTISKFQSHANCLLEISPHYALIILKFCLFVPKFTYVLRCSPFWKHPNLLSPIDDLVKTSLETILNIQLNEPSWLQASLPIRFGGLGIRQISSVASPAFLSSTHSTSRLIGNVLRALPTNYETAGLEDAKNAFQIACPGKEFPDNLKSQRSWDDIYCDLTYKSILSRSSGPDRARLLAVGTREAGHWLHAHPSPYTGTFLDPTSLRLATGLRLGVTVCTPHTCPCGTDVDRLGHHGLCCQKSAGRFSRHATLNDIIRRSLASINVPALLEPTGIVRDDGKRPDGVSLVPWSLGRMLVWDATCVDTLAPSHLQRTTSKAGAAAENAENLKVIKYGGLGREYNFVPFGVETLGPWGPSAHKLFAEIAKRLVDVTGDRKAGGFLAQRISIAIQRGNAASILGTMPRGPFLSLT

SEQ ID NO: 17838 - protein, 950 aa, Atethmia centrago
MHTATQSGDGTLNQNYICLHCDRSFQSKRGLNIHISKKHRLCISQNGPALNLDPVSLPAPVSDSPNSTPFHLYLSYLKNNVPVIKRVPRGARISVANHLSGLIKKCVESNQIVDWHNLFLFSYTTLHVKKDEATISLTQKIKNNCLTKTSSPFDSPKRGTLSRIKLIEGKIADGDLKGAARLLFTNDVLSPDTPDTLSALHSKHPPAPVIPYFFDSPTADQTCLEIEGKDVIDAIISFKTGSAAGLDGISPQHLKDLTSYSVGDAGVQLICSITKLINFMFSGKINADIASLLFGANLIALTKKDGGVRPIAVGSTLRRLASKIAVRHIKSKLQSVFEPIQLGFGTKGGCEAAVHALRTYLSYDDCEIVVKIDVKNAFNSVNRDAMLTEVKNKIPELYQYLLTCYAEPSKLIYRSHELSSEVGCQQGDPLGPAIFSLAINPIIQNLKSKFNVWYLDDGTLGGDVDTVLSDLSDIKTNFENIGLELNFSKCELFIQKTSYGLDNLKSKLNFLAPNIKIVDRKSLCLLGSPIFEESFPDYITNTISKFQSHANCLLEISPHYALIILKFCLFVPKFTYVLRCSPFWKHPNLLSPIDDLVKTSLETILNIQLNEPSWLQASLPIRFGGLGIRKISSVASPAFLSSTHSTSRLIGNVLRALPTNYETAGLEDAKNAFQIACPGKEFPDNLKSQRSWDDIYCDLTYKSILSRSSGPDRARLLAVGTREAGHWLHAHPSPYTGTFLDPTSLRLATGLRLGVTVCTPHTCPCGTDVDRLGHHGLCCQKSAGRFSRHATLNDIIRRSLASINVPALLEPTGIVRDDGKRPDGVSLVPWSLGRMLVWDATCVDTLAPSHLQRTTSKAGAAAENAENLKVIKYGGLGREYNFVPFGVETLGPWDPSAHKLFAEIAKRLVDVTGDRKAGGFLAQRISIAIQRGNAASILGTMPRGPFLSLT

SEQ ID NO: 17839 - protein, 950 aa, Atethmia centrago
MHTATQSGDGTLNQNYICLHCDRSFQSKRGLNIHISKKHRLCISQNGPALNLDPVSLPAPVSDSPNSTPFHLYLSYLKNNVPVIKRVPRGARISVANHLSGLIKKCVESNQIVDWHNLFLFSYTTLHVKKDEATISLTQKIKNNCLTKTSSPFDSPKRGTLSRIKLIEGKIADGDLKGAARLLFTNDVLSPDTPDTLSALHSKHPPAPVIPYFFNSPTADQACLEIEGKDVIDAIISFKTGSAAGLDGISPQHLKDLTSYSVGDAGVQLICSITKLINFMFSGKINADIASLLFGANLIALTKKDGGVRPIAVGSTLRRLASKIAVRHIKSKLQSVFEPIQLGFGTKGGCEAAVHALRTYLSYDDCEIVVKIDVKNAFNSVNRDAMLTEVKNKIPELYQYLLTCYAEPSKLIYRSHELSSEVGCQQGDPLGPAIFSLAINPIIQNLKSKFNVWYLDDGTLGGDVDTVLSDLSDIKTNFENIGLELNFSKCELFIQKTSYGLDNLKSKLNFLAPNIKIVDRKSLCLLGSPIFEESFPDYITNTISKFQSHANCLLEISPHYALIMLKFCLFVPKFTYVLRCSPFWKHPNLLSPIDDLVKTSLETILNIQLNEPSWLQASLPIRFGGLGIRKISSVASPAFLSSTHSTSRLIGNVLRALPTNYETAGLEDAKNAFQIACPGKEFPDNLKSQRSWDDIYCDLTYKSILSRSSGPDRARLLAVGTREAGHWLHAHPSPYTGTFLDPTSLRLATGLRLGVTVCTPHTCPCGTDVDRLGHHGLCCQKSAGRFSRHATLNDIIRRSLASINVPALLEPTGIVRDDGKRPDGVSLVPWSLGRMLVWDATCVDTLAPSHLQRTTSKAGAAAENAENLKVIKYGGLGREYNFVPFGVETLGPWGPSAHKLFAEIAKRLVDVTGDRKAGGFLAQRISIAIQRGNAASILGTMPRGPFLSLT

SEQ ID NO: 17840 - protein, 950 aa, Atethmia centrago
MHTATQSGDGTLNQNYICLHCDRSFQSKRGLNIHISKKHRLCISQNGPALNLDPVSLPAPVSDSPNSTPFHLYLSYLKNNVPVIKRVPRGARISVANHLSGLIKKCVESNQIVDWHNLFLFSYTTLHVKKDEATISLTQKIINNCLTKTSSPFDSPKRGTLSRIKLIEGKIADGDLKGAARLLFTNDMLSPDTPDTLSALHSKHPPAPVIPYFFDSPTADQACLEIEGKDVIDAIISFKTGSAAGLDGISPQHLKDLTSYSVGDAGVQLICSITKLINFIFSGKINADIASLLFGANLIALTKKDGGVRPIAVGSSLRRLASKIAVRHIKSKLQSVFEPIQLGFGTKGGCEAAVHALRTYLSYDDCEIVVKIDVKNAFNSVNRDAMLTEVKNKIPELYQYLLTCYAEPSKLIYRSHELSSEVGCQQGDPLGPAIFSLAINPIIQNLKSKFNVWYLDDGTLGGDVDTVLSDLSDIKTNFENIGLELNFSKCELFIQKTSYGLDNLKSKLNFLAPNIKIVDRKSHCLLGSPIFEESFPDYITNTTSKFQSHANCLLEISPHYALIILKFCLFVPKFTYVLRCSPFWKHPNLLSPIDDLVKTSLETILNIQLNEPSWLQASLPIRFGGLGIRKISSVASPAFLSSTHSTSRLIGNVLRALPTNYETAGLEDAKNAFQIACPGKEFPDNLKSQRSWDDIYCDLTYKSILSRSSGPDRARLLAVGTREAGHWLHAHPSPYTGTFLDPTSLRLATGLRLGVTVCTPHTCPCGTDVDRLGHHGLCCQKSAGRFSRHATLNDIIRRSLASINVPALLEPTGIVRDDGKRPDGVSLVPWSLGRMLVWDATCVDTLAPSHLQRTTSKAGAAAENAENLKVIKYGGLGREYNFVPFGVETLGPWGPSAHKLFAEIAKRLVDVTGDRKAGGFLAQRISIAIQRGNAASILGTMPRGPFLSLT

SEQ ID NO: 17841 - protein, 950 aa, Atethmia centrago
MHTATQSGDGTLNQNYICLHCDRSFQSKRGLNIHISKKHRLCISQNGPALNLDPVSLPAPVSDSPNSTPFHLYLSYLKNNVPVIKRVPRGARISVANHLSGLIKKCVESNQIVDWHNLFLFSYTTLHVKKDEATISLTQKIKNNCLTKTSSPFDSPKRGTLSRIKLIEGKIADGDLKGAARLLFTNDVLSPDTPDTLSALHSKHPPAPVIPYFFDSPTADQACLEIEGKDVIDAIISFKTGSAAGLDGISPQHLKDLTSYSVGDAGVQLICSITKLINFMFSGKINADIASLLFGANLIALTKKDGGVRPIAVGSTLRRLASKIAVRHIKSKLQSVFEPIQLGFGTKGGCEAAVHALRTYLSYDDCEIVVKIDVKNAFNSVNRDAMLTEVKNKIPELYQYLLTCYAEPSKLIYRSHELSSEVGCQQGDPLGPAIFSLAINPIIQNLKSKFNVWYLDDGTLGGDVDTVLSDLSDIKTNFENIGLELNFSKCELFIQKTSYGLDNLKSKLNFLAPNIKIVDRKSLCLLGSPIFEESFPDYITNTISKFQSHANCLLEISPHYALIILKFCLFVPKFNYVLRCSPFWKHPNLLSPIDDLVKTSLETILNIQLNEPSWLQASLPIRFGGLGIRKISSVASPAFLSSTHSTSRLIGNVLRALPTNYETAGLEDAKNAFQIACPGKEFPDNLKSQRSWDDIYCDLTYKSILSRSSGPDRARLLAVGTREAGHWLHAHPSPYTGTFLDPTSLRLATGLRLGVTVCTPHTCPCGTDVDRLGHHGLCCQKSAGRFSRHATLNDIIRRSLASINVPALLEPTGIVRDDGKRPDGVSLVPWSLGRMLVWDATCVDTLAPSHLQRTTSKAGAAAENAENLKVIKYGGLGREYNFVPFGVETLGPWGPSAHKLFAEIAKRLVDVTGDRKAGGFLAQRISIAIQRGNAASILGTMPRGPFLSLT

SEQ ID NO: 17842 - protein, 950 aa, Atethmia centrago
MHTATQSGDGTLNQNYICLHCDRSFQSKRGLNIHISKKHRLCISQNGPALNLDPVSLPAPVSDSPNSTPFHLYLSYLKNNVPVIKRVPRGARISVANHLSGLIKKCVESNQIVDWHNLFLFSYTTLHVKKDEATISLTQKIKNNCLTKTSSPFDSPKRGTLSRIKLIEGKIADGDLKGAARLLFTNDVLSPDTPDTLSALHSKHPPAPVIPYFFDSPTADQACLEIEGKDVIDAIISFKTGSAAGLDGISPQHLKDLTSYSVGDAGVQLICSITKLINFMFSGKINADIASLLFGANLIALTKKDGGVRPIAVGSTLRRLASKIAVRHIKSKLQSVFEPIQLGFGTKGGCEAAVHALRTYLSYDDCEIVVKIDVKNAFNSVNRDAMLTEVKNKIPELYQYLLTCYAEPSKLIYRSHELSSEVGCQQGDPLGPAIFSLAINPIIQNLKSKFNVWYLDDGTLGGDVDTVLSDLSDIKTNFENIGLELNFSKCELFIQKTSYGLDNLKSKLNFLAPNIKIVDRKSLCLLGSPIFEESFPDYITNTISKFQSHANCLLEISPHYALIILKFCLFVPKFTYVLRCSPFWKHPNLLSPIDDLVKTSLETILNIQLNEPSWLQASLPIRFGGLGIRKISSVASPAFLSSTHSTSRLIGNVLRALPTNYETAGLEDAKNAFQIACPGKEFPDNLKSQRSWDDIYCDLTYKSILSRSSGPDRARLLAVGTREAGHWLHAHPSPYTGTFLDPTSLRLATGLRLGVTVCTPHTCPCGTDVDRLGHHGLCCQKSAGRFSRHATLNDIIRRSLASINVPALLEPTGIVRDDGKRPDGVSLVPWSLGRMLVWDATCVDTLAPSHLQRTTSKAGAAAENAENLKVIKYGGLGREYNFVPFGVETLGPWGPSAHKLFAEIAKRLVDVTGDRKAGGFLVQRISIAIQRGNAASILGTMPRGPFLSLT

SEQ ID NO: 17843 - protein, 950 aa, Atethmia centrago
MHTATQSGDGTLNQNYICLHCDRSFQSKRGLNIHISKKHRLCISQNGPALNLDPVSLPAPVSDSPNSTPFHLYLSYLKNNVPVIKRVPRGARISVANHLSGLIKKCVESNQIVDWHNLFLFSYTTLHVKKDEATISLTQKIKNNCLTKTSSPFDSPKRGTLSRIKLIEGKIADGDLKGAARLLFTNDVLSPDTPDTISALHSKHPPAPVIPYFFDSPTADQACLEIEGKDVIDAIISFKTGSAAGLDGISPKHLKDLTSYSVGDAGVQLICSITKLINFMFSGKINADIASLLFGANLIALTKKDGGVRPIAVGSTLRRLASKIAVRHIKSKLQSVFEPIQLGFGTKGGCEAAVHALRTYLSYDDCEIVVKIDVKNAFNSVNRDAMLTEVKNKIPELYQYLLTCYAEPSKLIYRSHELSSEVGCQQGDPLGPAIFSLAINPIIQNLKSKFNVWYLDDGTLGGDVDTVLSDLSDIKTNFENIGLELNFSKCELFIQKTSYGLDNLKSKLNFLAPNIKIVDRKSLCLLGSPIFEESFPDYITNTISKFQSHANCLLEISPHYALIILKFCLFVPKFTYVLRCSPFWKHPNLLSPIDDLVKTSLETILNIQLNEPSWLQASLPIRFGGLGIRKISSVASPAFLSSTHSTSRLIGNVLRALPTNYETAGLEDAKNAFQIACPGKEFPDNLKSQRSWDDIYCDLTYKSILSRSSGPDRARLLAVGTREAGHWLHAHPSPYTGTFLDPTSLRLATGLRLGVTVCTPHTCPCGTDVDRLGHHGLCCQKSAGRFSRHATLNDIIRRSLASINVPALLEPTGIVRDDGKRPDGVSLVPWSLGRMLVWDATCVDTLAPSHLQRTTSKAGAAAENAENLKVIKYGGLGREYNFVPFGVETLGPWGPSAHKLFAEIAKRLVDVTGDRKAGGFLAQRISIAIQRGNAASILGTMPRGPFLSLT

SEQ ID NO: 17844 - protein, 950 aa, Atethmia centrago
MHTATQSGDGTLNQNYICLHCDRSFQSKRGLNIHISKKHRLCISQNGPALNLDPVSLPAPVSDSPNSTPFHLYLSYLKNNVPVIKRVPRGARISVANHLSGLIKKCVESNQIVDWHNLFLFSYTTLHVKKDEATISLTQKIKNNCLTKTSSPFDSPKRGTLSRIKLIEGKIADGDLKGAARLLFTNDVLSPDTPDTLSALHSKHPPAPVIPYFFDSPTADQACLEIEGKDVIDAIISFKTGSAAGLDGISPQHLKDLTSYSVGDAGVQLICSITKLINFMFSGKINADIASLLFGANLIALTKKDGGVRPIAVGSTLRRLASKIAVRHIKSKLQSVFEPIQLGFGTKGGCEAAVHALRTYLSYDDCEIVVKIDVKNAFNSVNRDAMLTEVKNKIPELYQYLLTCYAEPSKLIYRSHELSSEVGCQQGDPLGPAIFSLAINPIIQNLKSKFNVWYLDDGTLGGDVDTVLSDLSDIKTNFENIGLELNFSKCELFIQKTSYGLDNLKSKLNFLAPNIKIVDRKSLCLLGSPIFEESFPDYITNTISKFQSHANCLLEISPHYALIILKFCLFVPKFTYVLRCSPFWKHPNLLSPIDDLVKTSLETILNIQLIEPSWLQASLPIRFGGLGIRKISSVASPAFLSSTHSTSRLIGNVLRALPTNYETAGLEDAKNAFQIACPGKEFPDNLKSQRSWDDIYCDLTYKSILSRSSGPDRARLLAVGTREAGHWLHAHPSPYTGTFLDPTSLRLATGLRLGVTVCTPHTCPCGTDVDRLGHHGLCCQKSASRFSRHATLNDIIRRSLASINVPALLEPTGIVRDDGKRPDGVSLVPWSLGRMLVWDATCVDTLAPSHLQRTTSKAGAAAENAENLKVIKYGGLGREYNFVPFGVETLGPWGPSAHKLFAEIAKRLVDVTGDRKAGGFLAQRISIAIQRGNAASILGTMPRGPFLSLT

SEQ ID NO: 17845 - protein, 950 aa, Atethmia centrago
MHTATQSGDGTLNQNYICLHCDRSFQSKRGLNIHISKKHRLCISQNGPALNLDPVSLPAPVSDSPNSTPFHLYLSYLKNNVPVIKRVPRGARISVANHLSGLIKKCVESNQIVDWHNLFLFSYTTLHVKKDEATISLTQKIKNNCLTKTSSPFDSPKRGTLSRIKLIEGKIADGDLKGAARLLFTNDVLSPDTPDTLSALHSKHPPAPVIPYFFDSPTADQACLEIEGKDVIDAIISFKTGSAAGLDGISPQHLKDLTSYSVGDAGVQLICSITKLINFMFSGKINADIASLLFGANLIALTKKDGGVRPIAVGSTLRRLASKIAVRHIKSKLQSVFEPIQLGFGTKGGCEAAVHALRTYLSYDDCEIVVKIDVKNAFNSVNRDAMLTEVKNKIPELYQYLLTCYAEPSKLIYRSHELSSEVGCQQGDPLGPAIFSLAINPIIQNLKSKFNVWYLDDGTLGGDVDTVLSDLSDIKTNFENIGLELNFSKCELFIQKTSYGLDNLKSKLNFLAPNIKIVDRKSLCLLGSPIFEESFPDYITNTISKFQSHANCLLEISPHYALIILKFCLFVPKFTYVLRCSPFWKHPNLLSPIDDLVKTSLETILNIQLNEPSWLQASLPIRFGGLGIRKISSVASPAFLSSTHSRSRLIGNVLRALPTNYETAGLEDAKNAFQIACPGKEFPDNLKSQRSWDDIYCDLTYKSILSRSSGPDRARLLAVGTREAGHWLHAHPSPYTGTFLDPTSLRLATGLRLGVTVCTPHTCPCGTDVDRLGHHGLCCQKSAGRFSRHATLNDIIRRSLASINVPALLEPTGIVRDDGKRPDGVSLVPWSLGRMLVWDATCVDTLAPSHLQRTTSKAGAAAENAENLKVIKYGGLGREYNFVPFGVETLGPWGPSAHKLFAEIAKRLVDVTGDRKAGGFLARRISIAIQRGNAASILGTMPRGPFLSLT

SEQ ID NO: 17846 - protein, 950 aa, Atethmia centrago
MHTATQSGDGTLNQNYICLHCDRSFQSKRGLNIHISKKHRLCISQNGPALNLDPVSLPAPVSDSPISTPFHLYLSYLKNNVPVIKRVPRGARISVANHLSGLIKKCVESNQIVDWHNLFLFSYTTLHVKKDEATISLTQKIKNNCLTKTSSPFDSPKRGTLSRIKLIEGKIADGDLKGAARLLFTNDVLSPDTPDTLSALHSKHPPAPVIPYFFDSPTADQACLEIEGKDVIDAIISFKTGSAAGLGGISPQHLKDLTSYSVGDAGVQLICSITKLINFMFSGKINADIASLLFGANLIALTKKDGGVRPIAVGSTLRRLASKIAVRHIKSKLQSVFEPIQLGFGTKGGCEAAVHALRTYLSYDDCEIVVKIDVKNAFNSVNRDAMLTEVKNKIPELYQYLLTCYAEPSKLIYRSHELSSEVGCQQGDPLGPAIFSLAINPIIQNLKSKFNVWYLDDGTLGGDVDTVLSDLSDIKTNFENIGLELNFSKCELFIQKTSYGLDNLKSKLNFLAPNIKIVDRKSLCLLGSPIFEESFPDYITNTISKFQSHANCLLEISPHYALIILKFCLFVPKFTYVLRCSPFWKHPNLLSPIDDLVKTSLETILNIQLNEPSWLQASLPIRFGGLGIRKISSVASPAFLSSTHSTSRLIGNVLRALPTNYETAGLEDAKNAFQIACPGKEFPDNLKSQRSWDDIYCDLTYKSILSRSSGPDRARLLAVGTREAGHWLHAHPSPYTGTFLDPTSLRLATGLRLGVTVCTPHTCPCGTDVDRLGHHGLCCQKSAGRFSRHATLNDIIRRSLASINVPALLEPTGIVRDDGKRPDGVSLVPWSLGRMLVWDATCVDTLAPSHLQRTTSKAGAAAENAENLKVIKYGGLGREYNFVPFGVETLGPWGPSAHKLFAEIAKRLVDVTGDRKAGGFLAQRISIAIQRGNAASILGTMPRGPFLSLT

SEQ ID NO: 17847 - protein, 950 aa, Atethmia centrago
MHTATQSGDGTLNLNCICLHCDRSFQSKRGLNIHISKKHRLCISQNGPALNLDPVSLPAPVSDSPNSTPFHLYLSYLKNNVPVIKRVPRGARISVANHLSGLIKKCVESNQIVDWHNLFLFSYTTLHVKKDEATISLTQKIKNNCLTKTSSPFDSPKRGTLSRIKLIEGKIADGDLKGAARLLFTNDVLSPDTPDTLSALHSKHPPAPVIPYFFDSPTADQACLEIEGKDVIDAIISFKTGSAAGLDGISPQHLKDLTSYSVGDAGVQLICSITKLINFMFSGKINADIASLLFGANLIALTKKDGGVRPIAVGSTLRRLASKIAVRHIKSKLQSVFEPIQLGFGTKGGCEAAVHALRTYLSYDYCEIVVKIDVKNAFNSVNRDAMLTEVKNKIPELYQYLLTCYAEPSKLIYRSHELSSEVGCQQGDPLGPAIFSLAINPIIQNLKSKFNVWYLDDGTLGGDVDTVLSDLSDIKTYFENIGLELNFSKCELFIQKTSYGLDNLKSKLNFLAPNIKIVDRKSLCLLGSPIFEESFPDYITNTISKFQSHANCLLEISPHYALIILKFCLFVPKFTYVLRCSPFWKHPNLLSPIDDLVKTSLETILNIQLNEPSWLQASLPIRFGGLGIRKISSVASPAFLSSTHSTSRLVGNVLRALPTNYETAGLEDAKNAFQIACPGKEFPDNLKSQRSWDDIYCDLTYKSILSRSSGPDRARLLAVGTREAGHWLHAHPSPYTGTFLDPTSLRLATGLRLGVTVCTPHTCPCGTDVDRLGHHGLCCQKSAGRFSRHATLNDIIRRSLASINVPALLEPTGIVRDDGKRPDGVSLVPWSLGRMLVWDATCVDTLAPSHLQRTTSKAGAAAENAENLKVIKYGGLGREYNFVPFGVETLGPWGPSAHKLFAEIAKRLVDVTGDRKAGGFLAQRISIAIQRGNAASILGTMPRGPFLSFT

SEQ ID NO: 17848 - protein, 950 aa, Notocelia uddmanniana
MIAGTQPISTAHQCHLCSKSFETSRGLNIHYSRKHRNCLSQNATVVSGPNDIPPPNNNQSQPSNLQLELSHLKLNFPVIKRIPRGARISVATRLSYLIDQCVEVNSFDTWRNLLTFAYHTLHASDGIEISLTQQIKNNCSIPSVSTNPIPKISKNNAPSFNIAKAVETKISDGDLKGAARILFSSDTLSPDTPDTLSALRSKHPSAPSTPPFLDPPTAIQDCLHIEQKHIADAIAGFKTGSAAGLDGISPQHLKDLTAHSVGDAGIKLITSLNNIINLMLSGSINPDIVPVLYGANLIALTKKDGGVRPIAVGTTLRRLASKIAVRHIFSKLQRKFEPFQLGFGTRGGCEAAVHALRTFLSTDDCQVLLKIDIKNAFNSVNRDTLLAEIRNHIPELYNYLLHCYADPTKLMYRNHELSSEVGCQQGDPLGPAIFSLAINPIIQNLTSKFNIWYLDDGTLGGNIDSVLSDLSTLKTKFKSIGLDLNYSKCELYIHDTSLNHLDTANKFNILTPNIKSVTKDSLSLLGTPIFDDFLPVFINNTVAKFQNCSDRLLEISPHSAFFILKFCLFVPKLTYMLRCSPFWKHKNLLAPIDALVKTQLEHILNLKLTEQSWQQASLPVRYGGLGVRKISCVALPAFLSSAHSSGDLVGKILRASPANYEISDLDDGRNAWLLACPGQNFPFNPKTQRGWDDVLCKLKYTSLVDDATGADRARLMAAGCREAGHWLNAFPSPNTGTHLDKNILRLAVGLRLGVPVCAPHKCLCGSDVDRLGHHGLSCQRSAGRFSRHAAINDIIRRSLATVNVPAILEPSGIARDDGKRPDGMSLIPWKMGRVLVWDATCVDTLAPSHLHGTTHKVGAAAEAAEALKRRKYRSLDANYNFVAFGVETLGPWGPAAQKLFKELAKRLVDVTGDKRAGSFLAQRISIAIQRGNAASILGTMPQGPILHLGF

SEQ ID NO: 17849 - protein, 672 aa, Notocelia uddmanniana
MLSGSINPDIVPVLYGANLIALTKKDGGVRPIAVGTTLRRLASKIAVRHIFSKLQRKFVPFQLGFGTRGGCEAAVHALRTFLSTDDCQVLLKIDIKNAFNSVNRDTLLAEIRNHIPELYNYLLHCYADPTKLMYRNHELSSEVGCQQGDPLGPAIFSLAINPIIQNLTSKFNIWYLDDGTLGGNIDSVLSDLSTLKTKFKSIGLDLNYSKCELYIHDTSLNHLDTANKFNILTPNIKSVTKDSLSLLGTPIFDDFLPVFINNTVAKFQNCSDRLLEISPHSAFFILKFCLFVPKLTYMLRCSPFWKHKNLLAPIDALVKTQLEHILNLKLTEQSWQQASLPVRYGGLGVRKISCVALPAFLSSAHSSGDLVGKILRASPANYEISDLDDARNAWLLACPGQNFPFNPKTQRGWDDVLCKLKYTSLVDDATGADRARLMAAGCREAGHWLNAFPSPNTGTHLDKNILRLAVGLRLGVPVCAPHKCLCGSDVDRLGHHGLSCQRSAGRFSRHAAINDIIRRSLATVNVPAILEPSGIARDDGKRPDGMSLIPWKMGRVLVWDATCVDTLAPSHLHGTTHKVGAAAEAAEALKRRKYRSLDANYNFVAFGVETLGPWGPAAQKLFKELAKRLVDVTGDKRAGSFLAQRISIAIQRGNAASILGTMPQGPILDLGF

SEQ ID NO: 17850 - protein, 950 aa, Notocelia uddmanniana
MIAGTQPISTAHQCHLCSKSFETSRGLNIHYSRKHRNCLSQNATVVSGPNDIPPPNNNQSQPSNLQLELSHLKLNFPVIKRIPRGARISVATRLSYLFDQCVEVNSFDTWRNLLTFAYHTLHASDGIEISLTQQLKNNCSIPSVSTNPIPKISKNNAPSFNIAKAVETKISDGDLKGAARILFSSDTLSPDTPDTLSALRSKHPSAPSTPPFLDPPTAIQDCLHIEQKHIADAIAGFKTGSAAGLDGISPQHLKDLTAHSVGDAGIKLITSLNNIINLMLSGSINPDIVPVLYGANLIALTKKDGGVRPIAVGTTLRRLASKIAVRHIFSKLQRKFEPFQLGFGTRGGCEAAVHALRTFLSTDDCQVLLKIDIKNAFNSVNRDTLLAEIRNHIPELYNYLLHCYADPTKLMYRNHELSSEVGCQQGDPLGPAIFSLAINPIIQNLTSKFNIWYLDDGTLGGNIDSVLSDLSTLKTKFKSIGLDLNYSKCELYIHDTSLNHLDTANKFNILTPNIKSVTKDSLSLLGTPIFDDFLPVFINNTVAKFQNCSDRLLEISPHSAFFILKFCLFVPKLTYMLRCSPFWKHKNLLAPIDALVKTQLEHILNLKLTEQSWQQASLPVRYGGLGVRKISCVALPAFLSSAHSSGDLVGKILRASPANYEISDLDDARNAWLLACPGQNFPFNPKTQRGWDDVLCKLKYTSLVDDATGADRARLMAAGCREAGHWLNAFPSPNTGTHLDKNILRLAVGLRLGVPVCAPHKCLCGSDVDRLGHHGLSCQRSAGRFSRHAAINDIIRRSLATVNVPAILEPSGIARDDGKRPDGMSLIPWKMGRVLVWDATCVDTLAPSHLHGTTHKVGAAAEAAEALKRRKYRSLDANYNFVAFGVETLGPWGPAAQKLFKELAKRLVDLTGDKRAGSFLAQRISIAIQRGNAASILGTMPQGPIFDLGF

SEQ ID NO: 17851 - protein, 950 aa, Notocelia uddmanniana
MIAGTQPISTAHQCHLCSKSFETSRGLNIHYSRKHRNCLSQNATVVSGPNDIPPPNNNQSQPSNLQLELSHLKLNFPVIKRIPRGARISVATRLSYLIDQCVEVNSFDTWRNLLTFAYHTLHASDGIEISLTQQLKNNCSIPSVSTNPIPKISKNNAPSFNIAKAVETKISDGDLKGAARILFSSDTLSPDTPDTLSALRSKHPSAPSTPPFLDPPTAIQDCLHIEQKHIADAIAGFKTGSAAGLDGISPQHLKDLTAHSVGDAGIKLITSLNNIINLMLSGSINPDIVPVLYGANLIALTKKDGGVRPIAVGTTLRRLASKIAVRHIFSKLQRKFEPFQLGFGTRGGCEAAVHALRTFLSTDDCQVLLKIDIKNAFNSVNRDTLLAEIRNHIPELYNYLLHCYADPTKLMYHNHELSSEVGCQQGDPLGPAIFSLAINPIIQNLTSKFNIWYLDDGTLGGNIDSVLSDLSTLKTKFKSIGLDLNYSKCELYIHDTSLNHLDTANKFNNLTPNIKSVTKDSLSLLGTPIFDDFLPVFINNTVAKFQNCSDRLLEISPHSAFFILKFCLFVPKLTYMLRCSPFWKHKNLLAPIDALVKTQLEHILNLKLTEQSWQQASLPVRYGGLGVRKISCVALPAFLSSAHSSGDLVGKILRASPANYEISDLDDARNAWLLACPGQNFPFNPKTQRGWDDVLCKLKYTSLVDDATGADRARLMAAGCREAGHWLNAFPSPNTGTHLDKNILRLAVGLRLGVPVCAPHKCLCDSDVDRLGHHGLSCQRSAGRFSRHAAINDIIRRSLATVNVPAILEPSGIARDDGKRPDGMSLIPWKMGRVLVWDATCVDTLAPSHLHGTTHKVGAAAEAAEALKRRKYRSLDANYNFVAFGVETLGPWGPAAQKLFKELAKRLVDLTGDKRAGSFLAQRISIAIQRGNAASILGTMPQGPILDLGF

SEQ ID NO: 17852 - protein, 954 aa, Pammene fasciana
MLAATQPISTVHQCHLCTKYFETSRGLNIHFSKKHRNCLTQNASAVTGQNHIPSPINNNPSHSNTLHLELSHLKLNFPVIKRIPRGARITVATRLSYLIDQCVEGNSFDTWRNLLTFAYHTLHATDDKEISLTQQIKNNCSTPSILPNNQIPKISMNNYDSTSFNFAKAVEAKISDGDLKGAARVLFSSDTLSPDTPETLSALCSKHPSAPSSPPFLDPPTVITDCLQIEQKHITDAIAGFKIGSAAGLDGISPQHLKDLTAHGTGDAGVKLVNSLNNVINLMLSGRLNPDIVPVIYGANLIALTKKDGGVRPIAVGTTLRRLASKIAVRHIVSKLKRKFEPVQLGFGTRGGCEAAVHALRTFLNTDDCQVLLKIDVKNAFNSVNRDTLLAEIRNHIPELYNYLLHCYADPTKLMYRNHELSSEVGCQQGDPLGPAIFSLAINPIIQNLTSKFNVWYLDDGTLGGDIDTVLSDLSTLTTKFKSIGLDLNYSKCELYIHDTSLNPSDTANKFNILTPNIKSVTKDSLSLLGTPIFDDFLPVFINNTIAKFQNCADRLLEISPHSALFILKFCLFVPKLTYMLRCSPFWKHKHLLTSIDALVQTHLELILNLKLTEQSWLQASLPVRYGGLGVRKISSVALPAFLSSVHSSGDLVGKILRAPPTNYEISGLDDARNAWLSACPGQNFPINLKSQRGWDDVLCKLTYTSVLDNSTGPERARLMAVGCKEAGHWLSAYPSPNTGTHLAANTLRVAVGLRLGVPVCAPHKCLCGSDVDRLGHHGLSCQRSVGRFSRHAALNDIIRRSLATVNVPAILEPTGIARDDGKRPDGMSLIPWRMGRVLVWDATCVDTLAPSHLHGTTRKVGAAAEEAEARKRRKYRGLDANYNFVAFGVETLGPWGPAAQKLYREMAKRLVDVTGDKRAGSFLAQRISVAIQRGNTASILGTIPQGPTLDLDF

SEQ ID NO: 17853 - protein, 950 aa, Notocelia uddmanniana
MIAGTQPISTAHQCHLCSKSFETSRGLNIHYSRKHRNCISQNATVVSGPNDIPPPNNNQSQPSNLQLELSNLKLNFPVIKRIPRGARISVATRLSYLIDQCVEVNSFDAWRNLLTFAYHTLHASDGIEISLTQQIKNNCSIPSVSTNPIPKISKNNAPSFNIAKAVEAKISDGDLKGAARILFSSDTLSPDTPDTLSALRSKHPSAPSTPPFLDPPTAIQDCLHIEQKHIADAIASFKTGSAAGLDGISPQHLKDLTAHSVGDAGIKLITSLNNIINLMLSGSINPDIVPILYGANLIALTKKDGGVRPIAVGTTLRRLASKIAVRHIFSKLQRKFEPFQLGFGTRGGCEAAVHALRTFLRTDDCQVLLKIDIKNAFNSVNRDTLLAEIRNHIPELYNYLLHCYADPTKLMYRNHELSSEVGCQQGDPLGPAIFSLAINPIIQNLTSKFNIWYLDDGTLGGNIDSVLSDLATLNTKFKSIGLDLNYSKCELYIHDTTLNHLDTVNKFNILTPNIKSVTKDSLSLLGTPIFDDFLPVFINNTVAKFQNCSERLLEISPHSAFFIIKFCLFVPKLTYMLRCSPFWKHKNLLAPIDALVKTHLEHILNLKLTEQSWQQASLPVRYGGLGVRKISCVALPAFLSSVHSSGDLVGKILRASPANYEISDLDDAINAWLLACPGQNLPFNPKSQRGWDDILCKLKYTSLVDDATGADRARLIAAGCREAGHWLNAFPSPNTGNHLDRNTLRLAVGLRLGVPVCAPHKCLCGSEVDRLGHHGLSCQRSAGRFTRHAAINDIIRRSLATVNVPAILEPSGIARDDGKRPDGMSLIPWKMGRVLVWDATCVDTLAPSHLHSTTHKVGAAAEAAEALKRRKYRSLDANYNFVAFGVETLGPWGPAAQKLFQELAKRLVDVTGDKRAGSFLAQRISIAIQRGNAASILGTMPQGPILDLGF

SEQ ID NO: 17854 - protein, 941 aa, Notocelia uddmanniana
MSIRMFYYIGRIFQQILVNQNQNQNHVYCSTVYKGDNLNIYVHIFILIWKHILGNLQLELSNLKLNFPVIKRIPRGARISVATRLSYLIDQCVEVNSFDAWRNLLTFAYHTLHASDGIEISLTQQIKNNCSIPSVSINPIPKISKNNAPSFNIAKAVEAKISDGDLKGAARILFSSDTLSPDTPDTLSALRSKHPSAPSTPPFLDPPTAIQDCLHIEQKHIADAIASFKTGSAAGLDGISPQHLKDLTAHSVGDAGIKLITSLNNIINLMLSGSINPDIVPILYGANLIALTKKDGGVRPIAVGTTLRRLASKIAVRHIFSKLQRKFEPFQLGFGTRGGCEAAVHALRTFLRTDDCQVLLKIDIKNAFNSVNRDTLLAEIRNHIPELYNYLLHCYADPTKLMYRNHELSSEVGCQQGDPLGPAIFSLAINPIIQNLTSKFNIWYLDDGTLGGNIDSVLSDLATLKTKFKSIGLDLNYSKCELYIHDTTLNHLDTVNKFNILTPNIKSVTKDSLSLLGTPIFDDFLPVFINNTVAKFQNCSERLLEISPHSAFFIIKFCLFVPKLTYMLRCSPFWKHKNLLAPIDALVKTHLEHILNLKLTEQSWQQASLPVRYGGLGVRKISCVALPAFLSSVHSSGDLVGKILRASPANYEISDLDDARNAWLLACPGQNFPFNPKSQRGWDDILCKLKYTSLVDNATGADRARLMAAGCREAGHWLNAFPSPNTGTHLDRNTLRLAVGLRLGVPVCAPHKCLCGSDVDRLGHHGLSCQRSAGRFSRHAAINDIIRRSLATVNVPAILEPSGIARDDGKRPDGMSLIPWKMGRVLVWDATCVDTLAPSHLHSTTHKVGAAAEAAEALKRRKYRSLDANYNFVAFGVETLGPWGPAAQKLFQELAKRLVDVTGDKRAGSFLAQRISIAIQRGNAASILGTMPQGPILDLGF

SEQ ID NO: 17855 - protein, 954 aa, Pammene fasciana
MLAATQPISTVHQCHLCTKYFETSRGLNIHFSKKHRNCLTQNASAVTGQNHIPSPINNNPSHSNTLHLELSHLKLNFPVIKRIPRGARITVATRLSYLIDQCVEGNSFDTWRNLLTFAYHTLHGTDDKEISLTQQIKNNCSTPSILPNNQIPKISMNNYDSTSFNFAKAVEAKISDGDLKGAARVLFSSDTLSPDTPETLSALCSKHPSAPSSPPFLDPPTVITDCLQIEQKHITDAIAGFKIGSAAGLDGISPQHLKDLTAHGTGDAGVKLVNSLNNVINLMLSGRLNPDIVPVIYGANLIALTKKDGGVRPIAVGTTLRRLASKIAVRHIVSKLKRKFEPVQLGFGTRGGCEAAVHALRTFLNTDDCQVLLKIDVKNAFNSVNRDTLLAEIRNHIPELYNYLLHCYADPTKLMYRNHELSSEVGCQQGDPLGPAIFSLAINPIIQNLTSKFNVWYLDDGTLGGDIDTVLSDLSTLTTKFKSIGLDLNYSKCELYIHDTSLNPSDTANKFNILTPNIKSVTKDSLSLLGTPIFDDFLPVFINNTIAKFQNCADRLLEISPHSALFILKFCLFVPKLTYMLRCSPFWKHKHLLTSIDTLVQTHLELILNLKLTEQSWLQASLPVRYGGLGVRKISSVALPAFLSSVHSSGDLVGKILRAPPTNYEISGLDDARNAWLSACPGQNFPINLKSQRGWDDVLCKLTYTSVLDNSTGPERARLMAVGCKEAGHWLSAYPSPNTGTHLAANTLRVAVGLRLGVPVCAPHKCLCGSDVDRLGHHGLSCQRSVGRFSRHAALNDIIRRSLATVNVPAILEPTGIARDDGKRPDGMSLIPWRMGRVLVWDATCVDTLAPSHLHGTTRKVGAAAEEAEARKRRKYRGLDANYNFVAFGVETLGPWGPAAQKLYRELAKRLVDVTGDKRAGSFLAQRISVAIQRGNAASILGTIPQGPTLDLDF

SEQ ID NO: 17856 - protein, 954 aa, Pammene fasciana
MLASTQPATSSNNQCTLCPKSFPSSRGLKIHFSKIHRKCLSQNSPLRPDTASQLPSTSYLPFNNLHTELSYLKNNISITKRIPRGARITVAIHLTYLIEQCIKLNNLETWRNLLTFSFQTLYASTDDRKLSLTQKIKNNCSNPLLPLPTDIPPRHSSNNSKTAFNLAKTVEDKICDGDLKGAARLLFSSDTLSPDNDDTLSALRSKHAPAPTTPFLLGPPTPSKDCLQVEDKHIVDAIFSFKNGSAAGLDGISPQHLKDLTAHSVGDAGRKLITSLSTLVNLMLSGCVNADIVPVLYGANLIALTKKDGGVRPIAIGSTLRRLTSKIAVRHIVSKLQRKFEPIQLGFGTRGGCEAAVHALRTYLSNAECQVLVKIDFKNAFNSVNRDTLLAEIRSNIPELYNYLLHCYADPSKLMYKNHELSSEVGCQQGDPLGPAIFSLAVNPIIQNLKSKFNVWYLDDGTLGGNLDTVLSDLSTLKTKFESIGLDLNYKKCELYIHDSSLNESSIIDQFNILTPNIKIVTKDNLSLLGTPIFDNFFPTYINSTITKFQNCADRLLEISPHSALFILKFCLFVPKLTYMLRCSPFWNHQNLLLPLDSLIQTNLEHVLNLKPTEKSWLQASLPVRYGGIGLRKISSVALPAFLSSVHSSADLIGKILRGSPSNYEISGLDDARKAWISACPGQDLPCNPKSQRSWDDALSKLTYTTLLNQSTGAERARLTAAGCREAGHWLSAYPSPNTGTYLAPETLRLAVGLRLGAQVCAPHRCPCGKDVDQLGHHGLSCQRSAGRLSRHAALNDIIRRSLATVNVPAILEPSGIARDDGKRPDGMSLIPWSLGRVLVWDATCVDTLAPSHLHGTMNKAGAAAEVAEANKRRKYRGLDANYNFVAFGVETLGPWGPAAQKLYRQVAKRLVEVTGDKRAGSFLAQRISVAVQQGNAASVLGTMPQGPILEIDF

SEQ ID NO: 17857 - protein, 954 aa, Pammene fasciana
MLAATQPISTVHQCHLCTKYFETSRGLNIHFSKKHRNCLTQNASAVTGQNHIPSPINNNPSHSNTLHLELSHLKLNFPVIKRIPRGARITVATRLSYLIDQCVEGNSFDTWRNLLTFAYHTLHATDDKEISLTQQIKNNCSTPSILPNNQIPKISRNNYDSTSFNFAKAVEAKISDGDLKGAARVLFSSDTLSPDTPETLSALCSKHPSAPSSPPFLDPPTVITDCLQIEQKHITDAIAGFKIGSAAGLDGISPQHLKDLTAHGTGDAGVKLVNSLNNVINLMLSGRLNPDIVPVIYGANLIALTKKDGGVRPIAVGTTLRRLASKIAVRHIVSKLKRKFEPVQLGFGTRGGCEAAVHALRTFLNTDDCQVLLKIDVKNAFNSVNRDTLLAEIRNHIPELYNYLLHCYADPTKLMYRNHELSSEVGCQQGDPLGPAIFSLAINPIIQNLTSKFNVWYLDDGTLGGDIDTVLSDLSTLTTKFKSIGLDLNYSKCELYIHDTSLNPSDTANKFNILTPNIKSVTKDSLSLLGTPIFDDFLPVFINNTIAKFQNCADRLLEISPHSALFILKFCLFVPKLTYMLRCSPFWKHKHLLTSIDALVQTHLELILNLKFTEQSWLQASLPVRYGGLGVRKISSVALPAFLSSVHSSGDLVGKILRAPPTNYEISGLDDARNAWLSACPGQNFPINLKSQRGWDDVLCKLTYTSVLDNSTGPERARLMAVGCKEAGHWLSAYPSPNTGTHLAANTLRVAVGLRLGVPVCAPHKCLCGSDVDRLGHHGLSCQRSVGRFSRHAALNDIIRRSLATVNVPAILEPTGIARHDGKRPDGMTLIPWRMGRVLVWDATCVDTLAPSHLHGTTRKVGAAAEEAEARKRRKYRGLDANYNFVAFGVETLGPWGPAAQKLYRELAKRLVDVTGDKRAGSFLAQRISVAIQRGNAASILGTIPQGPTLDLDF

SEQ ID NO: 17858 - protein, 670 aa, Atethmia centrago
MFSGKINADIASLLFGANLIALTKKDGGVRPIAVGSTLRRLASKIAVRHIKSKLQSVLESIQLGFGTKGGCEAAVHALRTYLSYDDCEIVVKIDVKNAFNSVNRDAMLTEVKNKIPELYQYLLTCYAEPSKLIYRSHELSSEVGCQQGDPLGPAIFSLAINPIIQNLKSKFNVWYLDDGTLGGDVDTVLSDLSDIKTNFENIGLELNFSKRELFIKKTSYGLDNLKSKLNFLAPNIKIVDRKSLCLLGSPIFEESFPDYITNTISKFQSHANCLLEISPHYALIILKFYLFVPKFTYVLRCSPFWKHPNLLSPIDDLVKTSLETILNIQLNEPSWLQAFPIRFGGLGIRKISSVASPAFLSSTHSTSRLIGNVLRALPTNYETAGLEDAKNAFQIACPGKEFPDNLKSQRSWDDIYCDLTYKSILSLGPDRARLLAVGTREAGHWLHAHPSPYTGTFLDPTSLRLATGLRLGVTVCTPHTCPCGTDVDRLGHHGLCCQKSAGRFSRHATLNDIIRRSLASINVPALLEPTGIVRDDGKRPDGVSLVPWSLGRMLVWDATCVDTLAPSHLQRTTSKAGAAAENAENLKVIKYGGLGREYNFVPFGVETVGPWGPSAHKLFAEIAKRLVDVTGERKAGGFLAQRISIAIQRGNAASILGTMPRGPFLSLTYF

SEQ ID NO: 17859 - protein, 948 aa, Notocelia uddmanniana
MIAGTQPISTAHQCHLCSKSFETSRGLNIHYSRKHRNCLSQNATVVSGPNDIPPPNNNQSQPSNLQLELSHLKLNFPVIKRIPRNARISVATRLSYLIDQCVEVNSFDTWRNLLTFAYHTLHASDGIEISLTQQIKNNCSIPSVSTNPIPKISKNNAPSFNIAKAVEAKISDGDLKGAARILFSSDTLSPDTPDTLSALRSKHPSAPSTPPFLDPPTAIQDCLHIEQKHIADAIAGFKTGSAAGLDGISPQHLKDLTAHSVGDAGIKLITSLNNIINLMLSGSINPDIVPVLYGANLIALTKKDGGVRPIAVGTTLRRLASKIAVRHIFSKLQRKFEPFQLGFGTRGGCEAAVHALRTFLSTDDCQVLLKIDIKNAFNSVNRDTLLAEIRNHIPELYNYLLHCYADPTKLMYRNHELSSEVGCQRGDPLGPAIFSLAINPIIQNLTSKFNIWYLDDGTLGGNIDSVLSDLSTLKTKFRSIGLDLNYSKCELYIHDTSLNHLDTANKFNILTPNIKSVTKDSLSLLGTPIFDDFLPVFINNTVAKFQNCSDRLLEPHSAFFILKFCLFVPKLTYMLRCSPFWKHKNLLAPIDALVKTQLEHILNLKLTEQSWQQASLPVRYGGLGVRKISCVALPAFLSSAHSSGDLVGKILRASPPNYEISDLDDARNAWLLACPGQNFPFNPKTQRGWDDVLCKLKYTSLVDDATGADRARLMAAGCREAGHWLNAFPSPNTGTHLDKNILRLAVGLRLGVPVCAPHKCLCGSDVDRLGHHGLSCQRSAARFSRHAAINDIIRRSLATVNVPAILEPSGIARDDGKRPDGMSLIPWKMGRVLVWDATCVDTLAPSHLHGTTHKVGAAAEAAEALKRRKYRSLDANYNFVAFGIGTLGPWGPAAQKLFKELAKRLVDVTGDKRAGSFLAQRISIAIQRGNAASILGTMPQGPILDLGF

SEQ ID NO: 17860 - protein, 940 aa, Cydia splendana
MQAASQPTATYSCHLCSKSFLTSKGLNIHKTKAHRTCVSQDDVPLNLDHALPARHTHPFHVQLSQLKNNVEVVKRIPRGARIVVATHLAQLVQKCYESNSPQDWHNLLVFPYTILHVKDDDQNLSLTQKIKNNCSPHSVPPFVQEDRPSTLYRKNKNIENKISDGDLKGAARLLFSSDVLSPDNPDTLLALQAKHPTAPATPFFFDPPVPTESCLHIKDVDVYNAVLSFKTGSAAGLDGLAPQHLKDLTCPSVGDAGVQLIACIAKLINFMYSGGVHPDVVPIIYGANLIALTKKDGGVRPIAVGSTLRRLASKIAVRYILAKLQKIFEPVQLGFGVRGGCEAAVHALRSYLEAGQCEVLLKIDVKNAFNSLNRDTLLSEVKSHIPEIYNYLLHCYGDPSKLMYRSNELSSEVGCQQGDPLGPAIFSLGINQIIKNLSSKFNVWYLDDGTLGGDVDSVLGDLSLINDKFRSIGLTLNFDKCELYIPDSCVLDVNSLIQRFNQLAPNIKILDKRTLCLLGSPIFEESYPDYIQNSVSKFQDNSHRLLEISPHYALSIIKFCLFIPKLTYVLRCCPLWKNQDLFSRVDDLIKNNLERVLNIKFSDRSWCQGSLPIRHGGLGIRRMSGVALPAFLSSVHSSLGLIGKILRTNYEVSGLEVAKNAWLRACPGQDIPEHPESQKNWDDPVCKLAVATLLDQCGGAAERARLLAVGTREAGHWLRAHPSPKIGTFLEPNTLRLSICLRLGIPVCAPHRCPCGADVDQLGHHGLSCQRSAGRFSRHAALNDIIRRSLASVNVPALLEPTGILRSDGKRPDGMSLIPWSMGRVLVWDATCVDTLAPSHLHGTSARAAAAAEAAENAKVGKYRGLGAEYCFVPFGVETLGPWGPGALSLFGDLSKRLRDATGDPRAGSYLAQRFSLAVQRGNAASILGTLPQGPFLDLV

SEQ ID NO: 17861 - protein, 940 aa, Cydia splendana
MQAASQPTATYSCHLCSKSFLTSKGLNIHKTKAHRTCVSQDDVPLNLDHALPARHTHPFHVQLTQLKNNVEVVKRIPRGARIVVATHLAQLVQKCYESNSPQDWHNLLVFPYTILHVKDDDQNLSLTQKIKNNCSPHSVPPFVQEDRPSTLYRKNKNIENKISDGDLKGAARLLFSSDVLSPDNPDTLLALQAKHPTAPATPFFFDPPVPTESCLHIKDVDVYNAVLSFKTGSAAGLDGLAPQHLKDLTCPSVGDAGVQLIACIAKLINFMYSGGVHPDVVPIIYGANLIALTKKDGGVRPIAVGSTLRRLASKIAVRYILAKLQKIFEPVQLGFGVRGGCEAAVHALRSYLEAGQCEVLLKIDVKNAFNSLNRDTLLSEVKSHIPEIYNYLLHCYGDPSKLMYRSNELSSEVGCQQGDPLGPEIFSLGINQIIKNLSSKFNVWYLDDGTLGGDVDSVLGDLSLINDKFRSIGLTLNFDKCELYIPDSCVLDVNSLIQRFNQLAPNIKILDKRTLCLLGSPIFEESYPDYIQNSVSKFQDNSHRLLEISPHYALSIIKFCLFIPKLTYVLRCCPLWKNQDLLSRVDDLIKNNLERVLNIKFSDRSWCQGSLPIRHGGLGIRRMSGVALPAFLSSVHSSLGLIGKILRTNYEVSGLEVAKNAWLRACPGQDIPEHPESQKNWDDPVCKLAVATLLDQCGGAAERARLLAVGTREAGHWLRAHPSPKIGTFLEPNTLRLSICLRLGIPVCAPHRCPCGADVDQLGHHGLSCQRSAGRFSRHAALNDIIRRSLASVNVPALLEPTGILRSDGKRPDGMSLIPWSMGRVLVWDATCVDTLAPSHLHGTSARAAAAAEAAENAKVGKYRGLGAEYCFVPFGVETLGPWGPGALSLFGDLSKRLRDATGDPRAGSYLAQRFSLAVQRGNAASILGTLPQGPFLDLV

SEQ ID NO: 17862 - protein, 949 aa, Atethmia centrago
MHTATQSGDGTLNQNYICLHCDRSFQSKRGLNIHISKKHRLCISQNGPALNLDPVSLPAPVSDSPNSTPFHLYLSYLKNNVPVIKRVPRGARISVANHLSGLIKKCVESNQIVDWHNLFLFSYTTLHVKKDEATISLTQKIKNNCLTKTTSPFDSPKRGTLSRIKLIEGKIADGDLKGAARLLFTNEVLSPDTPDTLSALHSKHPPAPVIPYFFDSPTADQACLEIEGKDVIDAIISFKTGSAAGLDGISPQHLKDLTSYSVGDAGVQLICSITKLINFMFSGKINADIASLLFGANLIALTKKDGGVRPIAVGSTLRRLASKIAVRHIKSKLQSVFEPIQLGFGTKGGCEAAVHALRTYLSYDDCEIVVKIDVKNAFNSVNRDAMLTEVKNKIPELYQYLLTCYAEPSKLIYRSHELSSEVGCQQGDPLGPAIFSLAINPIIQNLKSKFNVWYLDDGTLGGDVDTVLSDLSDIKTNFENIGLELNFSKCELFIQKTYGLDNLKSKLNFLAPNIKIVDRKSLCLLGSPIFDESFPDYITNTISKFQSHANCLLEISPHYALIILKFCLFVPKFTYVLRCSPFWKHPNLLSPIDDLVKTSLETILNIQLNEPSWLQASLPIRFGGLGIRKISSVASPAFLSSTHSTSRLIGNVLRALPTNYETAGLDDAKNAFQIACPGKEFPDNLKSQRSWDDIYCDLTYKSILSRSSGPDRARLLAVGTREAGLWLHAHPSPYTGTFLDPTSLRLATGLRLGVTVCTPHTCPCGTDVDRLGHHGLCCQKSAGRFSRHATLNDIIRRSLASINVPALLEPTGIVRDDGKRPDGVSLVPWSLGRMLVWDATCVDTLAPSHLQRTTSKAGAAAENAENLKVIKYVGLGREYNFVPFGVETLGPWGPSAHKLFAEIAKRLVDVTGDRKAGGFLAQRISIAIQRGNAASILGTMPRGPFLSLT

SEQ ID NO: 17863 - protein, 956 aa, Mellicta athalia
MQSGTQSCDGTSNATYTCTQCNKPFKSLKGLNIHTSKIHRTFFSQSSSPVDIHPIIPSTPTHVANDPTPFHTYLSHLKNSIPIVKRIPRGARITVATHLSQLIQKCYMSNCTQDWQNLFLFSYSTLHIIIKTDEPKLSLTQKIKNNCAVSSSLSPAPLIKHDAPRNRNKLIINKICDGDLKGAARLLFSNDVLSPDTPDTLQALLTKHPPAPVNPYFLDPPTAGQACLQIQNKDVTNAISSFKPGSASGLDGISPQHLKDLTSHSVGDAGTQLLNSITKLINFMYSGNVNPEIVPILFGANLIALTKKDGGVRPIAVGSTLRRLASKIAVRHILPKLNSEFEPVQLGFGVKGGCEAAVHALRSFLTYGQPDVLLKIDVKNAFNSINRDTLLTEIKQHIPELYNYLLLSYGDPTKLLYRSNELSSEVGCQQGDPLGPAIFSLAINPIIKNLNSKFNVWYLDDGTLAGDVDTVFSDLFLIKNKFEAIGLELNFSKCELFINNSVLNLNDIKQKFNILAPNIKIVNSNSLYLLGSPIFDDSIPEYINNSITKFQNCVDRLLEISSHYALCILKFCLFVPKFTYVLRCCSFWNHPDLLTKVDKLIKISLESILNNMQLNEQSWTQASLPIRYGGLGIRKISSVALPAFLSSVHSSANLISKILRAPPPNFEIAGLEEARNAFLIACPGQNFPVSTNSQRSWDDIICKFTFDSLLSCSTGSARARLLAVGTHEAGYWLHAYPSSNTGTFLEPDTLRIATCLRLGVPVCAPHKCPCGSDVDKLGHHGLSCQKSAGRFSRHAALNDIIRRSLATVNVPSILEPSGIARDDGKRPDGMSLIPWKMGRVLVWDATCSDTLAPSHLHGTNNRAGAACEAAEKAKQSKYRGLGSEYDFVPFGVETLGPWGPNAIRLFKEIAKRLVDITGDRRAGSYLGQRISLAIQRGNAASIFGTLPKGTSFNNIF

SEQ ID NO: 17864 - protein, 933 aa, Notocelia uddmanniana
MQTATQSGDSTATTNHPCQLCAKSFKTVKGLNIHKAKCHRNCLSQDASPLNLDDSSPIHQPFHIRLSHLKKNVQLVKRIPRGARITVANHLSQTLQKCFECNSPQDWHNLFLFQYLVLHAKQDNSDVSLTQKLKNNCTDHSIPPTSHKQPTLFPNKLKSIENKISDGDLKGAARMLFSNDVLSPDNPDTLSALQTKHPPAPATPYFYDPPTAIHSCLQIQNKDVLNAIFSFKNGSAAGLDGLSPQHLKDLTSPSVGDAGEKLITRIANLINLMYSGNIHPDIVPILYDANLIALTKKDGGVSPIAVGATLRRLASKIAVRYISEKLQNLFEPIQLGFGIKGGCEAAVHALRTFLSHGQCEVLLKIDVKNAFNSINRDTLLAEIKSNIPEVYNYLLHCYADPTKLMYRSKELSSEVGCQQGDPIISLAINPIIKKLASKFNVWYLDDGTLGGDANTVLSDLSLITDKFNSIGLELNFNKCELYIPNNCNNVINKFNQLAPNIKIVDKSSLCLLGSPIFEEFYPGCIQNCISKFENHSHRLLEISPHYALTIVKFCLFVPKLTYLLRCCPLWNHQNLLSKIDILIKSNLGSILNIQLSEQSWTQGSLPIRYGGLGIRKISSIALPAFLSSVHSSSSLIGKILPTHYETSGLEDGKNAWLIACPGQNFPEHPKSQRCWDDISCKLTADSLLSHCSTTERARLLAVGAREAGYWLHAHPSSCTGTFLDPNTLRIAVCLRLGVPVCAPHDCPCGSDVDQLGYHGLSCQRSAGRFSRHAALNDIIRRSLASANVPAILEPAGMSRNDGKRPDGMTLIPWSMGRVLVWDATCVDTLAPSHLHGTSTRAAAAAEAAERVKIGKYSDLGAEYMFTPFGVETLGPWGPGALSLFNELSKRLIDATGDRRAGSYLGQRISLAIQRGNAASIFGTMPRGPFIDLI

SEQ ID NO: 17865 - protein, 938 aa, Notocelia uddmanniana
MQTATQSGDSTATTNHPCQLCAKSFKTVKGLNIHKAKCHRNCLSQDASPLNLDDSSPIHHQPFHIRLSHLKNNVQLVKRIPRGARITVANHLSQTLQKCFECNSPQDWHNLFLFPYLVLHAKQDNSDVSLTQKLKNNCTDHSIPPTSHKQPTLFPNKLKSIENKISDGDLKGAARMLFSNDVLSPDNPDTLSALQTKHPPAPATPYFCDPPTAIHSCLQIQNKDVLNAIFSFKNGSAAGLDGLSPQHLKDLTSPSVGDAGEKLITRIANLINLMYSGNIHPDIVPILYGANLIALTKKDGGVRPIAVGPTLRRLASKIAVRYISEKLQNLFEPIQLGFGVKGGCEAAVHALRTFLSHGQCEVLLKIDVKNAFNSINRDTLLAEIKSNIPEVYNYLLHCYADPTKLMYRSNELSSEVGCQQGDPLGPAIFSLAINPIIKKLASKFNVWYLDDGTLGGDANTVLSDLSLITDKFNSIGLELNFNKCELYIPNNCNNVINKFNQLAPNIKIVDKSSLCLLGSPIFEEFYPGCIQNCISKFENHSHRLLEISPHYALTIVKFCLFVPKLTYLLRCCPLWNHQNLLSKIDILIKSNLESILNIQLSEQSWTQGSLPIRYGGLGIRKISSIALPAFLSSVHSSSSLIGKILPTHYATSGLEDGKNAWLIACPGQNFPEHPKSQRCWDDISCKLTADSLLSHSSTTERARLLAVGAREAGYWLHAHPSSCTGTFLDPNTLRIAVCLRLGVPVCAPHDCPCGSDVDQLGYHGLSCQRSAGRFSRHAALNDIIRRSLASANVPAILEPAGMSRNDGKRPDGMTLIPWSMGRVLVWDATCVDTLAPSHLHGTSTRAAAAAEAAERVKIGKYSDLGAEYLFTPFGVETLGPWGPGALSLFNELSKRLIDATGDRRAGSYLGQRISLAIQRGNAASIFGTMPRGPFLDLI

SEQ ID NO: 17866 - protein, 949 aa, Cydia splendana
MHAATQSGDGTPYPNFNCVQCDNSFKTQRGLNIHISKKHRLCISQNDAGLNLGPSLLTTPLSDHPNSIPFHLHLSELKNNVPVIKRVPRGARITVAKHLSGLLTKSVENNQIDDWHNLFLFSFKTLHAKKDKTISLTQKIKNNCVSNTTPHISRPSGCSSSTFNKTKLIESKISDGDLKGAARLLFTNDVLSPDTPDTLSALRSKHPPAPSVPQSFAPPTADQACLQIEGKDVIDAIFSFKTGSAAGLDGISPQHLKDLISHSVGDAGEQLVCSLTKLINFMFSGKINTNIVPILYGANLIALTKKDGGVRPIAVGSTLRRLASKIAVRHIRSKLQSLFEPIQLGFGTKGGCEAAVHALRTYLSLDDCEIVVKIDVKNAFNSVIRDTLLTEVKDKIPELYNYLFFCYSDSSKLMYKSHELSSEFGCQQGDPLGPAIFSLAINPIIKNFKSKFNVWYLDDGTLGGDVNTVLSDSSFIKSSFENIGLELNFSKCELFIQKSSCTLTNLQPKFDDLTPNIKSVDKYSLCLLGSPIFEESFPDYISNSITKFKSHTDRLLEISPHYALVILKFCLFVPKFTYVLRCCPFWKHQNLLSPIDDLIKISLETILNIQLSEPSWSQASLPIRVGGLGIRKISSVASPAFLASTHSTSGLIGNILRALPTNCEIAGFEDAKNAFKIACPGKQFPDNPNSQRSWDNVYCDLTYNTLLNNCTGPDRARLLAVGAREAGYWLHAHPSPNTGTFLDPASLRLATGLRLGVSVCTPHICSCGTDVNRLGHHGLSCQKSAGRFSRHASLNDIVRRSLATINVPALLEPTGIIRDDGKRPDGVSLVPWSLGRMLVWDATCVDTLAPSHLQRTTVKAAESAEILKRNKYKSLGREYHFVPFGVETLGPWGPSAHKLFAEIAKRLVDVTGDRRAGGYLAQRISIAIQRGNAASILGTMPQGPILDLS

SEQ ID NO: 17867 - protein, 952 aa, Cydia splendana
MHAATQSGDGTPYPNFNCVQCDNSFKTQRGLNIHISKKHRLCISQNDAGLNLGPSLLTTPLSDHPNSIPFHLHLSELKNNVPVIKRVPRGARITVAKHLSGLLTKCVENNQIDDWHNLFLFSFKTLHAKKDKTISLTQKIKNNCVSNTTPHISRPSGCSSSTFNRTKLIESKISDGDLKGAARLLFTNDVLSPDTPDTLSALRSKHPPAPSVPHSFAPPTADQACLQIEGKDVIDAIFSFKAGSAAGLDGISPQHLKDLISHSVGDAGEQLVCSLTKLINFMFSGKINTNIVPILYGANLIALTKKDGGVRPIAVGSTLRRLASKIAVRHIRSKLQSLFEPIQLGFGTKGGCEAAVHALRTYLSLDDCEIVVKIDVKNAFNSVSRDTLLTEVKDKIPELYNYLFFCYSDSSKLMYKSHELSSEVGCQQGDPLGPAIFSLAINPIIKNLKSKFNVWYLDDGTLGGDVNTVLSDLSFIKSSFENIGLELNFSKCELFIQKSSCTLTNLQPKFDDLTPNIKSVDKYSLCLLGSPIFEESFPDYISNSITKFKSHTDRLLEISPHYALVILKFCLFVPKFTYVLRCCPFWKHQNLLSPIDDLIKISLETILNIQLSEPSWSQASLPIRFGGLGIRKISSVASPAFLASTHSTSGLIGNILRAFPTNCEIAGFEDAKNAFKIACPGKQFPDNPNSQRSWDNVYCDLTYNTLLNNCTGPDRARLLAVGAREAGYWLHAHPSPNTGTFLDPASLRLATGLRLGVSVCTPHICSCGTDVDRLGHHGLSCQKSAGRFSRHASLNDIVRRSLATINVPALLEPTGIIRDDGKRPDGVSLVPWSLGRMLVWDATCVDTLAPSHLQRTTVKAGGAAESAEILKRNKYKSLGREYHFVPFGVETLGPWGPSAHKLFAEIAKRLVDVTGDRRAGGYLAQRISIAIQRGNAASILGTMPQGPILDLS

SEQ ID NO: 17868 - protein, 948 aa, Notocelia uddmanniana
MIAGTQPISTAHQCPLCSKFFETSRGLNIHYSRKHRNCSQNATVVSGPNDVPPPNNNQSQPSNLQLELSHLKLNFPVIKRIPRGARISVATRLSYLIDQCVEVNSFDTWRNLLTFAYHTLHASGGIEISLTQQIKNNCSIPSVSTNTIPKISKNNAPSFNIAKAVEAKISDGDLKGAARILFSSDTLSPDTPDTLSALRSKHPSAPSTPPFLDPPTAIQDCLHIEQKHIADAIAGFKTGSAAGLDGISPQHLKDLTAHSVGDAGLKLITSLNNIINLMLSGSINPDIVPVLYGANLIALTKKDGGVRPIAVGTTLIRLASKIAVRHIFSKLQRKFEPFQLGFGTRGGCEAAVHALRTFLSTDDCQILLKIDIKNAFNSLNRDTLLAEIRNHIPELYNYLLHCYADPTKLMYRNHELSSEVGCQQGDPLGPAIFSLAINPIIQNLTSKFNIRYLDDGTLGGNFTVLSDLSTLKTKFKSIGLDLNYSKCELYIHDTSLNHLDTANKFNILTPNIKSVTKDSLSLLGTPIFDDFLSVFINNTVAKFQNCSDRLLEISPHSAFFILKFCLFVPKLTYMLRCSPFWKHKNLLAPIDALVKTHLEHILNLKLTEQSWQQASLPVRYGGLGVRKISCVALPAFLSSVHSSGDLVGKILRASSENYEISDLDDARNAWLLACPGQNFPFNPKSQRGWDDVLCKVNYTSLVDDATGADRARLMAAGCKEAGHWLNAFPSPNTGTHLDRNTLRLAVGLRLGVPVCAPHKCLCGSDVNRLGHHELSCQRSAGRFSRHAAINDIIRRSLATVNVPAILEPSGIARDDGKRPDGMSLIPWKMGRVLVWDATCVDTLAPSHLHGTTHKVGAAAEAAEALKRRKYRSLDANYNFVAFGVETLGPWDPAAQKLFQELAKRLVDVTEDKRAGSFLAQRISIAIQRGNSASILGTMPQGPILDLGF

SEQ ID NO: 17869 - protein, 946 aa, Atethmia centrago
MHTATQSGDGTLNQNYICLHCDRSFQSKRGLNIHISKKHRLCISQNGPALNLDPVSLPAPVSDSPNSTPFHLYLSYLKNNVPVIKRVPRGARISVANHLSGLIKKCVESNQIVDWHNLFLFSYTTLHVKKDEATISLTQKIKNNCLTKTSSPFDSPKRGTLSRIKLIEGKIADGDLKGAARLLFTNDVLSPDTPDTLSALHSKHPPAPVIPYFFDSPTADQACLEIEGKDVIDAIISFKTGSAAGLDGISPQHLKDLTSYSVGDAGVQLICSITKLINFIFSGKINADIASLLFGANLIALTKKDGGVRPIAVGSTLRRLASKIAVRHIKSKLQFVFEPIQLGFGTKGGCEAAVHALRTYLSYDDCEIIVKIDVKNAFNSVNRDAMLTEVKNKIPELYQYLLTCYAEPSKLIYRSHELSSEVGCQQGDPLGPAIFSLAINPIIQNLKSKFNVWYLDDGTLGGDVDTVLSDLSDIKTNFENIGLELNFSKCELFIQKTSYGLDNLKSKLNFLAPNIKIVDRKSLCLLGSPIFEESFPDYITNTISKFQSHANCLLEISPHYALIILKFCLFVPKFTYVLRCSPFWKHPNLLSPIDDLVKTSLETILNIQLNEPSWLQASLPIRFGGLGIRKISSVASPAFLSSTHSTSRLVRALPTNYETAGLEDAKNAFQIACPGKEFPDNLKSQGSWDDIYCDLTYKSILSRSSGPDRARLLAVGTREAGHWLHAHPSPYTGTFLDPTSLRLATGLRLGVTVCTPHTCPCGTDVDRLGHHGLCCQKSAGRFSRHATLNDIIRRSLASINVPALLEPTGIVRDDGKRPDGVSLVPWSLGRMLEWDATCVDTLAPSHLQRTTSKAGAAAENAENLKVIKYGGLGREYNFVPFGVETLGPWGPSAHKLFAEIAKRLVDVTGDRKAGGFLAQRISIAIQRGNAASILGTMPRGPFLSLT

SEQ ID NO: 17870 - protein, 949 aa, Notocelia uddmanniana
MIAGTQPISTAHQCHLCSKSFETSRGINIHYSRKHRNCLSQNATVVSGPNDIPPPNNNQSQPSNLQLELSHLKLNFPVIKRIPRGARISVATRLSYLIDQCVEVNSFDTWRNLLTFAYHTLHAADGIEISLTQQIKNNCSIPSVSTNPIPKISKNNAPSFNIAKAVEAKISDGDLKGAARILFSSDTLSPDTPDTLSALRSKHPSAPSTPPFLDPPTAIQDCLHIEQKHIADAIAGFKTGSAAGLDGISPQHLKDLTPHSVGDAGIKLITSLNNIINLMLSGSINPDIVPVLYGANLIALTKKDGGVRPIAVGTTLRRLASKIAVRHIFSKLQRKFEPFQLGFGTRGGCEAAVHALRTFLSTDDCQVLLKIDIKNAFNSVNRDTLLAEIRNHIPELYNYLLHCYADPTKLMYRNHELSSEVGCQQGDPLGPAIFSLAINPIIQNLTSKFNIWYLDDGTLGGNIDSVLSDLSTLKTKFKSIGLDLNYSKCELYIHDTSLNHLDTANKNILTPNIKSVTKDSLSLLGTPIFDDFLPVFINNTVAKFQNCSDRLLEISPHSAFFILKFCLFVPKLTYMLRCSPFWKHKNLLAPIDALVKTQLEHILNLKLTEQSWQQASLPVRYGGLGVRKISCVALPAFLSSAHSSADLVGKILRASPANYEISDLDDARNAWLLACPGQNFPFNPKTQRGWDDVLCKLKYTSLVDDATGADRARLMAAGCREAGHWLNAFPSPNTGTHLDKNILRLAVGLRLGVPVCAPHKCLCGSDVDRLGHHGLSCQRSAGRFSRHAAINDIIRRSLATVNVPAILEPSGIARDDGKRPDGMSLIPWKMGRVLVWDATCVDTLAPSHLHGTTHKVGAAAEAAEALKRRKYRSLDANYNFVAFGVETLGPWGPAAQKLFKELAKRLVDVTGDKRAGSFLAQRISIAIQRGNAASILGTMPQGPILDLGF

SEQ ID NO: 17871 - protein, 940 aa, Atethmia centrago
MHTATQSGDGTLNQNYICLHCDRSFQSKRGLNIHISKKHRLCISQNGPALNLDPVSLPVSDSPNSTPFHLYLSYLKNNVPVIKRVPRGARISVANHLSGLIKKCVESNQIVDWHNLFLFSYTTLHVKKDEATISLTQKIKNNCLTKTSSPFDSPKRGTLSRIKLIKGKIADGDLKGAARLLFTNDVLSPDTPDTLSALHSKHPPAPVIPYFFDSPTADQACLEIEGKDVIDAIISFKTGSAAGLDGISPQHLKDLTSYSVGDAGVQLICSITKLINFMFSGKINADIASLLFGANLIALTKKDGGVRPIAVGSTLKRLASKIAVRHIKSKLQSVFEPIQLGFGTKGGCEAAVHALRTYLSYDDCEIVVKIDVKNAFNSVNRDAMLTEVKNKIPELYQYLLTCYAEPSKLIYRSHELSSEVGCQQGDPLGPAIFSLAINPIIQNLKSKFNVWYLDDGTLGGDVDTVLSDLSDIKTNFENIGLELNFSKCELFIQKTKKLNFLAPNIKIVDRKSLCLLGSPIFEESFPDYITNTISKFQSHANCLLEISPHYALIILKFCLFVPKFTYVLRCSPFWKHPNLLSPIDDLVKTSLETILNIQLNEPSWLQASLPIRFGGLGIRKISSVASPAFLSSTHSTSRLIGNVLRALPTNYETAGLEDAKNAFQIACPGKEFPDNLKSQRSWDDIYCDLTYKSILSRSSGPDRARLLAVGTREAGHWLHAHPSPYTGTFLDPISLRLATGLRLGVTVCTPHTCPCGTDVDRLGHHGLCCQKSAGRFSRHATLNDIIRRSLASINVPALLEPTGIVRDDGKRPDGVSLVPWSLGRMLVWDATCVDTLAPSHLQRTTSKAGAAAENAENLKVIKYGGLGREYNFVPFGVETLGPWGPSAHKLFAEIAKRLVDVTGDRKAGGFLAQRISIAIQRGNAASILGTMPRGHFLSLT

SEQ ID NO: 17872 - protein, 953 aa, Cydia splendana
MPTLSQPAVSTNFQCHLCLKSFQSSRGLNIHFSKTHRNCLSQNAATASNFSTPPLSNDAPSPSRPNLHLYLSYLKNSFPVAKRIPRGARICVATRLSYLIDQCVTVNDMDTWSNLLTFVYNTLHVTSEDKQLSLTQKIKNNCVKPLELPFDKTARVGYKLSAFNLAKTVENKITDGDLKGAARILFSSDVLSPDSTETLSALRSKHPSASTAPFFLDPPTAIEECLQIEDKDIVDAIFNFKTGSAGGLDGISPQHLKDLIAHCVGDAGRKLITSLTNMINLMLSGRVHADIVPILYGANLIALTKKDGGARPIAVGSTFRRLASKISVRHIISKLQHRFEPVQLGCGTKGGCEAAVHALRTYLSNDQCQVVLKIDIKNAFNSVNRDTLLSEIRNNTPELYNYLLHCYADPSKLMYRSHEISSEVGCQQGDPLGPAIFCLAINPIIQNLSSDFNVWYLDDGTLGGKLETVLSDLSVLKSKFESIGLDLNCNKCELYIHDAFLNHSDVTEKFNALTPNVTTVTRDSLSLLGTPIFDNYFSTFISNSVSKFQNYADRLLEISPHSALTILKFCLFVPKLMYVLRCSPFWKHQNLLLPIDIMVQTTLERILNLKLSDQSWSQASLPVRYGGLGLRRISSVSLPAFLSSVHSSADLVGKILRILPTNYEVTGLDDARNAWLSACPGQDPPYNLKSQRSWDDALSKLTYTTCLDNSEGAERARLIAVGCREAGHWLNAYPSPNTGTHLDGNTLRVAVGLRLGVPICAPHKCHCGSDVDQLGRHGLSCQRSAGRLSRHAALNDIIRRSLVTVNVPAILEPTGMARDDGKRPDGMSLIPWRMGRVLVWDATCVDTLAPSHLHGTTKKAGAAADAAESLKRRKYGGLDDNYKFIPFGVETLGPWGSGAQSLFIDLSKRLVEVSGDKRAGSFLAQRISVAIQRGNAASILGTMPQGPSLDIDF

SEQ ID NO: 17873 - protein, 953 aa, Cydia splendana
MPTLSQPAVSTNFQCHLCLKSFQSSRGLNIHFSKTHRNCLSQNAATASIFSTPPLSNDAPSPSRPNLHLYLSYLKNSFPVAKRIPRGARICVATRLSYLIDQCVTVNDMDTWSNLLTFVYNTLHVTSEDKQLSLTQKIKNNCVKPLELPFDKTARVGCKLSAFNLAKTVENKITDGDLKGAARILFSSDVLSPDSTETLSALRSKHPSASTAPFFLDPPTAIEECLQIEDKDIVDAIFNFKTGSAGGLDGISPQHLKDLIAHCVGDAGRKLITSLTNMINLMLSGRVHADIVPILYGANLIALTKKDGGVRPIAVGSTFRRLASKISVRHIISKLQHRFEPVQLGCGTKGGCEAAVHALRTYLSNDQCQVVLKIDIKNAFNSVNRDTLLSEIRNNTPELYNYLLHCYADPSKLMYRSHEISSEVGCQQGDPLGPAIFCLAINPIIQNLSSDFNVWYLDDGTLGGKLETVLSDLSVLKSKFESIGLDLNCNKCELYIHDASLNHSDVTEKFNALTPNVTTVTRDSLSLLGTPIFDNYFSTFISNSVSKFQNYADRLLEISPHSALTILKFCLFVPKLMYVLRCSPFWKHQNLLLPIDIMVQTTLERILNLKLSDQSWLQASLPVRYGGLGLRRISSVSLPAFLSSVHSSADLVGKILRVLPTNYEVTGLDDARNAWLSACPGQDPPYNLKSQRSWDDALSKLTYTTCLDNSEGAERARLIAVGCREAGHWLNAYPSPNTGTHLDGNTLRVAVGLRLGVPICAPHKCHCGSDVDQLGRHGLSCQRSAGRLSRHAALNDIIRRSLVTVNVPAILEPTGMARDDGKRPDGMSLIPWRMGRVLVWDATCVDTLAPSHLHGTTKKAGAAAEAAESLKRRKYGGLDDNYKFIPFGVETLGPWDPGAQSLFTDLSKRLVEVSGDKRAGSFLAQRISVAIQRGNAASILGTMPQGPSLDIDF

SEQ ID NO: 17874 - protein, 953 aa, Cydia splendana
MPTLSQPAVSTNFQCHLCLKSFQSSRGLNIHFSKTHRNCLSQNAATASNFSTPPLSNDAPSPSRPNLHLYLSYLKNSFPVAKRIPRGARICVATRLSYLIDQCVTVNDMDTWSNLLTFVYNTLHVTSEDKQLSLTQKIKNNCVKPLELPFDKTARVGYKLSAFNLAKTVENKITDGDLKGAARILFSSDVLSPDSTETLSALRSKHPSASTAPFFLDPPTAIEECLQIEDKDIVDAIFNFKTGSAGGLDGISPQHLKDLIAHCVGDAGRKLITSLTNMINLMLSGRVHADIVPILYGANLIALTKKDGGVRPIAVGSTFRRLASKISVRHIISKLQHRFEPVQLGCGTKGGCEAAVHALRTYLSNDQCQVVLKIDIKNAFNSVNRDTLLSEIRNNTPELYNYLLHCYADPSKLMYRSHEISSEVGCQQGDPLGPAIFCLAINPIIQNLSSDFNVWYLDDGTLGGKLETVLSDLSVLKSKFESIGLDLNCNKCELYIHDAFLNHSDVTEKFNALTPNVTTVTRDSLSLLGTPIFDNYFSTFISNSVSKFQNYADRLLEISPHSALTILKFCLFVPKLMYVLRCSPFWKHQNLLLPIDIMVQTTLERILNLKLSDQSWSQASLPVRYGGLGLRRISSVSLPAFLSSVHSSADLVGKILRVLPTNYEVTGLDDARNAWLSACPGQDPPYNLKSQRSWDDALSKLTYTTCLDNSEGAERARLIAVGCREAGHWLNAYPSPNTGTHLDGNTLRVAVGLRLGVPICAPHKCHCGSDVDQLGRHGLSCQRSAGRLSRHAALNDIIRRSLVTVNVPAILEPTGMARDDGKRPDGMSLIPWRMGRVLVWDATCVDTLAPSHLHGTTKKAGAAADAAESLKRRKYGGLDDNYKFIPFGVETLGPWGSGAQSLFTDLSKRLVEVSGDKRAGSFLAQRISVAIQRGNAASILGTMPQGPSLDIDF

SEQ ID NO: 17875 - protein, 951 aa, Notocelia uddmanniana
MQFSTQPGDSTSTNYTCSQCTRSFKSVRGLNIHFTKSHRKCLTQNITPNNPNTSAPVVLTTNNQAVPFHIHLSNLKHSIPVVKRVPRGARITVAAHLTKLIESCIDSNSIDDWHNLFLFSYRTLYVNEDDSNTSLTQKIKNNCSNQTFPPSTANIHKNPGLFNRRKHIENKISDGDLKGAARLLFSSESLSPDNPDTLQALQTKHPPAPSTPYFLDPPTASQVCLQINSKETLEAIVSFKTGSAAGLDGISPQHLKDLISHSSGDAGEQLLNSITKLINKMYTGNINPDIVPILFGANLIALNKKDGGVRPIAVGTTLRRLASKLAVRHIISKLKPHFEPIQLGFGTKGGCEAAVHSLRTYLSNATSEVLIKIDIKNAFNSINRYTLLTEAKDNIPEIYNYLLLSYANPTKLLYRESVLSSEVGCQQGDPLGLAIFSLAINPIIKKLNSKFNVWYLDDGTLGGDVDTVFSDLSTIKTEFRNIGLEINFSKCELYIPTSIPNHNNIEQNFNTLTPNIKIVNNESLCLLGSPIFEDSFQNYIQKSISKFKTYSDRLLEISPHYAITILKFCLFVPKLTYVIRCSPIWKFENIILPLDDLIKSTLESILNIQLSDHSWTQATLPIRHGGLGIRKISSVSLPAFLSSVHSSASLIGKILRGLPSNYEIAGLDEAKKAWSGACPSKDFPTHPNCQRSWDDMCQISVNSLLSRSTGRERARLLASASRESGEWLRAYPSPNIGTFLTPDTLRIATCLRLGIRICAPHRCPCGSEVDELGHHGLSCQKSAGRFSRHAALNDIIRRSLASVNVPALLEPTGIARDDGKRPDGVSLVPWGLGRVLVWDATCVDTLAPSHVTGTSNQAGAAAKAAEKLKVQKYRGLGPEYIFMPFGVETLGPWGPNALKFFKELSKRLVDFTGDRRAGSFLAQRISIAIQRGNAASILGTMPKGPNFLDLF

SEQ ID NO: 17876 - protein, 952 aa, Cydia splendana
MQSSTQPGDSTSTNFTCSHCTKSFKSVRGLNIHFTKSHRNCLTQNITPNSTTTSAPVLLTTSNPTVPFHLHLSNLKHSIPVVKRVPRGARITVATHLSNLIDSCVENNSIDDWHNLFLFSYRTLHVNEDDTNTSLTQKIKNNCSNQTFPPSAANTQRSPGLFNRRKYIENKISDGDLKGAARLLFSSESLSPDNPDTLQALQTKHPPAPSTPYFLDPPTASQVCLQINSKETLEAIISFKNGSAPGLDGISPQHLKDLISYSTGDAGEQLLNSITKLINKMYTGNINPDIVPILFGANLIALNKKDGGVRPIAVGTTLRRLASKLAVRHIISKLKPHFEPIQLGFGTKGGCEAAVHSLRTYLSNTTSEVLIKIDVKNAFNSVNRDTLLTETKHNIPEIYNYLLLSYADPTKLLYRQNVLSSEVGCQQGDPLGPAIFSLAINPIIKKLNSKFNVWYLDDGTLGGDVDIVTSDLSTIKTEFSNIGLEINFSKCELYIPNSIPNHKNIEQNFNTLTPNIKTVNNESLCLLGSPIFEESFPNYIQNSISKFKIFSTRLLDLSPHYAITILKFCLFVPKLTYAIRCSPIWKFENIILPLDDLIKSSLESILNIQLSDDSWTQASLPIRHGGLGIRKISSVSLPAFLSSVHSSANLIGKILRGLPSNYETAGLDEAKKAWSSACPNKDFPTHPNCQRSWDDIMCQISVNSLLSRSTGRERARLLASASRESGDWLRAYPSPNTGTFLTPDTLRIATCLRLGVRVCAPHRCPCGSEVDELGHHGLSCQKSAGRFSRHAALNDIIRRSLASVNVPALLEPTGMARDDGKRPDGVSLVPWSLGRVLVWDATCVDTLAPSHLTGTSHQAGAAAKAAEKLKFHKYRGLGPEYIFMPFGVETLGPWGPNALQLFKDLSKRLIDFTGDRRAGSFLAQRISFAIQRGNAASVLGTMPKGPNFLDVF

SEQ ID NO: 17877 - protein, 953 aa, Notocelia uddmanniana
MQSSTQPGGSTSSNHSCSLCNKCFKSVRGLNIHFTKTHKHYLSQNDINSVSSPPIPRPVSPITTGHTTTPFHLRISKLKHSTPVVKRIPRGARITVATHLYKLIDKCTESNNIDDWHNLLLFAYRTLHVNNNSSTSLTQKIKNNCSCQIPVFSEPDKLNNSSFNRRKAIENKISDGDLKGAARLIFSNDTPSPDSAETFLALQTKHPPAPSTPFFLDPPTPSQAILTISNKDTFQGILSFKTGSAAGLDGISPQHLKDLIAVSAGDAGEQLLNSITKLINKLYSGNIHPDIVPILFGANLIALTKKDGGVRPIAVGTTFRRLASKIAVRHIISKLKSKFEPVQLGFGTKGGCEAAVHSLRTFLSYSPSDVLVKIDVKNAFNSINRETLLSETKQNIPEIYNYLLLSYADPTKLLYRENVLSSEVGCQQGDPLGPAIFSLAINPIIQKLKSKFNVWYLDDGTLGGDVDSVISDLVTIKTEFHNIGLDLNYNKCELYIPDLQLNSSEIQQKFSNLLPNITLVNNNSLYLLGSPIFENSFPIYVQNSISKFQNYANRLLEISPHYAMSIIKFCLFVPKLTYVLRCSHFWKFQNILLPLDDLIKSTLESILNIQLSDQSWTQASLPIRHGGLGIRKISNVSLPAFLSSLHSSAFLIGKILRGLPSNFELAGLEEAKNAWSIACPGKDVPDHPNCQRSWDDQLCQITYNSLLSNSTGLERARLLASGAKESGEWLHAYPSPNTGTFLEPDTIRLATSLRLGVRVCTPHRCPCGSEVDELGHHGLSCPKSAGRFSRHAALNDIIRRSLASINVPALLEPTGLARDDGKRPDGMSLVPWKLGKVLVWDATCVDTLAPSHLSGTSIRCGTAAKAAENLKSHKYRDLGPEFIFMPFGVETLGPWGPSAHLLFKEVSMRLIDTTGDRRAGSFLAQRISIAIQRGNAASILGTMPRGPNFLDIF

SEQ ID NO: 17878 - protein, 953 aa, Notocelia uddmanniana
MQSSTQPGGSTSSNHSCSLCNKCFKSVRGLNIHFTKTHKHYLSQNDINSVSSPPIPRPVSPITTGHTTTPFHLRISKLKHSTPVVKRIPRGARITVATHLYKLIDKCTESNNIDDWHNLLLFAYRTLHVNNNSSTSLTQKIKNNCSCQIPVFSEPDKLNNSSFNRRKAIENKISDGDLKGAARLIFSNDTLSPDSAETFLALQTKHPPAPSTPFFLDPPTPSQAILTISNKDTLQGILSFKTGSAAGLDGISPQHLKDLIAVSAGDAGEQLLNSITKLINKLYSGNIHPDIVPILFGANLIALTKKDGGVRPIAVGTTFRLLASKIAVRHIISKLKSKFEPVQLGFGTKGGCEAAVHSLRTFLSYSPSDVLVKIDVKNAFNSINRETLLSETKQNIPEIYNYLLLSYADPTKLLYRENVLSSEVGCQQGDPLGPAIFSLAINPIIQKLKSKFNVWYLDDGTLGGDVDSVISDLVTIKTEFHNIGLDLNYNKCELYIPDLQLNSSEIQQKFSNLLPNITLVNNNSLYLLGSPIFENSFPIYVQNSISKFQNYANRLLEISPHYAMSIIKFCLFVPKLTYVLRCSHFWKFQNILLPLDDLIKSTLESILNIQLSDQSWTQASLPIRHGGLGIRKISNVSLPAFLSSLHSSAFLIGKILRGLPSNFELAGLEEAKNAWSIACPGKDVPDHPNCQRSWDDQLCQITYNSLLSNSTGLERARLLASGAKESGEWLHAYPSPNTGTFLEPDTIRLATSLRLGVRVCTPHRCPCGSEVDELGHHGLSCPKSAGRFSRHAALNDIIRRSLASINVPALLEPTGLARDDGKRPDGMSLVPWKLGKVLVWDATCVDTLAPSHLSGTSIRCGAAAKAAENLKSHKYRDLGPEFIFMPFGVETLGPWGPSAHLLFKEVSKRLIDTTGDRRAGSFLAQRISIAIQRGNAASILGTMPRGPNFLDIF

SEQ ID NO: 17879 - protein, 952 aa, Notocelia uddmanniana
MQFSTQPGDSTSTNYTCSQCTRSFKSVRGLNIHFTKSHRKCLTQNITPNNPNTSAPVVLTTNNQAVPLHIHLSNLKHSIPVVKRVPRGARITVAAHLTKLIESCIDSNSIDDWHNLFLFSYRTLYVNEDDSNTSLTQKIKNNCSNQTFPPSTANIHKNPGLFNRRKHIENKISNGDLKGAARLLFSSESLSPDNPDTLQALQTKHPPAPSTPYFLDPPTASQVCLQINSKETLEAIVSFKTGSAAGLDGISPQHLKDLISHSSGDAGEQLLNSITKLINKMYTGNINPDIVPILFGANLIALNKKDGGVRPIAVGTTLRRLASKLAVRHIISKLKPHFEPIQLGFGTKGGCEAAVHSLRTYLSNATSEVLIKIDIKNAFNSINRYTLLTEAKDNIPEIYNYLLLSYADPTKLLYRENVLSSEVGCQQGDPLGPAIFSLAINPIIKKLTSKFNVWYLDDGTLGGDVDTVFSDLSTIKTEFRNIGLEINFSKCELYIPTSIPNHNNIEQNFNTLTPNIKIVNNESLCLLGSPIFEDSFQNYIQKSISKFKTYSDRLLEISPHYAITILKFCLFVPKLTYVIRCSPIWKFENIILPLDDLIKSTLESILNIQLSDHSWTQATLPIRHGGLGIRKISSVSLPAFLSSVHSSASLIGKILRGLPSNYEIAGLDEAKKAWSGACPSKDFPTHPNCQRSWDDIMCQISVNSLLSRSTGRERARLLASASRESGEWLRAYPSPNIGTFLTPDTLRIATCLRLGVRICAPHRCPCGSEVDELGHHGLSCQKSAGRFSRHAALNDIIRRSLASVNVPALLEPTGIARDDGKRPDGVSLVPWGLGRVLVWDATCVDTLAPSHVTGTSNQAGAAAKAAEKLKVQKYRGLGPEYIFMPFGVETLGPWGPNALKLFKELSKRLVDFTGDRRAGSFLAQRISIAIQRGNAASILGTMPKGPNFLDLF

SEQ ID NO: 17880 - protein, 952 aa, Notocelia uddmanniana
MQFSTQPGDSTSTNYTCSQCTRSFKSVRGLNIHFTKSHRKCLTQNITPNNPNTSAPVVLTTNNQAVPLHIHLSNLKHSIPVVKRVPRGARITVAAHLTKLIESCIDSNSIDDWHNLFLFSYRTLYVNEDDSNTSLTQKIKNNCSNQTFPPSTANIHKNPGLFNRRKHIENKISDGDLKGAARLLFSSESLSPDNPDTLQALQTKHPPAPSTPYFLDPPTASQVCLQINSKETLEAIVSFKTGSAAGLDGISPQHLKDLISHSSGDAGEQLLNSITKLINKMYTGNINPDIVPILFGANLIALNKKDGGVRPIAVGTTLRRLASKLAVRHIISKLKPHFEPIQLGFGTKGGCEAAVHSLRTYLSNATSEVLIKIDIKNAFNSINRYTLLTEAKDNIPEIYNYLLLSYADPTKLLYRENVLSSEVGCQQGDPLGPAIFSLAINPIIKKLTSKFNVWYLDDGTLGGDVDTVFSDLSTIKTEFRNIGLEINFSKCELYIPTSIPNHNNIEQNFNTLTPNIKIVNNESLCLLGSPIFEDSFQNYIQKSISKFKTYSDRLLEISPHYAITILKFCLFVPKLTYVIRCSPIWKFENIILPLDDLIKSTLESILNIQLSDHSWTQATLPIRHGGLGIRKISSVSLPAFLSSVHSSASLIGKILRGLPSNYEIAGLDEAKKAWSGACPSKDFPTHPNCQRSWDDIMCQISVNSLLSRSTGRERARLLASASRESGEWLRAYPSPNIGTFLTPDTLRIATCLRLGVRICAPHRCPCGSEVDELGHHGLSCQKSAGRFSRHAALNDIIRRSLASVNVPALLEPTGIARDDGKRPDGVSLVPWGLGRVLVWDATCVDTLAPSHVTGTSNQAGAAAKAAEKLKVQKYRGLGPEYIFMPFGVETLGPWGPNALKLFKELSKRLVDFTGDRRAGSFLAQRISIAIQRGNAASILGTMPKGPNFLDLF

SEQ ID NO: 17881 - protein, 952 aa, Notocelia uddmanniana
MQFSTQPGDSTSTNYTCSQCTRSFKSVRGLNIHFTKSHRKCLTQNITPNNPNTSAPVVLTTNNQAVPLHIHLSNLKHSIPVVKRVPRGARITVAAHLTKLIESCIDSNSIDDWHNLFLFSYRTLYVNEDDSNTSLTQKIKNNCSNQTFPPSTANIHKNPGLFNRRKHIENKISDGDLKGAARLLFSSESLSPDNPDTLQALQTKHPPAPSTPYFLDPPTASQVCLQINSKETLEAIVSFKTGSAAGLDGISPQHLKDLISHSSGDAGEQLLNSITKLINKMYTGNINPDIVPILFGANLIALNKKDGGVRPIAVGTTLRRLASKLAVRHIISKLKPHFEPIQLGFGTKGGCEAAVHSLRTYLSNATSEVLIKIDIKNAFNSINRYTLLTEAKDNIPEIYNYLLLSYADPTKLLYRENVLSSEVGCQQGDPLGPAIFSLAINPIIKKLTSKFNVWYLDDGTLGGDVDTVFSDLSTIKTEFRNIGLEINFSKCELYIPTSIPNHNNIEQNFNTLTPNIKIVNNESLCLLGSPIFEDSFQNYIQKSISKFKTYSDRLLEISPHYAITILKFCLFVPKLTYVIRCSPIWKFENIILPLDDLIKSTLESILNIQLSDHSWTQATLPIRHGGLGIRKISSVSLPAFLSSVHSSASLIGKILRGLPSNYEIAGLDEAKKAWSGACPSKDFPTHPNCQRSWDDIMCQISVNSLLSRSTGRERARLLASASRESGEWLRAYPSPNIGTFLTPDTLRIATCLRLGVRICAPHRCPCGSEVDELGHHGLSCQKSAGRFSRHAALNDIIRRSLASVNVPALLEPTGIARDDGKRPDSVSLVPWGLGRVLVWDATCVDTLAPSHVTGTSNQAGAAAKAAEKLKVQKYRGLGPEYIFMPFGVETLGPWGPNALKLFKELSKRLVDFTGDRRAGSFLAQRISIAIQRGNAASILGTMPKGPNFLDLF

SEQ ID NO: 17882 - protein, 953 aa, Bembecia ichneumoniformis
MQPSSQPGDSTSSNHTCSLCPRHFKSVRALNIHFTKSHRNCNSQNVAPSACSHNTPPPAPALTNDPVIPFHLHISKLKHSIQLVKRIPRGARITVATHLSNLIERCLEHNNIHDWHNLLLFSFRTLHVDNDNPSISLTQKIKNNCSNQTCPLSAANKRDSVSFNRGKYIEAKIRNGDLKSAARLLFSNEMLSPNSPETLSCLRSKHPSSPSTPYFLDPPTATQVCLTVNNKDTLDAIISFKTGSAAGLDGISPQHLKDLISTSAGDAGEQLLNSITRLVNKMYSGNINADIVPILFGANLIALTKKDGGVRPVAVGTTLRRLASKIAVRHIKTKLQSHFEPIQLGFGTKRGCEAAVHSLRTYLTNTTSEVLIKIDVKNAFNSVNRDTLLTEAKHNIPEIYNYLLLSYADPTKLLYRENILSSEVGCQQGDPLGPAIFSLAINPIIKKLKSKFNVWYLDDGTLGGDIHTVLSDLTIIQTEFKNIGLELNFNKCELYIPNSCPNYDEIQQKFNALTPNIKIVYNHSLYLLGSPVFEDSFSNFIQNTISKFKNYSYRLLEISPHYAISVLKFCLFVPKLTYILRCSPFWKFKNILSPLDDLIRLTLESILNFQLSDKSWSQASLPIRHGGLGIRKISSVSLPAFLSSVHSSASLIGKILRDLPLNYETAGLGEARKAWSVACPSKDFPSHPNCQRSWDDTICEITFNSLLSESTDSEQARLLAAGAKESGDWLRAYPSPNIGTFLEPDTLRLATCLRLGARACAPHRCACGSEVDELGHHGLSCQKSAGRFSRHAALNDIIRRSLATVNVPTLMEPTGIARDDGRRPDGMSLIPWSVGRVLVWDATCVDTLAPSHIHGTSQQAGAAAKAAEKLKTAKYRGLGSGYTFMPFGVETLGPWGPSARQLLKEISKRLTDTTGDRRAGSFLAQRISIAIQRGNAASILGTMPRAPNFLHIF

SEQ ID NO: 17883 - protein, 953 aa, Bembecia ichneumoniformis
MQPSSQPGGSTSSNHTCSLCPRHFKSVRALNIHFTKSHRNCNSQNVAPSACSHNTPPPAPALTNDSVIPFHLHISKLKHSIQLVKRIPRGARITVATHLSNLIERCLEHNNIHDWHNLLLFSFRTLHVDNDNPSIPLTQKIKNNCSNQTCPLSAANKRDSVSFNRGKYIEAKIRDGDLKSAARLLFTSEMLSPDTPETLSCLRSKHPSSPSTPYFLDPPTATQVCLTVNNKDTLDAIISFKTGSAAGLDGISPQHLKDLISTSAGDAGEQLLNSITRLVNKMYSGNINSDIVPILFGANLIALTKKDGGVRPVAVGTTLRRLASKIAVRHIKTKLQSHFEPIQLGFGTKRGCEAAVHSLRTYLTNTTSEVLIKIDVKNAFNSVNRDTLLTEAKHNIPEIYNYLLLSYADPTKLLYRENILSSEVGCQQGDPLGPAIFSLAINPIIKKLKSKFNVWYLDDGTLGGDVHTVLSDLTIIETEFKNIGLELNFNKCELYIPNSCLNYDEIQQKFNALTPNIKIVYNHSLYLLGSPVFEESFSNFIQNTISKFKNYSYRLLEISPHYAISVLKFCLFVPKLTYILRCSPFWKFKNILSPLDDLIRLTLESILNFQLSDKSWTQASLPIRHGGLGIRKISSVSLPAFLSSVHSSASLTGKILRDLPLNYETAGLGEARKAWSVACPSKDFPSHPNCQRSWDDTICEITFNSLLSESTDSEQARLLAAGAKESGDWLRAYPSPNIGTFLEPDTLRLATCLRLGARACAPHRCACGSEVDELGHHGLSCQKSAGRFSRHAALNDIIRRSLATVNVPTLMEPTGIARDDGKRPDGMSLIPWSVGGVLVWDATCVDTLAPSHIHGTSQQAGAAAKAAEKLKTAKYRGLGSGYTFMPFGVETLGPWGPSARQLLKEISKRLTDTTGDRRAGSFLAQRISIAIQRGNAASILGTMPRAPNFLHIF

SEQ ID NO: 17884 - protein, 953 aa, Bembecia ichneumoniformis
MQLSSQPGGSTSSNHTCSLCPRHFKSVRALNIHFTKSHRNCNSQNVAPSACSHNTPPPAPALTNDSVIPFHLHISKLKHSIQLVKRIPRGARITVATHLSNLIERCLEHNNIHDWHNLLLFSFRTLHVDNDNPSISLTQKIKNNCSNQTCPLSAANKRDSVSFNRGKYIEAKIRDGDLKSAARLLFTSEMLSPDTPETLSCLRSKHPSSPSTPYFLDPPTATQVCLTVNNKDTLDAIISFKTGSAAGLDGISPQHLKDLISTSAGDAGEQLLNSITRLVNKMYSGNINSDIVPILFGANLIALTKKDGGVRPVAVGTTLRRLASKIAVRHIKTKLQSHFEPIQLGFGTKRGCEAAVHSLRTYLTNTTSEVLIKIDVKNAFNSVNRDTLLTEAKHNIPEIYNYLLLSYADPTKLLYRENILSSEVGCQQGDPLGPAIFSLAINPIIKKLKSKFNVWYLDDGTLGGDVHTVLSDLTIIETEFKNIGLELNFNKCELYIPNSCLNYDEIQQKFNALTPNIKIVYNHSLYLLGSPVFEESFSNFIQNTISKFKNYSYRLLEISPHYAISVLKFCLFVPKLTYILRCSPFWKFKNILSPLDDLIRLTLESILNFQLSDKSWTQASLPIRHGGLGIRKISSVSLPAFLSSVHSSASLTGKILRDLPLNYETAGLGEARKAWSVACPSKDFPSHPNCQRSWDDTICEITFNSLLSESTDSEQARLLASGAKESGDWLRAYPSPNIGTFLEPDTLRLATCLRLGARACAPHRCACGSEVDELGHHGLSCQKSAGRFSRHAALNDIIRRSLATVNVPTLMEPTGIARDDGKRPDGMSLIPWSVGRVLVWDATCVDTLAPSHIHGTSQQAGAAAKAAEKLKTAKYRGLGSGYTFMPFGVETLGPWGPSARQLLKEISKRLTDTTGDRRAGSFLAQRISIAIQRGNAASILGTMPRAPNFLHIF

SEQ ID NO: 17885 - protein, 937 aa, Pammene fasciana
MEGICDKCFESVRGLNIHFTKKHRNCQSQNNLTTVSPLIPPPVPLLPSHQDIPFHNYICNLKHSTQLLKRVPRGARITVATHLAKLIDKCIENNSVNDWHNLFLFSYRTLHADDDDSTTSLTQKIKNNCSSQASLPSTANKPNNELFNRRKYIESKIGDGDLKGAARLLFSSELLSPDTPETLQALQTKHPPAPLTPYFLDPPTATQVCLQISSKEALDAIVSFKTGSAAGLDGISPQHLKDLISHSAGNAGEQLLNSITKLVNNMFMGNINPDIVPILFDANLIALTKKDGGVRPIAVGTTLRRLASKIAVRHIASKLKSQFEPIQLGFGTKGGCEAAVHSLRTYLSNTTSEVLLKIDVKNAFNSVNRDTLLSETKQNVPEIYNYLLLSYADPTKLLYRENVLSSEVGCQQGDPLGPAIFSLAINPIIKKLNSKFNVWYLDDGTLGGDVDTVISDLTTIKADFKNIGLELNFSKCELYIPNTILNHNEIERQFNILTPNIKLVNDDSLCLLGAPIFEDSFQNYIQNSISKFKIHTNSLLEISPHYAISILKFCLFVPKLTYVLRCSPIWKFQNILLPLDDLIKSTLQSILNIQLSDQSWIQASLPIRHGGLGIRKISSVSLPAFLSSVHSSASLIGKILRGFPSNYEIAGMEEAKKAWSCACPSKDFPTKPNCQRSWDDTMCQISINSLLSRSTGRERARLLASVTRESGEWLRAYPSPNTGTFLEPDTLRIATCLRLGVHVCAAHRCPCGSFVDELGHHGLSCQKSAGRFSRHAALNDIIRRSLATANVPALLEPTGIARDDGRRPDGMSLVPWRLGRVLVWDATCVDTLAPSHLTGTSNEAGAAAKAAERNKHLKYRGLGPEYCFMPFGVETLGPWGPSALKIFKELAKRVIDTTGDRRAGSFLAQRISIAIQRGNAASILGTMPKGPNFFDIF

SEQ ID NO: 17886 - protein, 933 aa, Notocelia uddmanniana
MQSSTQPGDSTSTNYTCSQCTRSFKSVRGLNIHFTKSHRKCLTQNISPNNPNTSAPVVLTTNNQAVPFHIHLSNLKHSIPVVKRVPRGARITVAAHLTKLIESCIDSNSIDDWHNLFLFSYRTLYVNEDDSNTSLAQKIKNNCSNQTFPPSTANIHKNPGLFNRRKHIENKISDGDLKGAARLLFSSESLSPDNPDTLQALQTKHPPAPSTPYFLDPPTASQVCLQINSKETLEAIVSFKTGSAAGLDGISPQHLKDLISHSSGDAGEQLLNSITKLINKMYTGNINPDIVPILFGANLIALNKKDGGVRPIAVGTTLRRLASKLAVRHIISKLKPHFEPIQLGFGTKGGCEAAVHSLRTYLSNATSEVLIKIDIKNAFNSINRYTLLTEAKDNIPEIYNYLLLSYADPTKLLYRENVLSSEVGCQQGDPLGPAIFSLAINPIIKKLNSKFNVWYLDDGTLGGNVDTVFSDLSTIKTEFRNIGLEINFSKCELYIPTSIPNHNNIEQNFNTLTPNIKIVNNESLCLLGSPIFEDSFQNYIQKSISNFKTYSDRLLEISPHYAITILKFCLFVPKLTYVIRCSPIWKFENIILPLDDLIKSTLESILNIQLSDHSWTQATLPIRHGGLGIRKISSVSLPAFLSSVHSSASLIGKILRGLPSNYETAGLDEAKKAWSGACPSKDFPTHPNCQRSWDDIMCQISVNSLLSRSTGRERARLLASASRESGEWLRAYPSPNIGTFLTPDTLHIATCLRLGVRICAPHRCPCGSEVDELGHHGLSCQKSAGRFSRHAALNEIIRRLLASVNVPALLEPTGIARDDGKRPDGVSLVPWGLGRVLVWDATCVDTLAPSHVTGTSNQAGAAAKAAEKLKVQKYRGLGPEYIFMPFGGPNALFTGDRRAGSFLAQRISIAIQRGNAASILGTMPKGPNFLDLF

SEQ ID NO: 17887 - protein, 953 aa, Notocelia uddmanniana
MQSSTQPGGSTSSNHSCSLCNKCFKSVRGLNIHFTKTHKHYLSQNDINSVSSPPIPRPVSPITTGHTTTPFHLRISKLKHSTPVVKRIPRGARITVATHLYKLIDKCTESNNIDDWHNLLLFAYRTLYVNNNSSTSLTQKIKNNSSCQIPVLSEPDKLNNSSFNRRKAIENKISDGDLKGAARLIFSNDTLSPDSAETFLALQTKHPPAPSTPFFLDPPTPSQAILTISNKDTLQGILSFKTGSAAGLDGISPQHLKDLIAVSAGDAGEQLLNSITKLINKLYSGNIHPDIVPILFGANLIALTKKDGGVRPIAVGTTFRRLASKIAVRHIISKLKSKFEPVQLGFGTKGGCEAAVHSLRTFLSYSPSDVLVKIDVKNAFNSINRETLLSETKQNIPEIYNYLLLSYADPTKLLYRENVLSSEVGCQQGDPLGPAIFSLAINPIIQKFKSKFNVWYLDDGTLGGDVDSVISDLVTIKTEFHNIGLELNYNKCELYIPDLQLNSSEIQQKFSNLLPNITLVNNNSLYLLGSPIFENSFPIYVQNSISKFQNYANRLLEISPHYAMSIIKFCLFVPKLTYVLRCSHFWKFQNILLPLDVLIKTTLESILNIQLSDQSWTQASLPIRHGGLGIRKISNVSLPAFLSSLHSSAFLIGKILRGLPSNFELAGLEEAKNAWSIACPGKDVPDHPNCQRSWDDQLCQITYNSLLSNSTGLERARLLASGAKESGEWLHAYPSPNTGTFLEPDTIRLATSLRLGVRVCTPHRCPCGSEVDELGHHGLSCPKSAGRFSRHAALNDIIRRSLASINVPALLEPTGLARDDGKRPDGMSLVPWKLGKVLVWDATCVDTLAPSHLSGTSIRCGAAAKAAENLKSHKYRDLGPEYIFMPFGVETLGPCGPSAHLLFKEVSKRLIDTTGDRRAGSFLAQRISIAIQRGNAASILGTMPRGPNFLDIF

SEQ ID NO: 17888 - protein, 672 aa, Pammene fasciana
MFSGNINSDIVPILFGANLIALTKKDGGVRPVAVGTTLRRLASKLAVRHIKTKLQTQFEPIQLGFGTKGGCEAAVHSLRTFLANTTSEVVIKIDVKNAFNSINRDTLLTETKRIIPEIYNYLLLSYADPTKLLYRENVLSSEVGCQQGDPLGPAIFSLAINPIIKKLKSKFNVWYLDDGTLGGNVDTVLSDLAIIKTDFKDIGLELNFNKCELYIPDSCLNHDEIQRQFNILMPNVKIVNNNSLYLLGSPVHEDSFSDYIQNSISKFKNYSDRLLEISPHYAISVIKFCLFVPKLTYVLRCSPFWKFTNILSPLDDLLRSTLESILNIQLSDQSWTQASLPIRHGGLGIRKISSVSLPAFLSSIHSSASLIGKILRDLPSNYETAGLEEARKAWSIACPNKDFPSHPNCQRSWDDTICEISFNTLLSQSTGSERARLLASGARESGDWLRAYPSPNIGTFLESDTLRLATCLRLGVPICAPHRCPCGSEVDELGHHGLSCQKSAGRFSRHAALNDIIRRSLATVNVPTLMEPTGIARDDGKRPDGMSLIPWSVGRVLVWDATCVDTLAPSHLMGTSKQVGAAAKAAEKQKSSKYRGLGSGYFFLPFGVETLGPWGPSARQLFMEMSKRLIQITGDRRAGSFLAQRISIAIQRGNAASVLGTMPRGPNFFDIF

SEQ ID NO: 17889 - protein, 946 aa, Notocelia uddmanniana
MECCVCQKIFSSARGLRIHQGRIHQVRINYVPSTPHIPAPSSNTPLPPTPDTPLQTLLGQLKQSTPIIKRIPRGARSTVSEALADAINNCVRNNNTNSWHDLLTFSFKILHVSEVSNNNISLTQKLKNNILNPCSPICASSSGTHRKKYDLFGKVEEKIHDGDLKGATRLLFSNDTLAPDTPETKAALQSKHPPGPSTPIFFDPPSDPSACLHATVRDILTALASFPKGSASGLDGISPQHLIDLTSYGSGVAGEQLATSLTKLVNLMLLGDVCPDVTPVIYGANLIALAKKDGGVRPIAVGSTFRRLAAKICVQLTRTKLQALLEPAQVGFGTRGGCEAAVHAVRTFIKSDSCEVLLKLDVKNAFNSVNRDTLLNEVKIHVPEIYNFLLQCYHCPSKLVHKTNEILSAAGCQQGDPLGPAIFSLAINPIINHLNSKLNIWYLDDGTLAGDAQTVLADLMHVKQHFNRIGLELNCDKSELYISDKLNPLTASEIAQNFNNIAFNIKIVSKDSLHLLGSPIFEEAIPLLLNNSTTKFSKYSDRLVKISSHSALFILKFCLFVPKFTYLLRCCPIWKFPHLITPIDNLMKSQIENILNIHFSEQAWTQAALPIRNGGLGTRKISSVALPAFLSSIHSTLDLAGRILKAPPGIDCEIACLNEATNAWLAGPSPNLPSKPHRQRAWDTIASVTTLQNLIERSTGRDRARLLAVSKPESGYWLHAYPSPNTGTFIDPDTLRIAVGLRLGAGICTGHTCVSCGAPVDRLGHHGLSCSSGAGRLSRHAALNDIIRRALVSAYVPAALEPQIVRSDGKRPDGMSLIPWKTGRALVWDATCTDTLAASYLPATTKRAGAAADARERLKVSKYSCLGAQYHFFAFGVETLGPWGKGALELHREISRRLRETTGDPRAGGFLAQRIAIAVQRGNAACVMGTLPRGPGLIFNNSTNLF

SEQ ID NO: 17890 - protein, 941 aa, Bembecia ichneumoniformis
MECCVCKKTFASSKGLHIHQGRIHQVRITSVPSSQNSSSPSSSPLSSSTSAIPLQTLLGQLKQSTSVVKRIPRGARATVSEALTNAINVCIRNNDDNSWRDLLTFSFQILHVSEQSHSNISLTQKIKNNILNPSLPHPNPSTGVNRKKYDLFGKIEEKIHDGDLKGAIRLLFSNDTLAPDTPETTAALLSKHPPGPSTPFFVDPPSDPSSCLHATERDVLTALASFPKGSASGLDGISPQHLIDLTNYGTGVAGERLTTSLTKLVNLMLLGDVCPDVAPIIYGANLIALTKKDGGVRPIAVGLTFRRLAAKICVRLTRKKLQALFEPTQVGFGTRGGCEAAVHAVRTFVKSDSCEVLLKLDIKNAFNSVNRDTLLNEIRMHVPEIYNFLLQCYHCPSKLLHKSNEILSAVGCQQGDPLGPAIFSLAINSIIHNLNSKLNVWYLDDGTLGGDAQTVLADLVHVKQQFHNIGLELNFDKCELYISDKVDSLTVSQIRQNFNNVALHIKIISKDSLYLLGCPIMEEAIPLLLTKSTSKFSSFSDRLVKISSHSALFILKFCLFVPKFTYLLRCCPIWKFPHLIQPIDSLMKSQIENILNIHISEQAWTQAALPIRNGGLGTRNISSIALPAFLSSIHSTLDLAGKILKAPAGINCVIACLDEATNVWLAGPSPNLPPKPQRQRAWDSIASEATLQSLIESSTGRDRARLLAVSKPESGHWLHAYPSPNTGTFIDPDTLRISVGLRLGAGICTGHNCASCGAPVDRLGHHGLSCSSGAGRLSRHAALNDILRRALVSANVPAALEPQIIRGDGKRPDGMSLIPWRMGRALVWDATCTDTLAASHLPATTKRAGAAADARELFKVSKYSCLGAQYQFIPFGVETLGPWGKGALGLHRDLCKCLREATGDPRAGGFLAQRIAIAIQRGNAACVMETLPRGPRLDFNL

SEQ ID NO: 17891 - protein, 941 aa, Cydia splendana
MECCVCNKIFSSPRGLHIHQSRIHQVRILPISTSTSSSINLSTPTPSSNATAPLQTLLGQLKQTMPLIKRVPRGARSAVAEALTETINKCVRHNNAEEWYNLLTFSYKVLHVSELQNINISLTQQIRNNTQTPNMPTPNIRPGCNTNKYNLFEKVEEKIHDGDLKGATRLLFSNDTMAPDTPETAAALQSKHPPGPSTPIFVDPPSDPSACLQATDKDILAALLSFPKGSASGLDGISPQHLIDLTNYGSGVTGEHLVSSITKLINLMLMGDVCQEVTSVIYGANLIALSKKDGGVRPIAVGSTLRRLAAKVCVRLTRKKLKNLFEPIQVGFGTRGGCEAAVHAVRTFVQSDACEVLLKLDVQNAFNSVNRDTLLNEIKMTVPEIYNFLLQCYHCPSKLMHKNNEILSAVGCQQGDPLGPAIFSLTINSIIHSLNSKLNVWYLDDGTLGGDSQTVLADLIQIKNKFKDIGLELNFNKCELYISDNVDSSSASQIIQSFNNIAPSIKNISKDSLHLLGAPIFNEAIPPLLSKSISKFSDYSDRLLKISSHSALFILKFCLLIPKFTYLLRCCPIWKYPHLLRPLDLLLKSQIESILNIRFSEQAWTQATLPIRYGGLGTRKISSVALPAFLASIHSTSDLAGNILKASPATNCEIACLVEASNAWLAGPSQNFPSRPKIQRAWDNIASVSTLNSLLDTAIGRDRARLLASSRPESGQWLHAYPSPNTGTFIDPGTLRIAAGLRLGVAVCADHNCASCGSEVDSLGHHGLACSSGAGRLSRHSALNDILRRALVSAGVPAALEPQIVRNDGKRPDGMSLIPWKMGRALVWDATCADTVAASYVPSTSRRAGAAADTRERQKVAKYSCLGAQYEFVAFGVETLGSWGRGAQMLHKALGKRLREATGDPRAGSFLAQRIAIAIQRGNAACVLGTLPRAPNFDRYF

SEQ ID NO: 17892 - protein, 941 aa, Pammene fasciana
MDCCVCNKSFQTTKGLHIHQSRIHHVRVCPGSSIPISQNNNGSSTSFHPTVPLQTLLGQLKHSKPLIKRIPRGARSTVAEALTTAIENCVRKNDLDAWQNLLTFSYKILHVTEDGNENISLTKKIKNNILVPSLTPTTRSSGPQSNNKYNIFRKVEEKLHDGDLKGASRLLFSSDTLAPHTPETAAALQAKHPTGPSTPALVDPPSDPSACLHVTAGDVMVALASFPKGSASGLDGISPQHLLDLTSHSTGVAGEHLSASLTKLVNHMLQGDVCRDVTPVLYGANLIALTKKDAGVRPIAVGSTFRRLAAKVCVRNTRSKLQKLFEPIQVGFGTRGGCEAAVHAVRTFVQADECEVLLKMDVKNAFNSVNRDTLLNEIKIHIPETYNFLLQCYHTPSKLIHKNNEILSAVGCQQGDPLGPAIFSLAINSIIHKLNSKFNIWYLDDGTIGGDWQTVLADLVKIKNEFRDIGLELNFTKCELYISDKIDQVAVSKIIQNFNNVATNIKILSKENLYLLGSPIFDEAIPPLLNNSISTFNHYSDRLVKINSHCALFILKFCLLIPKFTYLLRCCPIWKFPNLILPIDLILKSQIEAILNVHFNEQAWTQACLPVRFGGLGTRNISSVALPAFLSSIHSTSDLTGNILKASSAINCEIACLEGATNAWLAVPGRSVPSKPKYQRAWDTIASAATLKSLVGSSSGKSLARLLAVSKPEAGQWLLAYPSPNTGTFIDPSTLRIAVGLRLGVEICADHSCVSCGAQVDRLGHHGLSCSSGAGRFSRHASLNDILRRALVSANVPAALEPQIVRDDGKRPDGMSLIPWKMGRALVWDATCADTLAASYISATSRHAGAAADARERCKINKYSCLGANYEFVAFGVETLGPWGRGARGLMKELGKRLREATGDPRAGSFLAQRLAIAIQRGNAACVMGTLPKGQGLEGQF

SEQ ID NO: 17893 - protein, 941 aa, Pammene fasciana
MDCCVCNKSFQTTKGLHIHQSRIHHVRVCPGSSIPISQNNNGSSTSFHPTVPLQTLLGQLKHSKPLIKRIPRGARSTVAEALTAAIENCVRKNDLDAWQNLLTFSYKILHVTEDGNENISLTKKIKNNILVPSLTPTTRSSGPQSNNKYNIFRKVEEKLHDGDLKGASRLLFSSDTLAPHTPETAAALQAKHPTGPSTPALVDPPSDPSACLHVTAGDVMVALASFPKGSASGLDGISPQHLLDLTSHSTGVAGEHLSASLTKLVNHMLQGDVCRDVTPVLYGANLIALTKKDAGVRPIAVGSTFRRLAAKVCVRNTRSKLQKLFEPIQVGFGTRGGCEAAVHAVRTFVQADECEVLLKMDVKNAFNSVNRDTLLNEIKIHIPETYNFLLQCYHTPSKLIHKNNEILSAVGCQQGDPLGPAIFSLAINSIIHKLNSKFNIWYLDDGTIGGDCQTVLADLVKIKNEFRDIGLELNFTKCELYISDKIDQVTVSQIIQNFNNVATNIKILSKENLYLLGSPIFDEAIPPLLNNSISTFNHYSDRLVKINSHCALFILKFCLLIPKFTYLLRCCPIWKFPNLILPIDLILKSQIEAILNVHFNEQAWTQACLPVRFGGLGTRNISSVALPAFLSSIHSTSDLTGNILKASSAINCEIACLEGATNAWLAVPGRSVPSKPKYQRAWDTIASAATLKSLVGSSSGKSLARLLAVSKPEAGQWLLAYPSPNTGTFIDPSTLRIAVGLRLGVEICADHSCVSCGAQVDRLGHHGLSCSSGAGRFSRHASLNDILRRALVSANVPAALEPQIVRDDGKRPDGMSLIPWKMGRALVWDATCADTLAASYISATGRHAGAAADARERCKINKYSCLGANYEFVAFGVETLGPWGRGARGLMKELGKRLREATGDPRAGSFLAQRLAIAIQRGNAACVMGTLPKGQGLEGQF

SEQ ID NO: 17894 - protein, 940 aa, Notocelia uddmanniana
MECCVCQKIFSSARGLRIHQGRIHQVRINYVPSTPHIPAPSSNTPLPPTPDTPLQTLLGQLKQSTPIIKRIPRGARSTVSEALADAINNCVRNNNTNSWHDLLTFSFKILHVSEVSNNNISLTQKLKNNILNPSSPICASSSETHRKKYDLFGKVEEKIHDGDLKGATRLLFSNDTLAPDTPETKAALQSKHPPGPSTPIFFDPPSDPSACLHATVRDILTALASFPKGSASGLDGISPQHLIDLTSYGSGVAGEQLATSLTKLVNLMLLGDVCPDVTPVIYGANLIALAKKDGGVRPIAVGSTFRRLAAKICVQLTRTKLQALLEPAQVGFGTRGGCEAAVHAVRTFIKSDSCEVLLKLDVKNAFNSVNRDTLLNEVKIHVPEIYNFLLQCYHCPSKLVHKTNEILSAAGCQQGDPLGPAIFSLAINPIINHLNSKLNIWYLDDGTLAGDAQTVLADLMHVKQHFNRIGLELNCDKSELYISDKLNPLTASEIAQNFNNIAFNIKIVSKDSLHLLGSPIFEEAIPLLLNNSTTKFSKYSDRLVKISSHSALFILKFCLFVPKFTYLLRCCPIWKFPHLITPIDNLMKSQIENILNIHFSEQAWTQAALPIRNGGLGTRKISSVALPAFLSSIHSTLDLAGRILKAPPGIDCEIACLNEATNAWLAGPSANLPSKPHRQRAWDTIASVTTLQNLIERSTGRDRARLLAVSKPESGYWLHAYPSPNTGTFIDPDTLRIAVGLRLGAGICTGHTCVSCGAPVDRLGHHGLSCSSGAGRLSRHAALNDIVRRALVSANVPAALEPQIVRSDGKRPDGMSLIPWKTGRALVWDATCTDTVAASYLPATTKRAGAAADARERLKVSKYSCLGAQYHFFAFGVETLGPWGKGALELHREISRRLRETTGDPRAGGFLAQRIAIAVQRGNAACVMGTLPRGPGLIFN

SEQ ID NO: 17895 - protein, 943 aa, Pammene fasciana
MECCVCQRVFPTQRGLHIHQARIHQVRIALSSPTLPNVPNSSSFPSLLSSTSTTPLQTLLGQLKQSTSIIKRIPRGARSTVSEALTNVINDCVRNNNINSWHVLLTFSYNILHVSKDTHTNISLTQKIKNNILHPTITNPTFFSGAHSKKYDLFGKVEEKVHDGDLKGATRLLFSNDTLAPDTPETAAALHSKHPPGPSTPIFVDPPSDPSACLHATERDVLTALASFPKGSASGLDGISPQHLVDLTSYGSGVAGEHLTTSLTKLVNLMLLGDVCPDVTPIIYGANLIALAKKDGGVRPIAVGSTFRRLAAKICVRLTRTKLQALFEPVQVGFGTRGGCESAVHAVRTFVKGDSCEVLLKLDVKNAFNSVNRDTLLNEIKTHVPEIYNFLLQCYHCPSKLVHKSNEILSAVGCQQGDPLGPAIFSLAINSIIHNLNSKLNVWYLDDGTLGGDAQTVLADLIQIKQKFHNIGLELNFDKCELYIADQINTHSASLIIQNFNNVAQNIKIVPKDSLYLLGSPIFDEAIPLLLSKSATKFRNYSDRLVKISSHSALFILKFCIFVPKFTYLLRCCPIWKFPHVIQPIDNLMKSQIESILNIHLSEQAWTQAALPIRYGGLGTRKISSIALPAFLSSIHSTSELAGKILKAPTGINCQIACLEEATNAWVAGPSPNFPSKPKRQRAWDSLTSAATLKLLTDTSSGRDMARLLAVSKPESGHWLHAYPSPNTGTFIDPETLRIAVGLRLGAGICTSHICASCGAPVDQLGHHGLSCSSGAGRISRHAALNDILRRALVSANVPAALEPQIVRGDGKRPDGMSLIPWKMGRALVWDATCTDTLAASYLPATCKRAGAAADARERLKVTKYSCLGAQYEFSPFAVETLGPWGKGALGLHKELSKRLREATGDPRAGSFLAQRIAIAIQRGNAACVMGTLPKGPGLVVSF

SEQ ID NO: 17896 - protein, 936 aa, Hedya salicella
MQCCEICNKTFQSTKGLHIHQTRIHQVRTFIAVPNSNPQIPSTSSTPHQIPLHSLLGQLKPSTPLIKRIPRGARPTVAEALTNAITSCIRNNNEASWRDLLTFSFKILHVNKNSENISLTQKVKNNVLIPTLTTPLSPSKSRSYNLFDKVEEKIYNGDLKGATRLLFSDDTIAPDTPETATALQSKHPPGPSTPLFVDPPSDSTACLQATERDVIAALSSFAKGSASGLDGISPQHLIDLTSHGSGIAGEHLIASLTKLVNLMIVGDVCQDVTPVLYGANLIALRKKDGGIRPIAVGSTFRRLAAKVCVRLTRDKLQSIFEPVQVGFGTRGGCEAAVHAVRTYVQDDQCEVLLKIDIKNAFNSVNRDTLLNEIKVHIPEIYNFLLQCYHCPSKLIYQNNEILSAVGCQQGDPLGPAIFSLAINSIIHNLNSKLNIWYLDDGTISGGWQTVLKDLGDLKDKFKSIGLELNFNKCELYISENVNTSLAFQIHQNFNTLAPNIKILSKENLFLLGSPIFDEAIPPLLSNSFSKFSNHSERLIKISSHSALFILKFCLLIPKFTYLLRCCPIWKFPNLIRPIDLSLKFQIESIINISLSEQAWTQASLPIRYGGLGTRQISSIALPVFLSSIYSTSDLAGKILKVNTTANCEIACLAEAKNAWLAGPNPILPDSPKNQRAWDTIVSDATLNTLIHSSSGKDQARLLAVSRTESGHWLHAYPCPNTGTYIDPNTLRIAAGLRLGADVCEEHACASCGASVNRLGHHGLVCSSGVGRHSRHASVNDILRRALVSANVPAVLEPQIARDDGKRPDGMSLIPWRMGRALVWDATCADTLAASYLSATSRRAGAAADARERIKIRKYSCLGAQYDFIPFGVETLGPWGQGARGLHKELSKRLREATGDPRAGSFLAQRLSIAIQRGNAACVMGTLPKGPNFLSNF

SEQ ID NO: 17897 - protein, 938 aa, Adoxophyes honmai
MQCCVCSKFFSSSRGLHIHQARVHRVRVLPSASSPQPSLNTSSPSVTSAPLYVLLGRLKRSTPVIKRIPRGVRSAVAQALSDKINNCVRSNNEIEWSKLLTFSYKILHVSKLNSYDISLTQKIKNNLESPVTLDFDSPPKSTKLKYDLFKKVEEKIEDGDLKGASRLLFSNDTLAPDTPETAAALQSKHPPGPSSPLFVDPPSDPSACIRATEQDVKTAIASFPKGSASGLDGISPQHLVDLTSHGTGVAGEHLLKSLTKLINLMLLGDVCQEVTPLLYGANLIAITKKDGGVRPIAVGSTFRRLAAKICVRHTRSKLQNLFEPIQVGFGTRGGCEAAVHAARTFVQGDLCEVLLKLDVKNAFNSVNRDTLLNEIKIHVPEIYNYMLQCYHTPSKLLHKENAIVSAVGCQQGDPLGPAIFSLAINPIINSLNSKFNVWYLDDGTLGGDAQTVLADLLQIKNKFRDIGLDLNFDKCEIYISDKIDQTSSSKIIENFNNIAPNIKNMHKDSLHLLGSPIFDEAIPPFLNKSVSKFKNFSNRLTKISSHSALFILKFCLVVPKLTYLLRCSPIWKFPLLVNPIDLLVKSQLESILNIRFTEQAWTQASLPIRYGGLGTRKICSISLPAFLASIHSTSDLAGRILKASSATDCEIACLAEAKNAWLAGPSPNLPSNPKFQRAWDTIISEATLNLLINTAVGRDRARLLAVSRPESGHWLHAYPSPHTGTFIDPCTLRIAVGLRLGVEVCVEHNCSSCGAHVDRLGLHGLTCSSGAGRLSRHAALNDIIRRALVSANVPAMLEPQIVRGDGKRPDGMSLIPWRMGRAVVWDATCADTLASSYLAATCRKAGAAADARERLKVSKYECLGTQYEFVAFGVETLGPWGKSAREFHKALGKRLREATGDPRAGSFLAQRLAIAIQRGNAACVMGTLPKGPILEIFV

SEQ ID NO: 17898 - protein, 941 aa, Cydia splendana
MECCVCNKIFSSPRGLHIHQSRIHQVRILPISTSTSSSINLSTPTPSSNATAPLQTLLGQLKQTTPLIKRVPRGARSAVAEALTETINKCVRHNNAEEWYNLLTFSYKVLHVSELQNINISLTQQIRNNTQTTNMPTPNIRPGCNTNKYNLFEKVEEKIHDGDLKGATRLLFSNDTMAPDTPETAAALQSKHPPGPSTPIFVDPPSDPSACLQATDKDILAALLSFPKGSASGLDGISPQHLIDLTNYGSGVTGEHLVSSITKLINLMLMGDVCQEVTSVIYGANLIALSKKDGGVRPIAVGSTLRRLAAKVCVRLTRKKLQNLFEPIQVGFGTRGGCEAAVHAVRTFVQSDACEVLLKLDVQNAFNSVNRDTLLNEIKMTVPEIYNFLLQCYHCPSKLMHKNNEILSAVGCQQGDPLGPAIFSLTINSIIHSLNSKLNVWYLDDGTLGGDSQTVLADLIQIKNKFKDIGLELNFNKCELYISDNVDSSSASQIIQSFNNIAPSIKNISKDSLHLLGAPIFNEAIPPLLSKSISKFSDYSDRLLKISSHSALFILKFCLLIPKFTYLLRCCPIWKYPHLLRPLDLLLKSQIESILNIRFSEQAWTQATLPIRYGGLGTRKISSVALPAFLASIHSTSDLAGNILKASPATNCEIACLVEASNAWLAGPSQNFPSRPKIQRAWDNIASVSTLNSLLDTATGRDRARLLASSRPESGQWLHAYPSPNTGTFIDPGTLRIAAGLRLGVAVCADHNCASCGSEVDSLGHHGLACSSGAGRLSRHSALNDILRRALVSAGVPAALEPQIVRNDGKRPDGMSLIPWKMGRALVWDATCADTVAASYVPSTSRRAGAAADTRERQKVAKYSCLGAQYEFVAFGVETLGSWGRGAQMLHKALGKRLREATGDPRAGSFLAQRIAIAIQRGNAACVLGTLPRAPNFDRYF

SEQ ID NO: 17899 - protein, 807 aa, Cydia splendana
MPTPNIRPGCNTNKYNLFEKVEEKIHDGDLKGATRLLFSNDTMAPDTPETAAALQSKHPPGPSTPIFVDPPSDPSACLQATDKDILAALLSFPKGSASGLDGISPQHLIDLTNYGSGVTGEHLVSSITKLINLMLMGDVCQEVTSVIYGANLIALSKKDGGVRPIAVGSTLRRLAAKVCVRLTRKKLQNVFEPIQVGFGTRGGCEAAVHAVRTFVHSDACEVLLKLDVQNAFNSVNRDTLLNEIKMTVPEIYNFLLQCYHCPSKLMHKNNEILSAVGCQQGDPLGPAIFSLTINSIIHSLNSKLNVWYLDDGTLGGDSQTVLADLIQIKNKFKDIGLELNFNKCELYISDNVDSSSASQIIQSFNNIAPSIKNISKDSLHLLGAPIFNEAIPPLLSKSISKFSDYSDRLLKISSHSALFILKFCLLIPKFTYLLRCCPIWKYPHLLRPLDLLLKSQIESILNIRFSEQAWTQATLPIRYGGLGTRKISSVALPAFLASIHSTSDLAGNILKASPATNCEIACLVEASNAWLAGPSQNFPSRPKIQRAWDNIASVSTLNSLLDTATGRDRARLLASSRPESGQWLHAYPSPNTGTFIDPGTLRIAAGLRLGVAVCADHNCASCGSEVDSLGHHGLACSSGAGRLSRHSALNDILRRALVSAGVPAALEPQIVRNDGKRPDGMSLIPWKMGRALVWDATCADTVAASYVPSTSRRAGAAADTRERQKVAKYSCLGAQYEFVAFGVETLGSWGRGAQMLHKALGKRLREATGDPRAGSFLAQRISIAIQRGNAACVLGTLPRAPNFDRYF

SEQ ID NO: 17900 - protein, 941 aa, Cydia splendana
MECCVCNKIFSSPRGLHIHQSRIHQVRILPISTSTSSSINLSTPTPSSNATAPLQTLLGQLKQTTPLIKRVPRGARSAVAEALTETINKCVRHNNAEEWYNLLTFSYKVLHVSELQNINISLTQQIRNNTQTPNMPTLNIRPGCNTNKYNLFEKVEEKIHDGDLKGATRLLFSNDTMAPDTPETAAALQSKHPPGPSTPIFVDPPSDPSACLQATDKDILAALLSFPKGSASGLDGISPQHLIDLTNYGSGVTGEHLVSSITKLINLMLMGDVCQEVTSVIYGANLIALSKKDGGVRPIAVGSTLRRLAAKVCVRLTRKKLQNLFEPIQVGFGTRGGCEAAVHAVRTFVQSDACEVLLKLDVQNAFNSVNRDTLLNEIKMTVPEIYNFLLQCYHCPSKLMHKNNEILSAVGCQQGDPLGPAIFSLTINSIIHSLNSKLNVWYLDDGTLGGDSQTVLADLIQIKNKFKDIGLELNFNKCELYISDNVDSSSASQTIQSFNNIAPSIKNISKDSLHLLGAPIFNEAIPPLLSKSISKFSDYSDRLLKISSHSALFILKFCLLIPKFTYLLRCCPIWKYPHLLRPLDLLLKSQIESILNIRFSEQAWTQATLPIRYGGLGTRKISSVALPAFLASIHSTSDLAGNILKASPATNCEIACLVEASNAWLAGPSQNFPSRPKIQRAWDNIASVSTLNSLLDTATGRDRARLLASSRPESGQWLHAYPSPNTGTFIDPGTLRIAAGLRLGVAVCADHNCASCGSEVDSLGHHGLACSSGAGRLSRHSALNDILRRALVSAGVPAALEPQIVRNDGKRPDGMSLIPWKMGRALVWDATCADTVAASYVPSTSRRAGAAADTRERQKVAKYSCLGSQYEFVAFGVETLGSWGRGAQMLHKAPGKRLREATGDPRAGSFLAQRIAIAIQRGNAACVLGTLPRAPNFDRYF

SEQ ID NO: 17901 - protein, 722 aa, Cydia splendana
MAALASFPRGSASGLDGISLQHLIDLTSHCTGVAGEHLTASITKLVNLMLLGDVCQDVTSVIYGANLIALTKKDAGVRPIAIGSTFRRLAAKVCVRLTRSKLQKLFEPVQVGFGTRGGCEAAVHAVRTFIQGDMCEVLLKMDVKNAFNSVNRDTLLNEIKIHVPEIYNFLLQCYHSPSKLIHKNNEILSAVGCQQGDPLGPAVFSLAINSIIHNLNSKLNVWYLDDGTIGGDSQTVLADLVKIKNQFRDIGLELNYNKCELYISDRADPLTVSQITQNFNNVAPNIKITPKDSLHLLGSPIFDEAIPPLINKSITTFTNHSDRLTKINSHCALFILKFCLLLPKFTYLLRCCPIWKFPNIMNTIDSILKCQIETVLNVHFSEQAWTQACLPVRYGGLGTRNISDVALPAFLSSIHSTSDLAGKILKASTATNCGIACLDEATNAWLAGSSPSLPSKPTQQRAWDTIASVATLNSLVATSSGKDLARLLAVSKPDSGHWLHAYPSPNAGTLIDPGTLRIAVGLRLGIEICTDHTCASCGAQVDRLGHHGLSCSSGAGRLSRHAALNDILRRALVSAGVPAALEPRIARDDGKRPDGMSLIPWRMGRALVWDATCADTLAASYIQATSRNAGAAADARERAKAHKYSCLGANYEFVAFGVETLGPWGRGARGLLKELGKRLREATGDSRAGSFLAQRIAIAIQRGNAACAMGTLPRGLGLEGRF

SEQ ID NO: 17902 - protein, 937 aa, Apotomis turbidana
MQCCVVCNKSFQSTKGLHIHQSRTHQVRILSILPHSSSQTPSTSSTSHTLPLNSLLGKLKLSTPLIKRIPRGARSTVAEALSSSITSCIRDNNETSWRDLLTFPFKILHVSKKTDANISLCQKIKSNVSSPTLATPSLSSRPSNYNLYKKVEEKIYDGDLKGATRLLFSDDTIAPDTPETAAALHLKHPPGPSTPIFVDPSSDPTACLQATERDILAALSSFPKGSASGLDGISPQHLIDLTSHGSGVAGEHLTASLTKLVNFMIVGDVCQDVTPVLYGANLIALKKKDGGIRPIAVGSTFRRLAAKVCVRLTRNKLQNIFEPVQVGFGTRGGCEAAVHATRTFVEDDQCEVLLKIDVKNAFNSVNRDALLNEIKVHVPEIYNFLLQCYLCPSKLMHKNYEILSAVGCQQGDPLGPAIFSLAINSIIHNLNSKLNVWYLDDGTLGGDWQTVLKDLSKLKIKFNSIGLDLNFDKCELYISQKVNTSLAFQIHQNFYILAPNIKILSKNSLYLLGSPIFDEAIPPLLTNSFSKFNNHSDRLAKISSHSALFILKFCLLVPKFTYLLRCCPIWKFPILVRSIDLTLKFQIESILNISLSEQAWTQASLPIRNGGLGTRTICSIALPAFLSSVHSTSDLAGKILKADMAANCEIACLAEAKNAWLAGPNPILPDAPKKQRAWDTLASDAILESLILNSSGRDRARLLAVSRPESGHWLHAYPCPNAGTYIDPNTLRIAAGLRLGADVCEEHACTACGANANRLGHHGLVCSSGAGRHSRHAALNDILRRALVSVNVPAALEPQIVRDDGKRPDGMSLIPWRMGRALVWDATCADTLAASYLPATSRRAGAAADARERIKVSKYSCLGAQYDFIAFGVETLGPWGQGARGLHRELSKRLREATGDPRAGSFLAQRLSIAIQRGNAACVMGTLPKGLSFINIF

SEQ ID NO: 17903 - protein, 940 aa, Notocelia uddmanniana
MECCVCQKIFSSARGLRIHQGRIHQVRINYVPSTPHIPAPSSNTPLPPTPDTPLQTLLGQLKQSTPIIKRIPRGARSTVSEALADAINNCVRNNNTNSWHDLLTFSFKILHLSEVSNNNISLTQKLKNNILNPSSPICASSSGTHRKKYDLFGKVEEKIHDGDLKGATRLLFSNDTLAPDTPETKAALQSKHPPGPSTPIFFDPPSDPLACLHATVRDILTALASFPKGSASGLDGISPQHLIDLTSYGSGVAGEQLATSLTKLVNLMLLGDVCPDVTPVIYGANLIALAKKDGGVRPIAVGSTFRRLAAKICVQLTRTKLQALLEPAQVGFGTRGGCEAAVHAVRTFIKSDSCEVLLKLDVKNAFNSVNRDTLLNEVKIHVPEIYNFLLQCYHCPSKLVHKTNEILSAAGCQQGDPLGPAIFSLAINPIINHLNSKLNIWYLDDGTLAGDAQTVLADLMHVKQHFNRIGLELNCDKSELYISDKLNPLTASEIAQNFNNIAFNIKIVSKDSLHLLGSPIFEEAIPLLLNNSTTKFSKYSDRLVKISSHSALFILKFCLFVPKFTYLLRCCPIWKFPHLITPIDNLMKSQIENILNIHFSEQAWTQAALPIRNGGLGTRKISSVALPAFLSSIHSTLDLAGRILKAPPGIDCEIACLNEATNAWLAGPSANLPSKPHRQRAWDTIASVTTLQNLIERSTGRDRARLLAVSKPESGYWLHAYPSPNTGTFIDPDTLRIAVGLRLGAGICTGHTCVSCGAPVDRLGHHGLSCSSGAGRLSRHAALNDIVRRALVSANVSAALEPQIVRSDGKRPDGMSLIPWKTGRALVWDATCTDTLAASYLPATTKRAGAAADARERLKVSKYSCLGAQYHFFAFGVETLGPWGKGALELHREISRRLRETTGDPRASGFLAQRIAIAVQRGNAACVMGTLPRGPGLIFN

SEQ ID NO: 17904 - protein, 940 aa, Pammene fasciana
MDCCVCQKSFQTAKGLHIHQSRIHHVRVCPCPSISSSQSNNTSSTPFPTVPLQTLLGQLKHSKPLVKRIPRGARSTVAEALTAAIEACVTNNDLDSWQNLLTFSFKILHVSEDGSEDISLTKKIKNNILSPSLSQASTRSSRGQSKKYNLFRKVEEKLYDGDLKGASRLLFSSDTLAPDTPETAAALQAKHPSGPSTPALVDSPSDPSACLHVTAGDVMAALASFPKGSASGLDGISPQHLLDLTSHSTGVAGEHLSASLTKLVNHMLRGDVCRDVTPVLYGANLIALTKKDAGVRPIAVGSTFRRLAAKVCVRSTRSKLQKLFEPIQVGFGTHGGCEAAVHAVRTFVQGDECEVLLKMDVKNAFNSVNRDTLLNEIKIHIPETYNFLLQCYHTPSKLIHKNNEILSAVGCQQGDPLGPAIFSLAINSIIHNLNSKFNIWYLDDGTIGGDWQTVLADLVKIKNEFRDIGLELNFTKCELYISDKMDQIAVSQIIQNFSNVAANIKIVSKENLSLLGSPIFDEAIPPLLNNSISKFNHYSDRLVKINSHCALFILKFCLLIPKFTYLLRCCPIWKFPNLILPIDLILKSQIESILNVHFNEQAWTQACLPVRFGGLGTRNISSVALPAFLSSIHSTSDLTGNILKASPAINCEIACLDGATNAWLAVPGRNVPSKPKYQRAWDSIASAATLKSLVASSSGKSLARLLAVSKPEAGQWLLAYPSPNTGTFIDPSTLRIAVGLRLGVEICVNHSCVSCGAQVDRLGHHGLSCSSGAGRFSRHASLNDILRRALVNANVPVALEPQIARDDGKRPDGMSLIPWKMGRALVWDATCADTLAASYISATSRHAGAAADARERCKINKYSCLGANYEFVAFGVETLGPWGRGARGLMKDIGKRLREATGDPRAGSFLAQRLAIAIQRGNAACVMGTLPKGQGLEGWF

SEQ ID NO: 17905 - protein, 674 aa, Hedya salicella
MLLGDVCQDVTPVLYGANLIAFTKKDGGVRPIAVGSTLRRLAAKVCVRLTRSKLQALFEPVQVGFGTRGGCEAAVHAVRTFAHDNLCEVVLKLDVKNAFNSINRDTLLNEIKMHIPEIYHFLVQCYHCPSKLVHKNIEILSAVGCQQGDPLGPAIFSLAINSAIRSLNSKLNVWYLDDGTLGGDFQTVLADLTEIKNKFESIGLEINYNKCELFISNKVNASLASQILQNFNNIAPNIKIVPKESLYLLGSPIFNDAIPSLLNNSVSKFSEHSDRLTKISSHSALFILKFCLLVPKFTYLLRCCPIWKFPNLVKPIDTLLKSQIESIINIRISEQAWTQATLPIRYGGLGIRKISSVALPAFLSSIHSTSDLAGKILKTPTGTNCEISCLIAATNTWLAGPSPNLPAKPKIQRAWDTISSLHSLTVLTNDSSGRDRSRLLAVSRSESGQWLHAYPSPNTGTFIDPSTLRIAIGLRLGADICADHCCASCGAHVDRLGHHGLACSSGAGRRPHHAALNDILRRALVSANVPAVLEPQIIRDDGKRPDGMSLIPWRMGRALVWDATCADTLAASYLPATSKGAGAAADARENSKVGKYSCLGAQYEFVAFGVETLGPWGQGARRLLKCLSKRLREATGDPRAGSFLAQRLAIAIQRGNAACVLGTLPRGPDLSVHF

SEQ ID NO: 17906 - protein, 936 aa, Hedya salicella
MQCCEICNKTFQSTKGLHIHQTRIHQVRTFIAVPNSNPQIPITSSTPHQIPLHSLLGQLKPSTPLIKRIPRGARPTLAEALTNAITSCIRDNNEASWRDLLTFSFKILHVNKNSENISLTQKVKNNVLIPTLTTPLSPSKSRSYNLFDKVEEKIYNGDLKGATRLLFSDDTIAPDTPETATALQSKHPPGPSTPLFVDPPSDSTACLQATERDVIAALSSFAKGSASGLDGISPQHLIDLTSHGSGIAGEHLIASLTKLVNLMIVGDVCQDVTPVLYGANLIALRKKDGGIRPIAVGSTFRRLAAKVCVRLTRDKLQSIFEPVQVGFGTRGGCEAALHAVRTYVQDDQCEVLLKIDVKNAFNSVNRDTLLNEIKVHIPEIYNFLLQCYHCPSKLIYQNNEILSAMGCQQGDPLGSAIFSLAINSIIHNLNSKLNIWYLDDGTISGGWQTVLKDLGDLKDKFKSIGLELNFNKCELYISENVNTSLAFQIHQNFNTLAPNIKILSKENLFLLGSPIFDEAIPPLLSNSFSKFSNHSERLIKISSHSALFILKFCLLIPKFTYLLRCCPIWKFPNLIRPIDLSLKFQIESIINISLSEQAWTQASLPIRYGGLGTRQVSSIALPAFLSSIYSTSDLAGKILKVNATANCEIACLAEAKNAWLAGPNPILPDSPKNQRAWDTIVSDATLNTLIHSSSGKDQARLLAVSRTESGHWLHAYPCPNTGTYIDPNTLRIAAGLRLGADVCEEHACASCGASVNRLGHHGLVCSSGVGRHSCHASVNDILRRALVSANVPAVLEPQIARDDGKRPDGMSLIPWRMGRALVWDATCADTLAASYLSATSRRAGAAADAREQIKIRKYSCLGAQYDFIPFGVETLGPWGQGARGLHKELSKRLREATGDPRAGSFLAQRLSIAIQRGNAACVMCTLPKGPNILSNF

SEQ ID NO: 17907 - protein, 943 aa, Notocelia uddmanniana
MECCVCNKIFSSTRGLHIHQSRIHRVCILPLSISAPSSVSSSTPTPSPNATATAPLQILLGQLKQTTPTIKRVPRGARSAVAEALTDTINKCVRHNNTEEWYNLLTFSYKILHVSEQKNSNISLTQQIKNNIQMPNMPTSNLRPRSRNRKYNLFEKVEEKIHDGDFRGATRLLFSNDTLAPDTPETAAALISKHPPGPSSPIFVDPPSDHSACLQATGKDILTALLSFPKGSASGLDGISPQHLIDLTSHGSGITGEQLISSITKLVNLMLMGDVCQEVTPVIYGANLIALSKKDGGVRPIAVGSTLRRLAAKVCVRLTRKKLENVFEPVQVGFGTRGGCEAAVHAVRTFVHSDACEVLLKLDVQNAFNSVNRDTLLNEIKITVPEIYNFLLQCYHCPSKLMHNNNEILSAVGCQQGDPLGPAIFSLAINSIIHSLNSKLNVWYLDDGTLGGDSQTVLADFFQIKNKFRDIGLELNFNKCELYISDNVESSSASQIIQSFNNIAPNIKTVSKDCLHLLGSPIFNEAIPPLLSRSISKFSDHTERLLKISSHSALFILKFCLLIPKFTYLLRCCPIWKFPHLLQPIDLLLKSQVETILNIRLSEQAWTQASLPIRYGGLGTRKISSIALPAFLASIHSTSDLAGKILQASPATNCEIACMVEASNAWLAGPNQNFPSRPKIQRAWDTIASASTLKSLIDSATGRDRARLLASARPESGQWLHAYPSPNIGTFIDPETLRIAAGLRLGVDLCADHSCACCGSCVDRLGHHGLACSSGAGRLSRHAAINDILRRALVSAGVPAALEPQIVRNDGKRPDGMSLIPWKMGRALVWDATCADTLAASYLPLTSRHAGAAADTRERQKIVKYSCLGAQYEFVAFGVETLGSWGRGAQMLHKVLGKRLREATGEPRAGSFLAQRIAIAIQRGNAACVMGTLPRALNFDRYF

SEQ ID NO: 17908 - protein, 939 aa, Adoxophyes honmai
MQCCVCSKFFSSSRGLHIHQARIHRVRVLSSASSPQPSLNTTSSPSVTSEPLYVLLGRLKRSTPVIKRIPRGVRSVVAQALSDKINNCVRSNNEIEWSKLLTFSYKILHVSKLNSYDISLTQKIKNNLENPVTLDFNSPPKSSKLKYDLFKKVEEKIEDGDLKGASRLLFSNDTLAPDTPETAAALQSKHPPGPSSPLFVDPPSDPSACIRATEQDVKTAIASFPKGSASGLDGISPQHLVDLTSHGTGVAGEHLLKSLTKLINLMLLGDVCQEVTPLLYGANLIAITKKDGGVRPIAVGSTFRRLAAKICVRHTRTKLQNLFEPIQVGFGTRGGCEAAVHAARTFVQGDLCEVLLKLDVKNAFNSVNRDTLLNEIKIHVPEIYNYMLQCYHTPSKLLHKENAIVSAVGCQQGDPLGPAIFSLAINPIINSLNSKFNVWYLDDGTLGGDAQTVLADLVQIKNKFRDIGLDLNFDKCEIYISDKIDQTSSSKIIENFNNVAPNIKNMRKDSLHLLGSPIFDEAIPPFLNKSVSKFKNFSNRLTKISSHSALFMLKFCLVVPKFTYLLRCSPIWKFPLLVNPIDLLAKSQLESILNIRFTEQAWTQASLPIRYGGLGTRKICSISLPAFLASIHSTSDLAGRILKASPATDCEIACLAEAKNAWLAGPSPNLPSNPKFQRAWDTIISEATINLLINTAVGRDLARLLAVSRPESGHWLHAYPSPHTGTFIDPCTLRIAVGLRLGVEVCVEHNCSSCGAHVDRLGLHGLTCSSSAGRLSRHAALNDIIRRALVSANVPAMLEPQIVRGDGKRPDGMSLIPWRMGRAVVWDATCADTLASSYLAATSRKAGAAADARERLKVSKYECLGTQYEFVAFGVETLGPWGKSARGFHKALGKRLREATGDPRAGSFLAQRLAIAIQRGNAACVMGTLPKGPFLDFFV

SEQ ID NO: 17909 - protein, 949 aa, Hedya salicella
MQCCVVCQKVFTSTRGLHIHQSRVHQVRVLSVSSHTNSQNPSTSHTIFQNHSSSQASNYAIPLHTLLGQLKQTTPLLKRIPRGARATAAEALAETIIGCARNNNITSWYDLLTFAYKIFHVPENNASNISLTQKIKNNTLTPTIPVPTPLKPHSKKYDLFGKVEEKIHDGDLRGATRLLFSNDTVAPNTPETVAALQSKHPPGPSIPIFVDPPSDPTTCLRATERDIVAALTSFPKGSAPGLDGISPQHLIDLTSHGTGVADEHLIASLTKLVNLMLLGDVCQDVTPVLYGANLIAFTKKDGGVRPIAVGSTLRRLAAKVCVRLTRSKLQALFEPVQVGFGTRGGCEAAVHAVRTFAHDNLCEVVLKLDVKNAFNSINRDTLLNEIKMHIPEIYNFLLQCYHCPSKLVHKNIEILSAVGCQQGDPLGPAIFSLAINSAIRSLNSKLNVWYLDDGTLGGDFQTVLADLTEIKNKFESIGLEINYNKCELFISNKVNASLASQILQNFNNIAPNIKIVPKESLYLLGSPIFDDAIPSLLNNSVSKFSEHSDRLTKISSHSALFILKFCLLVPKFTYLLRCCPIWKFPNLVKPIDTLLKSQIESIINIRISEQAWTQATLPIRYGGLGIRKISSVALPAFLSSIHSTSDLAGKILKTPTGTNCEISCLIAATNAWLAGPSPNLPAKPKIQRAWDTISSLHSLTVLTNDSSGRDRSRLLAVSRSESGQWLHAYPSPNTETFIDPSTLRIAIGLRLGADICADHCCASCGAHVDRLGHHGLACSSGAGRRPRHAALNDILRRALVSANVPAVLEPQIIRDDGKRPDGMSLIPWRMGRALVWDATCADTLAASYLPATSKRAGAAADARENSKVGKYSCLGAQYEFVAFGVETLGPWGQGARRLLKCLSKRLREATGDPRAGSFLAQRLAIAIQRGNAACVLGTLPRGPDLSVHF

SEQ ID NO: 17910 - protein, 943 aa, Pammene fasciana
MECCVCQRVFPTQRGLHIHQARIHQVRIALSSPTLPNVPNSSSFPSLLSSTSTTPLQTLLGQLKQSTSIIKRIPRGARSTVSEALTNVINDCVRNNNINSWHVLLTFSYNILHVSEDTHTNISLTQKIKNNILHPTITNPTFFSGAHSKKYDLFGKVEEKVHDGDLKGATRLLFSNDTLAPDTPETAAALHSKHPPGPSTPIFVDPPSDPSACLHATERDVLTALASFPKGSASGLDGISPQHLVDLTSYGSGVAGEHLTTSLTKLVNLMLLGDVCPDVTPIIYGANLIALAKKDGGVRPIAVGSTFRRLAAKICVRLTRTKLQALFEPVQVGFGTRGGCESAVHAVRTFVKGDSCEVLLKLDVKNAFNSVNRDTLLNEIKTHVPEIYNFLLQCYHCPSKLVHKSNEILSAVGCQQGDPLGPAIFSLAINSIIHNLNSKLNVWYLDDGTLGGDAQTVLADLIQIKQKFHNIGLELNFDKCELYIADQINTHSASLIIQNFNNVAQNIKIVPKDSLYLLGSPIFDEAIPLLLSKSATKFRNYSDRLVKISSHSALFILKFCIFVPKFTYLLRCCPIWKFPHVIQPIDNLMKSQIESILNIHLSEQAWTQAALPIRYGGLGTRKISSIALPAFLSSIHSTSELAGKILKAPTGINCQIACLEEATNAWVAGPSPNFPSKPKRQRAWDSLTSAAILKLLTDTSSGRDMARLLAVSKPESGHWLHAYPSPNTGTFIDPETLRIAVGLRLGAGICTSHICASCGAPVDQLGHHGLSCSSGAGRISRHAALNDILRRALVSANVPAALEPQIVRGDGKRPDGMSLIPWKMGRALVWDATCTDTLAASYLPATCKRAGAAADARERLKVTKYSCLGAQYEFSPFAVETLGPWGKGALGLHKELSKRLREATGDPRAGSFLAQRIAIAVQRGNAACVMGTLPKCPGLVVNF

SEQ ID NO: 17911 - protein, 949 aa, Hedya salicella
MQCCVVCQKVFTSTRGLHIHQSCVHQVRVLSVSSHTNSQNPSTSHTIFQNHSSSQASNYAIPLHTLLGQLKQTTPLLKRIPRGARATAAEALAETIIGCVRNNNITSWYDLLTFAYKIFHVPENNASNISLTQKIKNNTLTPTIPVPTPLKPHSKKYDLFGKVEEKIHDGDLRGATRLLFSNDTIAPNTPETVAALQSKHPPGPSIPIFVDPPSDPTTCLRATERDIVAALTSFPKGSAPGLDGISPQHLIDLTSHGTGVAGEHLIASLTKLVNLMLLGDVCQDVTPVLYGANLIAFTKKDGGVRPIAVGSTLRRLAAKVCVRLTRSKLQALFEPVQVGFGTRRGCEAAVHAVRTFAHDNLCEVVLKLDVKNAFNSINRDTLLNEIKMHIPEIYNFLLQCYHCPSKLVHKNIEILSAVGCQQGDPLSPAIFSLAINSAIHSLNSKLNVWYLDDGTLGGDFQTVLADLTEIKNKFESIGLEINYNKCELFISNKVNASLASQILQNFNNIAPNIKIVPKESLYLLGSPIFDDAIPSLLNNSVSKFSEHSDRLTKISSHSALFILKFCLLVPKFTYLLRCCPIWKFPNLVKPIDTLLKSQIESIINIRISEQAWTQATLPIRYGGLGIRKISSVALPAFLSSIHSTSDLAGKILKTPTGTNCEISCLIAATNAWLAGPSPNLPAKPKIQRAWDTISSLHSLTVLTNDSSGRDRSRLLAVSRSESGQWLHAYPSPNTGTFIDPSTLRIAIGLRLGADICADHCCASCGAHVDRLGHHGLACSSGAGRRPRHAALNDILRRALVSANVPAILEPQIIRDDGKRPDGMSLIPWRMGRALIWDATCADTLAASYLPATSKRAGAAADARENSKVGKYSCLGAQYEFVAFGVETLGPWGQGARRLLKCLSKRLREATGDPRAGSFLAQRLAIAIQRGNAACVLGTLPRGPDLSVHF

SEQ ID NO: 17912 - protein, 935 aa, Adoxophyes honmai
MLRVLQMLFLFKGPHIHQARVHQVRVLPSAASQPSLNTSSPSVTSEPLYTLLGRLKRSTPVVKRIPRGVRSVVAQALSDKINNCVRSNNETEWSKLLTFSYKILHVSKINSCDISLTQKIKNNLGTPVAIDIASPPKSSKFKYDLFKKVEEKIQDGDLKGASRLLFSNDTLAPDTPETAAALQSKHPPGPSSPLFVDPPSDPSACIRATEQDVKTAIASFPKGSASGLDGISPQHLVDLTSHGTGVAGEHLLKSITKLINLMLLGDVCQEVTPLLYGANLIAISKKDGGVRPIAVGSTFRRLAAKICVRYTRTKLQNLFEPIQVGFGTRGGCEAAVHAARTFVQGDLCEVLLKLDVKNAFNSVNRDTLLNEIKIHVPEIYNYMLQCYHTPSKLLHKENVIVSAVGCQQGDPLGPAIFSLAINPIIKSLNSKFNVWYLDDGTLGGDAQTVLADLLHIKNKFTDIGLDLNFDKCEIYISDKIDQTSSSRIIENFNNIAPNIKNMRKDSLHLLGSPIFDEAIPPFLNKSVSKFKNYSNRLTKISSHSALFMLKFCLVVPKLTYLLRCSPIWKFPLLVNPIDLLAKSQLESILNIHFTEQAWTQASLPIRYGGLGTRKICSISLPAFLASIYSTSDLAGRILKASPATDCEIACLTEAKNAWLAGPSPNLPSNPKFQRAWDTIISEQTINLLINTAVGRDRARLLAVSKPESGHWLHAYPSPHTGTFIDPCTLRIAVGLRLGVEVCVEHNCSSCGAHVDRLGLHGLTCSSGAGRLSRHAALNDIIRRALVSANVPAMLEPQIVRGDGKRPDGMSLIPWRMGRAVVWDATCADTLASSYLPATCRRAGAAADARERLKVSKYECLGTQYEFVAFGVETLGPWGKSARGFHKALGKRLREASGDPRAGSFLAQRLAIAIQRGNAACVMGTLPKGPILDCFV

SEQ ID NO: 17913 - protein, 941 aa, Pammene fasciana
MDCCVCNKSFQTTKGLHIHQSRIHHVRVCPGSSIPISQNNNGSSTSFHPTVPLQTLLGQLKHSKPLIKRIPRGARSTVAEALTAAIENCVRKNDLDAWQNLLTFSYKILHVTEDGNENISLTKKIKNNILVPSLTPTTRSSGPQSNNKYNIFRKVEEKLHDGDLKGASRLLFSSDTLAPHTPETAAALQAKHPTGPSTPALVDPPSDPSACLHVTAGDVMVALASFPKGSASGLDGISPQHLLDLTSHSTGVAGEHLSASLTKLVNHMLQGDVCRDVTPVLYGANLIALTKKDAGVRPIAVGSTFRRLAAKVCVRNTRSKLQKLFEPIQVGFGTRGGCEAAVHAVRTFVQADECEVLLKMDVKNAFNSVNRDTLLNEIKIHIPETYNFLLQCYHTPSKLIHKNNEIFSAVGCQQGDPLGPAIFSLAINSIIHKLNSKFNIWYLDDGTIGGDWQTVLADLVKIKNEFRDIGLELNFTKCELYISDKIDQVAVSQIIQNFNNVATNIKILSKENLYLLGSPIFDEAIPPLLNNSISTFNHYSDRLVKINSHCALFILKFCLLIPKFTYLLRCCPIWKFPNLILPIDLILKSQIEAILNVHFNEQAWTQACLPVRFGGLGTRNISSVALPAFLSSIHSTSDLTGNILKASSAINCEIACLEGATNAWLAVPGRSVPSKPKYQRAWDTIASAATLKSLVGSSSGKSLARLLAVSKPEAGQWLLAYPSPNTGTFIDPSTLRIAVGLRLGVEICADHSCVSCGAQVDRLGHHGLSCSSGGGRFSRHASLNDILRRALVSANVPAALEPQIVRDDGKRPDGMSLIPWKMGRALVWDATCADTLAASYISATGRHAGAAADARERCKINKYSCLGANYEFVAFGVETLGPWGRGARGLMKELGKRLREATGDPRAGSFLAQRLAIAIQRGNAACVMGTLPKGQGLEGQF

SEQ ID NO: 17914 - protein, 949 aa, Hedya salicella
MQCCVVCQKVFTSTRGLHIHQSRVHQVRVLSVSSHTNSQNPSTSHTIFQNHSSSQASNYAIPLHTLLGQLKQTTPLLKRIPRGARATAAEALAETIIGCARNNNITSWYDLLTFAYKIFHVPENNASNISLTQKIKNNTLTPTIPVPTPLKPHSKKYDLFGKVEEKIHDGDRRGATRLLFSNDTVAPNTPETVAALQSKHPPGPSIPIFVDPPSDPTTCLRATERDIVAALTSFPKGSAPGLDGISPQHLIDLTSHGTGVAGEHLIASLTKLVNLMLLGDVCQDVTPVLYGANLIAFTKKDGGVRPIAVGSTLRRLAAKVCVRLTRSKLQALFEPVQVGFGTRGGCEAAVHAVRTFAHDNLCEVVLKLDVKNAFNSINRDTLLNEIKMHIPEIYNFLLQCYHCPSKLVHKNIEILSAVGCQQGDPLGPAIFSLAINSAIRSLNSKLNVWYLDDGTLGGDFQTVLADLTEIKNKFESIGLEINYNKCELFISNKVNASLASQILQNFNNIAPNIKIVPKESLYLLGSPIFDDAIPSLLNNSVSKFSEHSDRLTKISSHSALFFLKFCLLVPKFTYLLRCCPIWKFPNLVKPIDTLLKSQIESIINIRISEQAWTQATLPIRYGGLGIRKISSVALPAFLSSIHSTSDLAGKILKTPTGTNCEISCLIAATNAWLAGPSPNLPAKPKIQRAWDTISSLHSLTVLTNDSSGRDRSRLLAVSRSESGQWLHAYPSPNTGTFIDPSTLRIAIGLRLGADICADHCCASCGAHVDRLGHHGLACSSGAGRRPRHAALNDILRRALVSANVPAVLEPQIIRDDGKRPDGMSLIPWRMGRALVWEATCADTLAASYLPATSKRAGAAADARENSKVGKYSCLGAQYEFVAFGVETLGPWGQGARRLLKCLSKRLREATGDPRAGSFLAQRLAIAIQRGNAACVLGTLPRGPDLSVHF

SEQ ID NO: 17915 - protein, 940 aa, Notocelia uddmanniana
MECCVCQKIFSSARGLRIHQGRIHQVRITSVPSTPHIPAPSSNTPLPPTPDTPLQTLLGQLKQSTPIIKRIPRGARSTVSEALADAINNCVRNNNTNSWHDLLTFSFKILHVSEVSNNNISLTQKLKNNILNPSSPICASSSGTHRKKYDLFGKVEEKIHDGDLKGATRLLFSNDTLAPDTPETKAALQSKHPPGPSTPIFFDPPSDPSACLHATVRDILTALASFPKGSASGLDGIAPQHLIDLTSYSSGVAGEELATSLTKLVNLMLLGDVCPDVTPVIYGANLIALAKKDGGVRPIAVGSTFQRLAAKICVQLTRTKLQALLEPAQVGFGTRGGCEAAVHAVRTFIKSDSCEVLLKLDVKNAFNSVNRDTLLNEVKIHVPEIYNFLLQCYHCPSKLVHKTNEILSAAGCQQGDPLGPAIFSLAINLIINHLNSKLNIWYLDDGTLAGDAQTVLADLMHVKQHFNRIGLELNCDKSELYISDKLNPLTASEIAQNFNNIAFNIKIVSKDSLHLLGSPIFEEAIPLLLNNSTTKFSKYSDRLVKISSHSALFILKFCLFVPKFTYLLRCCPIWKFPHLITPIDNLMKSQIENILNIHFSEQAWTQAALPIRNGGLGTRKISSVALPAFLSSIHSTLDLAGRILKAPPGIDCEIACLNEATNAWLAGPSPNLPSKPHRQRAWDTIASVATLQNLIERSTGRDRARLLAVSKPESGYWLHAYPSPNTGTFIDPDTLRIAVGLRLGAGICTGHICVSCGAPVDRLGHHGLSCSSGAGRLSRHAALNDIIRRALVSANVPAALEPQIVRSDGKRPDGMSLIPWKTGRALVWDATCTDTLAASYLPATTKRAGAAADARERLKVSKYSCLGAQYHFFAFCVETLGPWGKGALELHREISRRLRETTGDPRAGGFLAQRIAIAVQRGNAACVMGTLPRGPGLIFY

SEQ ID NO: 17916 - protein, 941 aa, Bembecia ichneumoniformis
MECCVCKKTFASSKGLHIHQGRIHQVRITSVPSSQNSSSPGSSPLSSSTSAIPLQTLLGQLKQSTSVVKRIPRGARATVSEALTNAINVCIRNNDDNSWRDLLTFSFQILHVSEQSHSNISLTQKIKNNILNPSLPHPNPSTGVNRKKYDLFGKIEEKIHDGDLKGAIRLLFSNDTLAPDTPETTAALLSKHPPGPSTPFFVDPPSDPSSCLHATERDVLTALASFPKGSASGLDGISPQHLIDLTNYGTGVAGERLTTSLTKLVNLMLLGDVCPDVAPIIYGANLIALTKKDGGVRPIAVGLTFRRLAAKICVRLTRKKLQALFEPTQVGFGTRGGCEAAVHAVRTFVKSDSCEVLLKLDIKNAFNSVNRDTLLNEIRMHVPEIYNFLLQCYHCPSKLLHKSNEILSAVGCQQGDPLGPAIFSLAINSIIHNLNSKLNVWYLDDGTLGGDAQTVLADLVHVKQQFHNIGLELNFDKCELYISDKVDSLTVSQIRQNFNNVALHIKIISKDSLYLLGCPIMEEAIPLLLTKSTSKFCSFSDRLVKISSHSALFILKFCLFVPKFTYLLRCCPIWKFPHLIQPIDSLMKSQIENILNIHISEQAWTQAALPIRNGGLGTRKISSIALPAFLSSIHSTLDLAGKILKAPAGINCVIACLDEATNVWLAGPSPNLPPKPQRQRAWDSIASEATLQSLIESSTGRDRARLLAVSKPESGHWLHAYPSPNTGTFIDPDTLRISVGLRLGAEICTGHNCASCGAPVDRLGHHGLSCSSGAGRLSRHAALNDILRRALVSANVPAALEPQIIRGDGKRPDGMSLIPWRMGRALVWDATCTDTLAASHLPATTKRAGAAADARELFKVSNYSCLGAQYQFIPFGVETLGPWGKGALGLHRDLCKRLREATGDPRAGGFLAQRIAIAIQRGNAACVMETLPRGPRLDFNL

SEQ ID NO: 17917 - protein, 940 aa, Notocelia uddmanniana
MECCVCQKIFSSARGLRIHQGRIHQVRINYVPSTPHIPAPSSNTPLPPTPDTPLQTLLGQLKQSTPIIKRIPRGARSTVSEALADAINNCVRNNNTNSWHDLLTFSFKILHVSEVSNNNISLMQKLKNNILNPSSPICASSSGTHRKKYDLFGKVEEKIHDGDLKGATRLLFSNDTLAPDTPETKAALQSKHPPGPSTPIFFDPPSDPSACLHATVRDILTALASFPKGSASGLDGISPQHLIDLTSYGSGVAGEQLATSLTKLVNLMLLGDVCPDVTPVIYGANLIALAKKDGGVRPIAVGSTFRRLAAKICVQLTRTKLQALLEPAQVGFGTRGGCEAAVHAVRTFIKSDSCEVLLKLDVKNAFNSVNRDTLLNEVKIHVPEIYNFLLQCYHCPSKLVHKTNEILSAAGCQQGDPLGPAIFSLAINPIINHLNSKLNIWYLDDGTLAGDAQTVLADLMHVKQHFNRIGLELNCDKSELYISDKLNPLTASEIAQNFNNIAFNIKIVSKDSLHLLGSPIFEEAIPLLLNNSTTKFSKYSDRLVKISSHSALFILKFCLFVPKFTYLLRCCPIWKFPHLITPIDNLMKSQIENILNIHFSEQAWTQAALPIRNGGLGTRKISSVALPAFLSSIHSTLDLAGRILKAPPGIDCEIACLNEATNAWLAGPSANLPSKPHRQRAWDTIASVTTLQNLIERSTGRDRARLLAVSKPESGYWLHAYPSPNTGTFIDPDTLRIAVGLRLGAGICTGHTCVSCGAPVDRLGHHGLSCSSGAGRLSRHAALNDIVRRALVSANVPAALEPQIVRSDGKRPDGMSLIPWKTGRALVWDATCTDTLAASYLPATTKRAGAAADARERLKVSKYSCLGAQYHFFAFGVETLGPWGKGALELHRDISRRLRETTGDPRAGGFLAQRIAIAVQRGNAACVMGTLPRGPGLIFN

SEQ ID NO: 17918 - protein, 940 aa, Notocelia uddmanniana
MECCVCQKIFSSARGLRIHQGRIHQVRINYVPSTPHIPAPSSNTPLPPTPDTPLQTLLGQLKQSTPIIKRIPRGARSTVSEALADAINNCVRNNNTNSWHDLLTFSFKILHVSEVSNNNISLTQKLKNNILNPSSPICASSSGTHRKKYDLFGKVEEKIHDGDLKGATRLLFSNDTLAPDTPETKAALQSKHPPGPSTPIFFDPPSDPSACLHATVRDILTALASFPKGSASGLDGISPQHLIDLTSYGSGVAGEQLATSLTKLVNLMLLGDVCPDVTPVIYGANLIALAKKDGGVRPIAVGSTFRRLAAKICVQLTRTKLQALLEPAQVGFGTRGGCEAAVHAVRTFIKSDSCEVLLKLDVKNAFNSVNRDTLLNEVKIHVPEIYNFLLQCYHCPSKLVHKTNEILSAAGCQQGDPLGPAIFSLAINPIINHLNSKLNIWYLDDGTLAGDAQTVLADLMHVKQHFNRIGLELNCDKSELYISDKLNPLTASEIAQNFNNIAFNIKIVSKDSLHLLGSPIFEEAIPLLLNNSTTKFSKYSDRLVKISSHSALFILKFCLFVPKFTYLLRCCPIWKFPHLITPIDNLMKSQIENILNIHFSEQAWTQAALPIRNGGLGTRKISSVALPAFLSSIHSTLDLAGRILKAPPGIDCEIACLNEATNAWLAGPSANLPSKPHRQRAWDTIASVTTLQNLIERSTGRDRARLLAVSKPESGYWLHAYPSPNTGTFIDPDTLRIAVGLRLGAGICTGHTCVSCGAPVDRLGHHGLSCSSGAGRLSRHAALNDIVRRALVSANVPAALEPQIVRSDGKRPDGMSLIPWKTGRALVWDATCTDTLAASYLPATTKRAGAAADARERLKVSKYSCLGAQYHFFAFGVETLGPWGKGALELHREISRRLRETTGDPRAGGFLAQRIAIAVQRGNAACVMGTLPRGPGLIFN

SEQ ID NO: 17919 - protein, 936 aa, Hedya salicella
MQCCEICNKTFQSTKGLHIHQTRIHQVRTFIAVSNSNPQIPSTSSTPHQIPLHSLLGQLKPSTPLIKRIPRGARPTVAEALTNAITSCIRNNNEASWRDLLTFSFKILHVNKNSENISLTQKIKNNVLIPTLTTPLSPSKSRSYNLFDKVEEKIYNGDLKGATRLLFSDDTIAPDTPETATALQSKHPPGPSTPLFVDPPSDSTACLQATERDVIAALSSFAKGSASGLDGISPQHLIDLTSHGSGIAGEHLIASLTKLVNLMIVGDVCQDVTPVLYGANLIALRKKDGGIRPIAVGSTFRRLAAKVCVRLTRDKLQSIFEPVQVGFGTRGGCEAAVHAVRTYVQDDQCEVLLKIDVKNAFNSVNRDTLLNEIKVHIPEIYNFLLQCYHCPSKLIYQNNEILSAMGCQQGDPLGPAIFSLAINSIIHNLNSKLNIWYLDDGTISGGWQTVLKDLGDLKDKFKSIGLELNFNKCELYISENVNTSLAFQIHQNFNTLAPNIKILSKENLFLLGSPIFDEAIPPLLSNSFSKFSNHSERLIKISSHSALFILKFCLLIPKFTYLLRCCPIWKFPNLIRPIDLSLKFQIESIINISLSEQAWTQASLPIRYGGLGTRQISSIALPAFLSSIYSTSDLAGKILKVNTTAYCEIACLAEAKDAWLAGPNPILPDSPKNQRAWDTIVSDATLNTLIHSSSGKDQARLLAVSRTESGHWLHAYPCPNTGTYIDPNTLRIAAGLRLGADVCEEHACASCGASVNRLGHHGLVCSSGVGRHSRHASVNDILRRALVSANVPAVLEPQIARDDGKRPDGMSLIPWRMGRALVWDATCADTLAASYLSATSRRAGAAADAREQIKIRKYSCLGAQYDFIPFGVETLGPWGQGARGLHKELSKRLREATGDPRAGSFLAQRLSIAIQRGNAACVMGTLPKGPNILSNF

SEQ ID NO: 17920 - protein, 941 aa, Bembecia ichneumoniformis
MECCVCKKTFASSKGLHIHQGRIHQVRITSVPSSQNSSSPSSSPLSSSTSAIPLQTLLGQLKQSTSVVKRIPRGARATVSEALTNAINVCIRNNDDNSWRDLLTFSFQILHVSEQSHSNISLTQKIKNNILNPSLPHPNPSTGVNRKKYDLFGKIEEKIHDGDLKGAIRLLFSNDTLAPDTPETTAALLSKHPPGPSTPFFVDPPSDPSSCLHATERDVLTALASFPKGSASGLDGISPQHLIDLTNYGTGVAGERLTTSLTKLVNLMLLGDVCPDVAPIIYGANLIALTKKDGGVRPIAVGLTFRRLAAKICVRLTRKKLQAFFEPTQVGFGTRGGCEAAVHAVRTFVKSDSCEVLLKLDIKNAFNSVNRDTLLNEIRMHVPEIYNFLLQCYHCPSKLLHKSNEILSAVGCQQGDPLGPTILSLAINSIIHNLNSKLNVWYLDDGTLGGDAQTVLADLVHVKQQFHNIGLELNFDKCELYISDKVDSLTVSQIRQNFNNVALHIKIISKDSLYLLGCPIMEEAIPLLLTKSTSKFSSFSDRLVKISSHSALFILKFCLFVPKFTYLLRCCPIWKFPHLIQPIDSLMKSQIENILNIHISEQAWTQAALPIRNGGLGTRKISSIALPAFLSSIHSTLDLAGKILKAPAGINCVIACLDEATNVWLTGPSPNLPPKPQRQRAWDSIASEATLPSLIESSTGRDRARLLAVSKPESGHWLHAYPSPNTGTFIDPDTLRISVGLRLGAGICTGHNCASCGAPVDRLGHHGLSCSSGAGRLSRHAALNDILRRALVSANVPAALEPQIIRGDGKRPDEMSLIPWRMGRALVWDATCTDTLAASYLPATTKRAGAAADARELFKVSKYSCLGAQYQFIPFGVETLGPWGKGALGLHRDLCKRLREATGDPRAGGFLAQRIAIAIQRGNVACVMETLPRGPRLDFNL

SEQ ID NO: 17921 - protein, 939 aa, Apotomis turbidana
MECVVCARKFTTTKGLHIHQSRIHQVRIIPVISSVSNPQNTSSPPSSPDVPITTLLGQLKRSTSLIKRIPRGARSAVSEALTDTINKCVHHNNTNSWQDLLTFSYKILHVSDHDHSKISLTQKIKNNVRNPSSLNPTPSSPMRRKKYDLFEKVEEKVHDGDLKGATRLLFSNDTLAPDTPETTAALKSKHPPGPSTPIFVDPPSDPSACLCATQQDILAALASFPKGSASGLDGISPQHLVDLTGHGTGVVGEQLTASLMKLVNLMLLGDVCQEVTPIIYGANLIALTKKDGGVRPIAVGSTFRRLAAKICVRLTRNKLQKLFEPVQVGFGTRGGCEAAVHAVRTFGESDLCEVLIKLDVKNAFNSVNRDTLLNEIKIHVPEIYNFLLQCYHCPSILTHKNNEIFSATGCQQGDPLGPAIFSLAINPIINSLNSKLNVWYLDDGTHGGDSQTVLADLLKVKNKFSDIGLELNFGKCELYISPNINPSLASQIHEKFHDIAPNIKIISKDSLHLLGSPIFDDAIPPLLRKSISKFSFYSDRLLKISSHSALFIQKFCLLIPKFTYLLRCCPIWKFPHLIQPIDIVLKSQIESVLNIRFSEQAWTQAALPIRHGGLGTRKISSVALPAFLASVHSTADLAGKILKATTATNCEIACLDEALNAWEAGPNPNLPSKPKSQRAWDTIASVITTNSLIATSSGKDRARLLAVSRPEAGQWLHAYPSPTTGTFIDPCTLRIAVGLRVGADVCVEHSCASCGAPVDRLGHHGLSCSSGAGRLSRHAVINDILRRALVSANVPAALEPHIVRDDGKRPDGMSLIPWRMGRALVWDATCADTLAASYLAATSKAAGAAADARESFKFNKYKCLGAQYEFIPFGVETLGPWGRAARGLHKALSKRLREATGDPRAGSFLAQRIAIAIQRGNAACVMGTLPKGPCFYNSL

SEQ ID NO: 17922 - protein, 937 aa, Apotomis turbidana
MQCCVVCNKSFQSTKGLHIHQSRTHQVRILSILPHSSSQTPSTSSTSHTLPLNSLLGKLKLCTPLIKRIPRGARSTVAEALSSSITSCIRDNNETSWRDLLTFPFKILHVSKKFDANISLCQKIKSNVSSPTLATPSLSSRPSNYNLYKKVEEKIYDGDLKGATRLLFSDDTIAPDTPETAAALHLKHPPGPSTPIFVDPSSDPTACLQATERDILAALSSFPKGSASGLDGISPQHLIDLTSHGSGVAGEHLTASLTKLVNFMIVGDVCQDVTPVLYGANLIALKKKDGGIRSIAVGSTFRRLAAKVCVRLTRNKLQNIFKPVQVGFGTRGGCEAAVHATRTFVEDDQCEVLLKIDVKNAFNSVNRDALLNEIKVHVPEIYNFLLQCYLCPSKLMHKNYEILSAVGCQQGDPLGPAIFSLAINSIIHNLNSKLNVWYLDDGTLGGDWQTVLKDLSELKIKFNSIGLDLNFDKCELYISQKVNTSLAFQIHQNFNILAPNIKILSKNSLYLLGSPIFDEAIPPLLTNSFSKFNNHSDRLAKISSHSALFILKFCLLVPKFTYLLRCCPIWKFPILVRSIDLTLKFQIESILNISLSEQAWTQASLPIRNGGLGTRTICSIALPAFLSSIHSTSDLAGKILKADMAANCEIACLAEAKNAWLAGPNPILPDAPKKQRAWDTLASVAILESLILNSSGRDRARLLAVSRPESGHWLHAYPCPNAGTYIDPNTLRIAAGLRLGADVCEEHACTACGANANRLGHHGLVCSSGAGRHSRHAALNDILRRALVSVNVPAALEPQIVRDDGKRPDGMSLIPWRMGRALVWDATCADTLAASYLPATSRRAGAAADARERIKVSKYSCLGAQYDFIAFGVETLGPWGQGARGLHRELSKRLREATGDPRAGSFLAQRLSIAIQRGNAACVMGTLPKGLSFINIF

SEQ ID NO: 17923 - protein, 940 aa, Cydia splendana
MECCVCNRSFTTEKGLHIHQSRIHHARICPVSSLPSSRNINSTTPSSYPAIPLQTLLGQLKESTPLVKRIPRGARSAVAEALTTAVDNCVNNNNLESWQNLLTFSFKILHVSNDDHDNISLTRKIKNNILAPCLPTATRSSRSQSKKYDLFRKVEEKLHDGDLKGASRLLFSNDTLAPDTPETAAALQAKHPPGPSSPAFVDPPSDASACLHATEDAVMAALASFPRGSASGLDGISPQHLIDLTSHCTGVAGEHLTASITKLVNLMLLGDVCQDVTSVIYGANLIALTKKDAGVRPIAIGSTFRRLAAKVCVRLTRSKLQKLFEPVQVGFGTRGGCEAAVHAVRTFIQGDMCEVLLKMDVKNAFNSVNRDTLLNEIKIHVPEIYNFLLQCYHSPSKLIHKNNEILSAVGCQQGDPLGPAVFSLAINSIIHNLNSKLNVWYLDDGTIGGDSQTVLADLVKIKNQFRDIGLELNYNKCELYISDRADPLTVSQITQNFNNVAPNIKITPKDSLHLLGSPIFDEAIPPLINKSITTFTNHSDRLTKINSHCALFILKFCLLLPKFTYLLRCCPIWKFPNIMNTIDSILKCQIETVLNVHFSEQAWTQACLPVRYGGLGTRNISDVALPAFLSSIHSTSDLAGKILKASTATNCGIACLDEATNAWLAGSSPSLPSKPTQQRAWDTIASVATLNSLVATSSGKDLARLLAVSKPESGHWLHAYPSPNAGTLIDPGTLRIAVGLRLGIEICTDHTCASCGAQVDRLGHHGLSCSSGAGRLSRHAALNDILRRALVSAGVPAALEPRIARDDGKRPDGMSLIPWRMGRALVWDATCADTLAASYIQATSRNAGAAADARERAKAHKYSCLGANYEFVAFGVETLGPWGRGARGLLKELGKRLREATGDSRAGSFLAQRIAIAIQRGNAACAMGTLPRGLGLEGRF

SEQ ID NO: 17924 - protein, 798 aa, Apotomis turbidana
MRRKKYDLFEKVEEKVHDGDLKGATRLLFSNDTLAPDTPETTAALKSKHPPGPSTPIFVDPPSDPSACLCATQQDILAALASFPKGSASGLHGISPQHLVDLTGHGTGVVGEQLTASLTKLVNLMLLGDVCQEVTPIIYGANLIALTKKDGGVRPIAVGSTFRRLAAKICVRLTRNKLQKLFEPVQVGFGTHGGCEAAVHAVRTFGESDLCEVLIKLDVKNAFNSVNRDTLLNEIKIHVPEICNFLLQCYHCPSILTHKNNEIFSATGCQQGDPLGPAIFSLAINPIINSLNSKLNVWYLDDGTLGGDSQTVLADLLKVKNKFSDIGLELNFGKCELYISPNINPSLASQIHEKFHGIAPNIKIISKDSLHLLGSPIFDDAIPPLLRKSISKFNFYSDRLLKISSHSALFIQKFCLLIPKFTYLLRCCPIWKFPHLIQPIDIVLKSQIESVLNIRFSEQAWTQAALPIRHGGLGTRKISSVALPAFLASVHSTADLAGKILKTTTATNCEIACLDEALNAWEAGPNPNLPSKPKSQRAWDTIASVITTNSLIATSSGKDRARLLAVSRPEAGQWLHAYPSPTTGTFIDPCTLRIAVGLRVGADVCVEHSCASCGAPVDRLGHHGLSCSSGAGRLSRHAAINDILRRALVSANVPAALEPQIVRDDGKRPDGMSLIPWRMGRALVWDATCADTLAASYLAATSKAAGAAADARESFKFNKYKCLGAQYEFIPFGVETLGPWGRAARGLHKALSKRLREATGDPRAGSFLAQRIAIAIQRGNAACVMGTLPKGPCFYNSL

SEQ ID NO: 17925 - protein, 934 aa, Apotomis turbidana
MQCCVVCNKSFQSTKGLHIHQSRTHQVRILSILPHSSSQTPSTSSTSHTLPLNSLLGKLKLSTPLIKRIPRGARSTVAEALSSSITSCIRDNNETSWRDLLTFPFKILHVSKKTDANISLCQSNVSSPTLATPSLSSRPSNYNLYKKVEEKIYDGDLKGATRLLFSDDTIAPDTPETAAALHLKHPPGPSTPIFVDPSSDPTACLQATERDILAALSSFPKGSASGLDGISPQHLIDLTSHGSGVAGEHLTASLTKLVNFMIVGDVCQDVTPVLYGANLIALKKKDGGIRPIAVGSTFRRLAAKVCVRLTRNKLQNIFEPVQVGFGTRGGCEAAVHATRTFVEDDQCEVLLKIDVKNAFNSVNRDALLNEIKVHVPEIYNFLLQCYLCPSKLMHKNYEILSAVGCQQGDPLGPAIFSLAINSIIHNLNSKLNVWYLDDGTLGGDWQTVLKDLSELKIKFNSIGLDLNFDKCELYISQKVNTSLAFQIHQNFNILAPNIKILSKNSLYLLGSPIFDEAIPPLLTNSFSKFNNHSDRLAKISSHSALFILKFCLLVPKFTYLLRCCPIWKFPILVRSIDLTLKFQIESILNISLSEQAWTQASLPIRNGGLGTRTICSIALPAFLSSIHSTSDLAGKILKADMAANCEIACLAEAKNAWLAGPNPILPDAPKKQRAWDTLASDAILESLILNSSGRDRARLLAVSRPESGHWLHAYPCPNAGTYIDPNTLRIAAGLRLGADVCEEHACTACGANANRLGHHGLVCSSGAGRHSRHAALNDILRRALVSVNVPAALEPQIVRDDGKRPDGMSLIPWRMGRALVWDATCADTLAASYLPATSRRAGAAADARERIKVSKYSCLGAQYDFIAFGVETLGPWGQGARGLHRELSKRLREATGDPRAGSFLAQRLSIAIQRGNAACVMGTLPKGLSFINIF

SEQ ID NO: 17926 - protein, 943 aa, Notocelia uddmanniana
MECCVCNKIFSSTRGLHIHQSRIHRVCILPLSISAPSSVSSSTPTPSPNATATAPLQILLGQLKQTTPTIKRVPRGTRSAVAEALTDTINKCVRHNNTEEWYNLLTFSYKILHVSEQKNSNISLTQQIKNNIQMPNMPTSNLRPRSRNRKYNLFEKVEEKIHDGDFRGATRLLFSNDTLAPDTPETAAALISKHPPGPSSPIFVDPPSDHSACLQATGKDILTALLSFPKGSASGLDGISPQHLIDLTSHGSGITGEQLISSITKLVNLMLMGDVCQEVTPVIYGANLIALSKKDGGVRPIAVGSTLRRLAAKVCVRLTRKKLENVFEPVQVGFGTRGGCEAAVHAVRTFVHSDACEVLLKLDVQNAFNSVNRDTLLNEIKITVPEIYNFLLQCYHCPSKLMHNNNEILSAVGCQQGDPLGPAIFSLAINSIIHSLNSKLNVWYLDDGTLGGDSQTVLADFFQIKNKFRDIGLELNFNKCELYISDNVESSSASQIIQSFNNIAPNIKTVSKDCLHLLGSPIFNEAIPPLLSRSISKFSDHTERLLKISSHSALFILKFCLLIPKFTYLLRCCPIWKFPHLLQPIDLLLKSQVETILNIRLSEQAWTQASLPIRYGGLGTRKISSIALPAFLASIHSTSDLAGKILQASPATNCEIACMVEASNAWLAGPNQNFPSRPKIQRAWDTIASASTLKSLIDSATGRDRARLLASARPESGQWLHAYPSPNIGTFIDPETLRIAAGLRLGVDLCADHSCACCGSCVDRLGHHGLACSSGAGRLSRHAAINDILRRALVSAGVPAALEPQIVRNDGKRPDGMSLIPWKMGRALVWDATCADTLAASYLPLTSRHAGAAADTRERQKIVKYSCLGAQYEFVAFGVETLGSWGRGAQMLHKVLGKRLREATGEPRAGSFLAQRIAIAIQRGNAACVMGTLPRALNFDRYF

SEQ ID NO: 17927 - protein, 940 aa, Amyelois transitella
MQCCVCARTFTTLRGLHIHQSRIHQVRIIQSTPLPYSANCSNTPSDNTVPLQTLLCQLKHNTPIIKRVPRGARAPVADALSEIINTCVNSNNLESWQKLLTFSFKILHVSENNDNLTLTRKIKNNIASQNLPSNQKFKITTTYSNDISKKVEQKIHDGDLRGATRLLFSNDKIAPDTPETSAALLSKHPPGPSTPLFVDPPTDSSACLHASEKDVKEALASFPKGSASGLDGISPQHLIDLTSYGTGVAGNNVLTSITKLINLMLLGDVCQDVSAVIYGANLIALTKKDGGIRPIAVGSTFRRLAAKVCVRLTRHKLQNLFEPVQVGFGTRGGCEAAVHAVRTFTHSNMCEVLLKLDVKNAFNSVNRDTLLNEIKLHVPELYNFLLQCYHTPSKLVHKYNEIDSATGCQQGDPLGPAIFSLAINSIIHGLNSKLNVWYLDDGTLGGDFKTVLKDLIDIKNKFSNIGLELNFDKCELYISETLNTSLASQIIQNFNNIAPNIKILTKDSLYLLGSPIFDEAIPSLLSKSISKFTDYSDRLTKISSHSALFVLKFCLFIPKLTYLLRCCPIWKYPTLVQPIDQLLKNKIELILNISFGEEAWTQASLPIRNGGLGIRKISCVALPAFLSSIHSTSNLVGNILKVPATTNYEIACLDEATNAWLTGPSPNLPSKLQSQRAWDSISSNFIFSSLLENSFSRDRARLLAVSRPESGHWLHAYPSPALGTFLNPLTLRVAVGLRVGAEVCVDHSCASCGVSVDRLGHHGLACSSGAGRQSRHAALNDILRRALVSADVPVALEPQIVRDDGKRPDGMSLIPWRMGRALVWDATCADTLAASYLPATSKQAGAAADARERFKTNKYSCLGTQYEFVPFGVETLGPWGKGARELHKALSKRLREATGDPRAGSFLAQRIAIAIQRGNAACVMGTLPRGQNLNNNVFGL

SEQ ID NO: 17928 - protein, 936 aa, Hedya salicella
MQCCEICNKTFQSTKGLHIHQTRIHQVRTFIAVPNSNPQIPITSSTPHQIPLHSLLGQLKPSTPLIKRIPRGARPTVAEALTNAITSCIRDNNEASWRDLLTFSFKILHVNKNSENISLTQKVKNNVLIPTLTTPLSPSKSRSYNLFDKVEEKIYNGDLKGATRLLFSDDTIAPDTPETATALQSKHPPGPSTPLFVDPPSDSTACLQATERDVIAALSSFAKGSASGLDGISPQHLIDLTSHGSGIADEHLIASLTKLVNLMIVGDVCQDVTPVLYGAHLIALRKKDGGIRPIAVGSTFRRLAAKVCVRLTRDKLQSIFEPVQVGFGTRGGCEAAVHAVRTYVQDDQCEVLLKIDVKNAFNSVNRDTLLNEIKVHIPEIYNFLLQCYHCPSKLIYQNNEILSAMGCQQGDPLGPAIFSLAINSIIHNLNSKLNIWYLDDGTISGGWQTVLKDLGDLKDKFKSIGLELNFNKCELYISENVNTSLAFQIHQNFNTLAPNIKILSKENLFLLGSPIFDEAIPPLLSNSFSKFSNHSERLIKISSHSALFILKFCLLIPKFTYLFRCCPIWKFPNLIRPIDLSLKFQTESIINISLSEQAWTQASLPIRYGGLGTRQISSIALPAFLSSIYSTSDLAGKILKVNTTANCEIACLAEAKNAWLAGPNPILPDSPKNQRAWDTIVSDATLNTLIHSSSGKDQARLLAVSRTESGHWLHAYPCPNTGTYIDPNTLRIAAGLRLGADVCEEHACASCGASVNRLGHHGLVCSSGVGRHSRHASVNDILRRALVSANVPAVLEPQIARDDGKRPDGMSLIPWRMGRALVWDATCADTLAASYLSATSRRAGAAADAREQIKIRKYSCLGAQYDFIPFGVETLGPWGQGARGLHKELSKRLREATGDPRAGSFLAQRLSIAIQRGNAACVMGTLPKGPNILSNF

SEQ ID NO: 17929 - protein, 936 aa, Hedya salicella
MQCCEICNKTFQSTKGLHIHQTRIHQVRTFIAVPNSNPQIPITSSTPHQIPLHSLLGQLKPSTPIIKRIPRGARPTVAEALTNAITSCIRDNNEASWRDLLTFSFKILHVNKNSENISLTQKVKNNVLIPTLTTPLSPSKSRSYNLFDKVEEKIYNGDLKGATRLLFSDDTIAPDTPETATALQSKHPPGPSTPLFVDPPSDSTACLQATERDVIAALSSFAKGSASGLDGISPQHLIDLTSHGSGIAGEHLIASLTKLVNLMIVGDVCQDVTPVLYGANLIALRKKDGGIRPIAVGSTFRRLAAKVCVRLTRDKLQSIFEPVQVGFGTRGGCEAAVHAVRTYVQDDQCEVLLKIDVKNAFNSVNRDTLLNEIKVHIPEIYNFLLQCYHCPSKLIYQNNEILSAMGCQQGDPLGPAIFSLAINSIIHNLNSKLNIWYLDDGTISGGWQTVLKDLGDLKDKFKSIGLELNFNKCELYISENVNTSLAFQIHQNFNTLAPNIKILSKENLFLLGSPIFDEAIPPLLSNSFSKFSNHSERLIKISSHSALFILKFCLLIPKFTYLLRCCPIWKFPNLIRPIDLSLKFQIESIINISLSEQAWTQASLPIRYGGLGTRRISSIALPAFLSSIYSTSALAGKILKVNTTANCEIACLAEAMNAWLAGPNPILPDSPKNQRASDTIVSDATLNTLIHSSSGKDQARLLAVSRTESGHWLHAYPCPNTGTYIDPNTLRIAAGLRLGADVCEEHACASCGASVNRLGHHGLVCSSGVGRHSRHASVNDILRRALVSANVPAVLEPQIARDDGKRPDGMSLIPWRMGRALVWDATCADTLAASYLSATSRRAGAAADAREQIKIRKYSCLGAQYDFIPFGVETLGPWGQGARGLHKELSKRLREATGDPRAGSFLAQRLSIAIQRGNAACVMCTLPKGPNILSNF

SEQ ID NO: 17930 - protein, 939 aa, Notocelia uddmanniana
MACCVCQKSFTSTRGLHIHQSRIHQVRILPATPNLNSTNLNISSFSSDSATPLHSLLGRLKQTTLIIKRVPRGARSTVAQALSDSVNNCVRYNSKETWHNLLTFSYKVFHVSQNKENNVSLTQKIKNNIQMANITADLNSLPKSRSRKYDIFEKVEEKIQDGDLKGATRLLFSNDTLAPDTAETTAALLSKHPPGPSTLIFVDPPTDSSACIQATERDIIAALASFPKGSASGLDGISPQHLLDLTSHGTGIAGEHLIKNITKLVNLMLVGDVCQEVTPVIYGANLIALPKKDAGVRPIAVGSTFRRLAAKVCVRLTRSKLQKLFEPIQVGFGTPGGCEAAVHAVRTFAHSNSCEVLLKLDVKNAFNSVNRDTLLNEIKIHAPEIYNFLLQCYHSPSKLMHKSNEILSAMGSQQGDHLGPAIFSLAINSVIHSLNSKLNVWYLDDGTLGGDSQTVLADLIKIKNKFADIGLELNFNKCELYISDKVDPSSASQISQNFNNVTPNIKIMSKDSLHLLGSPIFDDAIPPVLSKSISKFNDHSDRPTKISSHSALFVLKFFLLVPKFTYLLRCCPVWKYPHLAQPIDILIKSQIEHILNIRFSEQAWTQASLPIRYGGLGTRKIISIALPAFLASIHSTSDLAGKILKAPSATNCEISCLVEASNVWLAGPSPNFASRPKIQRAWDTITSISTLKSLIDNAIGRDRARLLAVSKPESGHWLHAYPSPNTGTFIDPSTLRIAVGLRLGAEVCVDHRCTSCGAPVDRLGHHGLACSSGAGRLSRHAALNNIIKRALVSANVPAALEPQIVRSDGKRPDGMSLIPWKKGRALVWDATCADTLAASYLSSTSKRAGAAADSRENSKVGKYNCLGAQYDFVAFGVETLGPWGRGARELHRALGKRLKEATGDPRAGSFLAQRIAIAIQRGNAACVLGTLPRGPDLDL

SEQ ID NO: 17931 - protein, 943 aa, Pammene fasciana
MECCVCQRVFPTQRGLHIHQARIHQVRIALSSPTLPNVPNSSSFPSLLSSTSTTPLQTLLGQLKQSTSIIKRIPRGARSTVSEALTNVINDCVRNNNINSWHVLLTFSYNILHVSEDTHTNISLTQKIKNNILHPTITNPTFFSGAHSKKYDLFGKVEEKVHDGDLKGATRLLFSNDTLAPDTPETAAALHSKHPPGPSTPIFVDPPSDPSACLHATERDVLTALASFPKGSASGLDGISPQHLVDLTSYGSGVAGEHLTTSLTKLVNLMLLGDVCPDVTPIIYGANLIALAKKDGGVRPIAVGSTFRRLAAKICVRLTRTKLQALFEPVQVGFGTRGGCESAVHAVRTFVKGDSCEVLLKLDVKNAFNSVNRDTLLNEIKTHVPEIYNFLLQCYHCPSKLVHKSNEILSAVGCQQGDPLGPAIFSLAINSIIHNLNSKLNVWYLDDGTLGGDAQTVLADLIQIKQKFHNIGLELNFDKCELYIADQINTHPASLIIQNFNNVAQNIKIVPKDSLYLLGSPIFDEAIPLLLSKSTTKFRNYSDRLVKISSHSALFILKFCIFVPKFTYLLRCCPIWKFPHLIQPIDNLMKSQIESILNIHLSEQAWTQAALPIRYGGLGTRKISSIALPAFLSSIHSTSELAGKILKAPTGINCQIACLEEATNAWVAGPSPNFPSKPKRQRAWDSLTSAATLKLLTDTSSGRDMARLLAVSKPESGHWLHAYPSPNTGTFIDPETLRIAVGLRLGAGICTSHICASCGAPVDQLGHHGLSCSSGAGRISRHAALNDILRRALVSANVPAALEPQIVRGDGKRPDGMSLIPWKMGRALVWDATCTDTLAASYLPATCKRAGAAADARERLKVTKYSCLGAQYEFSPFAVETLGPWGKGALGLHKELSKRLREATGDPRAGSFLAQRIAIAIQRGNAACVMGTLPKGPGLVVSF

SEQ ID NO: 17932 - protein, 939 aa, Cydia splendana
MECCVCNKIFSSPRGLHIHQSRIHQVRILPISTSTSRSINLSTPTPSSNATAPLQTLLGQLKQTTPLIKRVPRGARSAVAEALTETINKCVRHNNAEEWYNLLTFSYKVLHVSELQNINISLTQQIRNNTQTPNMPTPNIRPGCNTNKYNLFEKVEEKIHDGDLKGATRLLFSNDTMAPDTPETAAALQSKHPPGPSTPIFVDPPSDPSACLQATDKDILAALLSFPKGSASGLDGISPQHLIDLTNYGSGVTGEHLVSSITKLINLMGDVCQEVTSVIYGANLIALSKKDGGVRPIAVGSTLRRLAAKVCVRLTRKKLQNLFEPIQVGFGTRGGCEAAVHAVRTFVQSDACEVLLKLDVQNAFNSVNRDTLLNEIKMTVPEIYNFLLQCYHCPSKLMHKNNEILSAVGCQQGDPLGPAIFSLTINSIIHSLNSKLNVWYLDDGTLGGDSQTVLADLIQIKNKFKDIGLELNFNKCELYISDNVDSSSASQIIQSFNNIAPSIKNISKDSLHLLGAPIFNEAIPPLLSKSISKFSDYSDRLLKISSHSALFILKFCLLIPKFTYLLRCCPIWKYPHLLRPLDLLLKSQIESILNIRFSEQAWTQATLPIRYGGLGTRKISSVALPAFLASIHSTSDLAGNILKASPATNCEIACLVETSNAWLAGPSQNFPSQPKIQRAWDNIASVSTLNSLLDTATGRDRARLLASSRPESGQWLHAYPSPNTGTFIDPGTLRIAAGLRLGVAVCADHNCASCGSEVDSLGHHGLACSSGAGRLSRHSALNDILRRALVSAGVPAALEPQIVRNDGKRPDGMSLIPWKMGRALVWDATCADTVAASYVPSTSRRAGAAADTRERQKVAKYSCLGAQYEFVAFGVETLGSWGRGAQMLHKALGKRLREATGDPRAGSFLAQRIAIAIQRGNAACVLGTLPRAPNFDRYF

SEQ ID NO: 17933 - protein, 940 aa, Amyelois transitella
MQCCVCARTFTTLRGLHIHQSRIHQVRIIQSTPLPYSANCSNTPSDNTVPLQTLLCQLKHNTPIIKRVPRGARAPVADALSEIINTCVNSNNLESWQKLLTFSFKILHVSENNDNLTLTRKIKNNIASQNLPSNQKFKITTTYSNDISKKVEQKIHDGDLRGATRLLFSNDKIAPDTPETSAALLSKHPPGPSTPLFVDPPTDSSACLHASEKDVKEALASFPKGSASGLDGISPQHLIDLTSYGTGVAGNNVLTSITKLINLMLLGDVCQDVSAVIYGANLIALTKKDGGIRPIAVGSTFRRLAAKVCVRLTRHKLQNLFEPVQVGFGTRGGCEAAVHAVRTFTHSNMCEVLLKLDVKNAFNSVNRDTLLNEIKLHVPELYNFLLQCYHTPSKLVHKYNEIDSATGCQQGDPLGPAIFSLAINSIIHGLNSKLNVWYLDDGTLGGDFKTVLKDLIDIKNKFSNIGLELNFDKCELYISETLNTSLASQIIQNFNNIAPNIKILTKDSLYLLGSPIFDEAIPSLLSKSISKFTDYSDRLTKISSHSALFVLKFCLFIPKLTYLLRCCPIWKYPTLVQPIDQLLKNKIELILNISFGEEAWTQASLPIRNGGLGIRKISCVALPAFLSSIHSTSNLVGNILKVPATTNYEIACLDEATNAWLTGPSPNLPSKLQSQRAWDSISSNFIFSSLLENSFSRDRARLLAVSRPESGHWLHAYPSPALGTFLNPLTLRVAVGLRVGAEVCVDHSCASCGVSVDRLGHHGLACSSGAGRQSRHAALNDILRRALVSADVPVALEPQIVRDDGKRPDGMSLIPWRMGRALVWDATCADTLAASYLPATSKQAGAAADARERFKTNKYSCLGTQYEFVPFGVETLGPWGKGARELHKALSKRLREATGDPRAGSFLAQRIAIAIQRGNAACVMGTLPRGPNLNNNVFSL

SEQ ID NO: 17934 - protein, 967 aa, Bembecia ichneumoniformis
MNQSNGISVIYENGIIFSGKYKPLPLCIKIIKKNIINNSKGLHIHQGRIHQVRITSVPSSQNSSSPSSSPLSSSTSAIPLQTLLGQLKQSTSVVKRIPRGARATVSEALTNAINVCIRNNDDNSWRDLLTFSFQILHVSEQSHSNISLTQKIKNNILNPSLPHPNPSTGVNRKKYDLFGKIEEKIHDGDLKGAIRLLFSNDTLAPDTPETTAALLSKHPPGPSTPFFVDPPSDPSSCLHATERDVLTALASFPKGSASGLDGISPQHLIDLTNYGTGVAGERLTTSLTKLVNLMLLGDVCPDVAPIIYGANLIALTKKDGGVRPIAVGLTFRRLAAKICVRLTRKKLQALFEPTQVGFGTRGGCEAAVHAVRTFVKSDSCEVLLKLDIKNAFNSVNRDTLLNEIRMHVPEIYNFLLQCYHCPSKLLHKSNEILSAVGCQQGDPLGPAIFSLAINSIIHNLNSKLNVWYLDDGTLGGDAQTVLADLVHVKQQFHNIGLELNFDKCELYISDKVDSLTVSQIRQNFNNVALHIKIISKDSLHLLGSPIMEEAIPLLLTKSTSKFSSFSDRLVKISSHSALFILKFCLFVPKFTYLLRCCPIWKFPHLIQPIDSLMKSQIENILNIHISEQAWTQAALPIRNGGLGTRKISSIALPAFLSSIHSTLDLAGKILKAPAGINCVIACLDEATNVWLAGPSPNLPPKPQRQRAWDSIASEATLQSLIESSTGRDRARLLAVSKPESGHWLHAYPSPNTGTFIDPDTLRISVGLRLGAGICTGHNCASCGAPVDRLGHHGLSCSSGAGRLSRHAALNDILRRALVSANVPAALEPQIIRGDGKRPDGMSLIPWRMGRALVWDATCTDTLAASYLPATTKRAGAAADARELFKVSKYSCLGAQYQFIPFGVETLGPWGKGALGLHRDLCKRLREATGDPRAGGFLAQRIAIAIQRGNGACVMETLPRGPRLDFNL

SEQ ID NO: 17935 - protein, 937 aa, Apotomis turbidana
MQCCVVCNKSFQSTKGLHIHQSRTHQVRILSILPHSSSQTPSTSSTSHTLPLNSLLGKLKLSTPLIKRIPRGARSTVAEALSSSITSCIRDNNETSWRDLLTFPFKILHVSKKTDANISLCQKIKSNVSSPTLATPSLSSRPSNYNLYKKVEEKIYDGDLKGATRLLFSDDTIAPDTPETAAALHLKHPPGPSTPIFVDPSSDPTACLQATERDILAALSSFPKGSASGLDGISPQHLIDLTSHGSGVAGEHLTASLTKLVNFMIVGDVCQDVTPVLYGANLIALKKKDGGIRPIAVGSTFRRLAAKVCVRLTRNKLQNIFEPVQVGFGTRGGCEAAVHATRTFVEDDQCEVLLKIDVKNAFNSVNRDALLNEIKVHVPEIYNFLLQCYLCPSKLMHKNYEILSAVGCQQGDPLGPAIFSLAINSIIHNLNSKLNVWYLDDGTLGGDWQTVLKDLSELKIKFNSIGLDLNFDKCELYISQKVNTSLAFQIHQNFNILAPNIKILSKNSLYLLGSPIFDEAIPPLLTNSFSKFNNHSDRLAKISSHSALFILKFCLLVPKFTYLLRCCPIWKFPILVRSIDLTLKFQIESILNISLSEQAWTQASLPIRNGGLGTRTICSIALPAFLSSIHSTSDLAGKILKADMAANCEIACLAEAKNAWLAGPNPILPDAPKKQRAWDTLASDAILESLILNSSGRDRARLLAVSRPESGHWLHAYPCPNAGTYIDPNTLRIAAGLRLGADVCEEHACTACGANANRLGHHGLVCSSGAGRHSRHAALNDILRRALVSVNVPAALEPQIVRDDGKRPDGMSLIPWRMGRALVWDATCADTLAASYLPATSRRAGAAADARERIKVSKYSCLGAQYDFIAFGVETLGPWGQGARGLHRELSKRLREATGDPRAGSFLAQRLSIAIQRGNAACVMGTLPKGLSFINIF

SEQ ID NO: 17936 - protein, 943 aa, Notocelia uddmanniana
MECCVCNKIFSSTRGLHIHQSRIHRVCILPLSISAPSSVSSSTPPPSPNATATAPLQILLGQLKQTTPTIKRVPRGARSAVAEALTDTINKCVRHNNTEEWYNLLTFSYKILHVSEQKNSNISLTQQIKNNIQMPNMPTSNLRPRSRNRKYNLFEKVEEKIHDGDFRGATRLLFSNDTLAPDTPETAAALISKHPPGPSSPIFVDPPSDHSACLQATGKDILTALLSFPKGSASGLDGISPQHLIDLTSHGSGITGEQLISSITKLVNLMLMGDVCQEVTPVIYGANLIALSKKDGGVRPIAVGSTLRRLAAKVCVRLTRKKLENVFEPVQVGFGTRGGCEAAVHAVRTFVHSDACEVLLKLDVQNAFNSVNRDTLLNEIKITVPEIYNFLLQCYHCPSKLMHNNNEILSAVGCQQGDPLGPAIFSLAINSIIHSLNSKLNVWYLDDGTLGGDSQTVLADFFQIKNKFRDIGLELNFNKCELYISDNVESSSASQIIQSFNNIAPNIKTVSKDCLHLLGSPIFNEAIPPLLSRSISKFSDHTERLLKISSHSALFILKFCLLIPKFTYLLRCCPIWKFPHLLQPIDLLLKSQVETILNIRLSEQAWTQASLPIRYGGLGTRKISSIALPAFLASIHSTSDLAGKILQASRATNCEIACMVEASNAWLAGPNQNFPSRPKIQRAWDTIASASTLKSLIDSATGRDRARLLASARPESGQWLHAYPSPNIGTFIDPETLRIAAGLRLGVDLCADHSCACCGSCVDRLGHHGLACSSGAGRLSRHAAINDILRRALVSAGVPAALEPQIVRNDGKRPDGMSLIPWKMGRALVWDATCADTLAASYLPLTSRHAGAAADTRERQKIVKYSCLGAQYEFVAFGVETLGSWGRGAQMLHKVLGKRLREATGEPRAGSFLAQRIAIAIQRGNAACVMGTLPRALNFDRYF

SEQ ID NO: 17937 - protein, 949 aa, Hedya salicella
MQCCVVCQKVFTSTRGLHIHQSRVHQVRVLSVSSHTNSQNPSTSHTIFQNHSSSQASNYAIPLHTLLGQLKQTTPLLKRIPRGARATAAEALAETIIGCARNNNITSWYDLLTFAYKIFHVPENNASNISLTQKIKNNTLTPTIPVPTPLKPHSKKYDLFGKVEEKIHDGDLRGATRLLFSNDTVAPNTPETVAALQSKHPPGPSIPIFVDPPSDPTTCLRATERDIVAALTSFPKGSAPGLDGISPQHLIDLTSHGTGVAGEHLIASLTKLVNLMLLGDVCQDVTPVLYGANLIAFTKKDGGVRPIAVGSTLRRLAAKVCVRLTRSKLQALFEPVQVGFGTRGGCEAAVHAVRTFAHDNLCEVVLKLDVKNAFNSINRDTLLNEIKMHIPEIYNFLLQCYHCPSKLVHKNIEILSAVGCQQGDPLGPAIFSLAINSAIRSLNSKLNVWYLDDGTLGGDFQTVLADLTEIKNKFESIGLEINYNKCELFISNKVNASLASQILQNFNNIAPNIKIVPKESLYLLGSPIFDDAIPSLLNNSVSKFSEHSDRLTKISSHSALFILKFCLLVPKFTYLLRCCPIWKFPNLVKPIDTLLKSQIESIINIRISEQAWTQATLPIRYGGLGIRKISSVALPAFLSSIYSTSDLAGKILKTPTGTNCEISCLIAATNAWLAGPSPNLPAKPKIQRAWDTISSLHSLTVLTNDSSGRDRSRLLAVSRSESGQWLHAYPSPNTGRFIDPSTLRIAIGLRLGADICADHCCASCGAHVDRLGHHGLACSSGAGRRPRHAALNDILRRALVSANVPAVLEPQIIRDDGKRPDGMSLIPWRMGRALVWDATCADTLAASYLPATSKRAGAAADARENSKVGKYSCLGAQYEFVAFGVETLGPWGQGARRLLKCLSKRLREATGDPRAGSFLAQRLAIAIQRGNAACVLGTLPRGPDLSVHF

SEQ ID NO: 17938 - protein, 944 aa, Blastobasis lacticolella
MQHCVVCLRSFNSIKGLHIHQSRVHHARILLCSPCSQSHDSQNNNTPLTNTSTPLHLLLSQLKSSTAIVKRIPRGARSCVASALAECIKRCTRDNNLVSWHDLLTFSYKTLHTSLENKTSLTQQIKNNTSPNTQLPQAAPRRPQHSRHHNDIFSKVEEKVQDGDLKGAARLLFSNDTIAPDSPETATALQSKHPPGPSCPPFVDPPSDIATCLRAKEEDVVAAIATFPAGSASGLDGISPQHLKDLTSHGVGMAGDHVISALTGLVNVMLEGNVCQEVTPILYGANLIALTKKDGGVRPIAVGSTLRRLAAKICVRLTRSKFQSLFEPVQVGFGTRGGCEATVHAVRTFTQDDLCEVILKLDVKNAFNSVHRDTLLNKIKLHVPEIYNFMLQCYHCPSKLLHRNNEILSAVGCQQGDPLGPAIFSLAINSIIHNVKSKLNVWYLDDGTIAGDAQTVLTDLEMVKHNFDLIGLELNFNKCELFISEKIDTTLAQSIIQNFNSVAPNIKILTKDSLSLLGSPIFDEAIPPLLTSSVSKFNEFSDRLLKISSHSALFILKFCLFVPKFTYLLRCCPVWKFPVLIQHLDNVIKFQIESITNIRLSEQAWTQASLPIRYGGLGTRKISSVALPAFLSSIYSSSDLTGNILKAPAATNCEVACLAEAETAWLAGPSPNFPPTPKIQKAWDNISSQVILDTLINISPSLKDRARLEAVARPESGHWLHAYPSPNTGTFIDPTTLRLAIGLRLGAEVCIEHSCGSCGASVDRLGHHGLACSSSAGRLSRHAAINDILRRSLVSANVPAILEPQHIARDDGKRPDGMSMIPWRMGRPLVWDATCADTLAATYLPATAKRAGAAAEIRERSKVGKYSCLGAQYEFVAFGVETLGPWGPGAHSLFMELGKRLREATGDSRAGSFLAQRLSIAIQRGNAAAMMGTLPRGPGFLHLF

SEQ ID NO: 17939 - protein, 944 aa, Blastobasis lacticolella
MQHCVVCLRSFNSIKGLHIHQSRVHHARILLCSPCSQSHDSQNNNTPLTNTSTPLHLLLSQLKSSTAIVKRIPRGARSCVASALAECIKRCTRDNNLVSWHDLLTFSYKTLHTSLENKTSLTQQIKNNTSPNTQLPQAAPRRPQHSRHHNDIFSKVEEKVQDGDLKGAARLLFSNDTIAPDSPETATALQSKHPPGPSCPPFVDPPSDIATCLRAKEEDVVAAIATFPAGSASGLDGISPQHLKDLTSHGVGMAGDHVISALTGLVNVMLEGNVCQEVTPILYGANLIALTKKDGGVRPIAVGSTLRRLAAKICVRLTRSKFQSLFEPVQVGFGTRGGCEATVHAVRTFTQDDLCEVILKLDVKNAFNSVHRDTLLNKIKLHVPEIYNFMLQCYHCPSKLLHRNNEILSAVGCQQGDPLGPAIFSLAINSIIHSVKSKLNVWYLDDGTIAGDAQTVLTDLEMVKHNFDLIGLELNFNKCELFISEKIDTTLAQSIIQNFNSVAPNIKILTKDSLSLLGSPIFDEAIPPLLTSSVSKFNEFSDRLLKISSHSALFILKFCLFVPKFTYLLRCCPVWKFPVLIQHLDNVIKFQIESITNIRLSEQAWTQASLPIRYGGLGTRKISGVALPAFLSSIYSSSDLTGNILKAPAATNCEVTCLAEAETAWLAGPSPNFPPTPKIQKAWDNISSQVILDTLINISPSLKDRARLEAVARPESGHWLHAYPSPNTGTFIDPTTLRLAIGLRLGAEVCIEHSCGSCGASVDRLGHHGLACSSSAGRLSRHAAINDILRRSLVSANVPAILEPQHIARDDGKRPDGMSMIPWRMGRPLVWDATCADTLAATYLPATAKRAGAAAEIRERSKVGKYSCLGAQYEFVAFGVETLGPWGPGAHSLFMELGKRLREATGDSRAGSFLAQRLSIAIQRGNAAAMMGTLPRGPGFLHLF

SEQ ID NO: 17940 - protein, 944 aa, Blastobasis lacticolella
MQHCVVCLRSFNSIKGLHIHQSRVHHARILLCSPCSQSHDSQNNNTPLTNTSTPLHLLLSQLKSSTAIVKRIPRGARSCVASALAECIKRCTRDNNLVSWHDLLTFSYKTLHTSLENKTSLTQQIKNNTSPNTQLPQAAPRRPQHSRHHNDIFSKVEEKVQDGDLKGAARLLFSNDTIAPDSPETATALQSKHPPGPSCPPFVDPPSDIATCLRAKEEDVVAAIATFPAGSASGLDGISPQHLKDLTSHGVGMAGDHVISALTGLVNVMLEGNVCQEVTPILYGANLIALTKKDGGVRPIAVGFTLRRLAAKICVRLTRSKFQSLFEPVQVGFGTRGGCEATVHAVRTFTQDDLCEVILKLDVKNAFNSVNRDTLLNKIKLHVPEIYNFMLQCYHCPSKLLHKNNEILSAVGCQQGDPLGPAIFSLAINSIIHSVKSKLNVWYLDDGTIAGDAQTVLTDLEMVKHNFDLIGLELNFNKCELFISEKIDTTLAQSIIQNFNSVAPNIKILTKDSLSLLGSPIFDEAIPPLLTSSVSKFNEFSDRLLKISSHSALFILKFCIFVPKFTYLLRCCPVWKFPVLIQHLDNVIKFQIESITNIRLSEQAWTQASLPIRYGGLGTRKISSVALPAFLSSIYSSSDLTGNILKAPAATNCEVACLAEAETAWLAGPSPNFPPTPKIQKAWDNISSQVILDTLINISPSLKDRARLEAVARRESGHWLHAYPSPNTGTFIDPTTLRLAIGLRLGAEVCIEHSCDSCGASVDRLGHHGLACSSSAGRLSRHAAINYILRRSLVSANVPAILEPQHIARDDGKRPDGMSMIPWRMGRPLVWDATCADTLAATYLPATAKRAGAAAEIRERSKVGKYSCLGAQYEFVAFGVETLGPWGPGAHSLFMELGKRLREATGDSRAGSFLAQRLSIAIQRGNAAAMMGTLPRGPGFLHLF

SEQ ID NO: 17941 - protein, 944 aa, Blastobasis lacticolella
MQHCVVCLRSFNSIKGLHIHQSRVHHARILLCSPCSQSHDSQNNNTPLTNTSTPLHLLLSQLKSSTAIVKRIPRGARSCVASALAECIKRCTRDNNLVSWHDLLTFSYKTLHTSLENKTSLTQQIKNNTSPNTQLPQAAPRRPQHSRHHNDIFSKVEEKVQDGDLKGAARQLFSNDTIAPDSPETATALQSKHPPGPSCPPFVDPPSDIATCLRAKEEDVVAAIATFPAGSASGLDGISPQHLKDLTSHGVGMAGDHVISALTGLVNVMLEGNVCQEVTPILYGANLIALTKKDGGVRPIAVGSTLRRLAAKICVRLTRSKFQSLFEPVQVGFGTRGGCEATVHAVRTFTQDDLCEVILKLDVKNAFNSVHRDTLLNKIKLHVPEIYNFMLQCYHCPSKLLHRNNEILSAVGCQQGDPLGPAIFSLAINSIIHSVKSKLNVWYLDDGTIAGDAQTVLTDLEMVKHNFDLIGLELNFNKCELFISEKIDTTLAQSIIQNFNSVAPNIKILTKDSLSLLGSPIFDEAIPPLLTSSVSKFNEFSDRLLKISSHSALFILKFCLFVPKFTYLLRCCPVWKFPVLIQHLDNVIKFQIESITNIRLSEQAWTQASLPIRYGGLGTRKISSVALPAFLSSIYSSSDLTGNILKAPAATNCEVACLAEAETAWLAGPSPNFPPTPKIQKAWDNISSQVILDTLINISPSLKDRARLEAVARPESGHWLHAYPSPNTGTFIDPTTLRLAIGLRLGAEVCIEHSCGSCGASVDRLGHHGLACSSSAGRLSRHAAINDILRRSLVSANVPAILEPQHIARDDGKRPDGMSMIPWRMGRPLVWDATCADTLAATYLPATAKRAGAAAEIRERSKVGKYSCLGAQYEFVAFGVETLGPWGPGAHSLFMKLGKRLRGATGDSRAGSFLAQRLSIAIQRGNAAAMMGTLPRGPGFLHLF

SEQ ID NO: 17942 - protein, 940 aa, Blastobasis lacticolella
MQHCVVCLRSFNSIKGLHIHQSRVHRARILLCSPCSQSHDSQNNNTPLTNTSTPLHLLLTQLKSSTAIVKRIPRGARSCVASALAECIKRCTRDNNLVSWHDLLTFSYKTLHTSLENKTSLIQQIKNNTSPNTQLPQAAPRRPQHSRRHNDIFSKVEEKVQDGDLKGAAGLLFSNDTIAPDSPETATALQSKHPPGPSCPPFVDPPSDIATCLRAKEEDVVAAIATFPTGSASGLDGISPQPLKDLTSHGVGMAGDHVISALTGLVNVMLEGNVCQEVTPILYGANLIALTKKDGGVRPIAVGFTLRRLAAKICVRLTRSKFQSLFEPVQVGFGTRGGCEATVHAVRTFTQDDLCEVILKLDVKNAFNSVNRDTLLNKIKLHVPEIYNFMLQCYHCPSKLLHKNNEILSAVGCQQGDPIGPAIFSLAINSIIHSVKSKLNVWYLDDGTIAGDAQTVLTDLEMVKHNFDLIGLELNFNKCELFISEKIDTTLAQSIIQNFNSVAPNIKILTKDSLSLLGSPIFDEAIPPLLKSSISKFNEFSDRLLKISSHSALFILKFCLFVPKFTYLLRCCPVWKFPVLIQHLDNVIKFQIESITNIRLSEQAWTQASLPIRYGGLGTRKISSVALPAFLSSIYSSSDLTGNILKAPAATNCEVACLAEAETAWLAGPSPNFPPTPKIQKAWDNISSQVILDTLLNISPSLKDRARLEAVARPESGHWLHAYPSPNTGTFIDPTTLRLAIGLRLGAEVCIEHSCASCGASVDRLGHHGLACSSSAGRLSRHAAINDILRRSLVSANVPAILEPQHIARDDGKRPDGMSMIPWRMGRPLVWDATCADTLAATYLPATAKRAGAAAEIRERSKVGKYSCLGAQYEFVAFGVETLGPWGPGAHSLFMELGKRLGEATGDSRAGSFLAQRLSIAIQRGNAAAMMGTLPRGPGF

SEQ ID NO: 17943 - protein, 944 aa, Blastobasis lacticolella
MQHCVVCLRSFNSIKGLHIHQSRVHHARILLCSPCSQSHDSQNNNTPLTNTSTPLHLLLSQLKSSTAIVKRIPRGARSCVASALAECIKRCTRDNNLVSWHDLLTFSYKTLHTSLENKTSLTQQIKNNTSPNTLLPQAAPRRPQHSRHHNDIFSKVEEKVQDGDLKGAARLLFSNDTIAPDSPETATALQSKHPPGPSCPPFVDPPSDIATCLRAKEEDVVAAIATFPAGSASGLDGISPQHLKDLTSHGVGMAGDHVISALTGLVNVMLEGNVCQEVTPILYGANLIALTKKDGGVRPIAVGSTLRRLAAKICVRLTRSKFQSLFEPVQVGFGTRGGCEATVHAVRTFTQDDLCEVILKLDVKNAFNSVHRDTLLNKIKLHVPEIYNFMLQCYHCPSKLLHKNNEILSAVGCQQGDPLGPAIFSLAINSIIHSVKSKLNVWYLDDGTIAGDAQTVLTDLEMVKHNFDLIGLELNFNKCELFISEKIDTTLAQSIIQNFNSVAPNIKILTKDSLSLLGSPIFDEAIPPLLTSSVSKFNEFSDRLLKISSHSALFILKFCLFVPKFTYLLRCCPVWKFPVLIQHLDNVIKFQIESITNIRLSEQAWTQASLPIRYGGLGTRKISSVALPAFLSSIYSSSDLTGNILKAPAATNCEVACLAEAETAWLAGPSPNFPPTPKIQKAWDNISSQVILDTLINISPSLKDRARLEAVARPESGHWLHAYPSPNTGTFIDPTTLRLAIGLRLGAEVCIEHSCASCGATVDRLGHHGLACSSSAGRLSRHAAINDILRRSLVSANVPAILEPQHIARDDGKRPDGMSMIPWRMGRPLVWDATCADTLAATYLPATAKRAGAAAEIRERSKVGKYSCLGAQYEFVAFGVETLGPWGPGAHSLFMELGKRLREATGDSRAGSFLAQRLSIAIQRGNAAAMMGTLPRGPGFLHLF

SEQ ID NO: 17944 - protein, 944 aa, Blastobasis lacticolella
MQHCVVCLRSFNSIKGLHIHQSRVHHARILLCSPCSQSHDSQNNNTPLTNTSTPLHLLLSQLKSSTAIVKRIPRGARSCVASALAECIKRCTRDNNLVSWHDLLTFSYKTLHTSLENKTSLTQQIKNNTSPNTQLPQAAPRRPQRSRHHNDIFSKVEEKVQDGDLKGAARLLFSNDTIAPDSPETATALQSKHPPGPSCPPFVDPPSDIATCLRAKEEDVVAAIATFPAGSASGLDGISPQHLKDLTSHGVGMAGDHVISALTGLVNVMLEGNVCQEVTPILYGANLIALTKKDGGVRPIAVGFTLRRLAAKICVRLTRSKFQSLFEPVQVGFGTRGGCEATVHAVRTFTQDDLCEVILKLDVKNAFNSVNRDTLLNKIKLHVPEIYNFMLQCYHCPSKLLHKNNEILSAVGCQQGDPLGPAIFSLAINSIIHSVKSKLNVWYLDDGTIAGDAQTVLTDLEMVKHNFDLIGLELNFNKCELFISEKIDTALAQSIIQNFNSVAPNIKILTKDSLSLLGSPIFDEAIPPLLTSSVSKFNEFSDRLLKISSHSALFILKFCLFVPKFTYLLRCCPVWKFPVLIQHLDNVIKFQIESITNIRLSEQAWTQASLPIRYGGLGTRKISSVALPAFLSSIYSSSDLTGNILKAPAATNCEVACLAEAETAWLAGPSPNFPPTPKIQKAWDNISSQVILDTLLNISPSLKDRARLEAVARPESGHWLHAYPSPNTGTFIDPTTLRLAIGLRLGAEVCIEHSCASCGASVDRLGHHGLACSSSAGRLSRHAAINDILRRSLVSANVPAILEPQHIARDDGKRPDGMSMIPWRMGRPLVWDATCADTLAATYLPATAKRAGAAAEIRERSKVGKYSCLGAQYEFVAFGVETLGPWGPGAHSLFMELGKRLREATGDPRAGSFLAQRLSIAIQRGNAAAMMGTLPRGPGFLHLF

SEQ ID NO: 17945 - protein, 944 aa, Blastobasis lacticolella
MQHCVVCLRSFNSIKGLHIHQSRVHHARILLCSPCSQSHDSQNNNTPLTNTSTPLHLLLSQLKSSTAIVKRIPRGARSCVASALAECIKRCTRDNNLESWHDLLTFSYKTLHTSLENKTSLTQQIKNNTSPNTQLPQAAPRRPQHSRRHNDIFSKVEEKVQDGDLKGAARLLFSNDTIAPDSPETATALQSKHPPGPSCPPFVDPPSDIATCLRAKEEDVVAAIATFPTGSASGLDGISPQHLKDLTSHGVGMAGDHVISALTGLVNVMLEGNVCQEVTPILYGANLIALTKKDGGVRPIAVGFTLRRLAAKICVRLTRSKFQSLFEPVQVGFGTRGGCEATVHAVRTFTQDDLCEVILKLDVKNAFNSVNRDTLLNKIKLHVPEIYNFMLQCYHCPSKLLHKSNEILSAVGCQQGDPLGPAIFSLAINSIIHSVKSKLNVWYLDDGTIAGDAQTVLTDLEMVKHNFDLIGLELNFNKCELFISEKIDTTLAQSIIQNFNSVAPNIKILTKDSLSLLGSPIFDEAIPPLLTSSISKFNEFSDRLLKISSHSALFILKFCLFVPKFTYLLRCCPVWKFPVLIQHLDNVIKFQIESITNIRLSEQAWTQASLPIRYGGLGTRKISSVALPAFLSSIYSSSDLTGNILKAPAATNCEVACLAEAETAWLAGPSPNFPPTPKIQKAWDNISSQVILDTLLNISPSLKDRARLEAVARPESGHWLHAYPSPNTGTFIDPTTLRLAIGLRLGAEVCIEHSCASCGASVDRLGHHGLACSSSAGRLSRHAAINDILRRSLVSANVPAILEPQHIARDDGKRPDGMSMIPWRMGRPLVWDATCADTLAATYLPATAKRAGAAAEIRERSKVGKYSCLGAQYEFVAFGVETLGPWGPGAHSLFMDLGKRLREATGDPRAGSFLAQRLSIAIQRGNAAAMMGTLPRGPGFLHLF

SEQ ID NO: 17946 - protein, 944 aa, Blastobasis lacticolella
MQHCVVCLRSFNSIKGLHIHQSRVHHARILLCSPCSQSHDSQNNNTPLTNTSTPIHLLLSQLKSSTAIVKRIPRGARSCVASALAECIKRCTRDNNLVSWHDLLTFSYKTLHTSLENKTSLTQQIKNNTSPNTQLPQAAPRRPQHSRHHNDIFSKVEEKVQDGDLKGAARLLFSNDTIAPDSPETATALQSKHPPGPSCPPFVDPPSDIATCLGAKEEDVVAAIATFPAGSASGLDGISPQHLKDLTSHGVGMAGDHVISALTGLVNVMLEGNVCQEVTPILYGANLIALTKKDGGVRPIAVGSTLRRLAAKICVRLTRSKFQSLFEPVQVGFGTRGGCEATVHAVRTFTQDDLCEVILKLDVKNAFNSVHRDTLLNKIKLHVPEIYNFMLQCYHCPSKLLHRNNEILSAVGCQQGDPLGPAIFSLAINSIIHSVKSKLNVWYLDDGTIAGDAQTVLTDLEMVKHNFDLIGLELNFNKCELFISEKIDTTLAQSIIQNFNSVAPNIKILTKDSLSLLGSPIFDEAIPPLLTSSVSKFNEFSDRLLKISSHSALFILKFCLFVPKFTYLLRCCPVWKFPVLIQHLDNVIKFQIESITNIRLSEQAWTQASLPIRYGGLGTRKISSVALPAFLSSIYSSSDLTGNILKAPAATNCEVACLAEAETAWLAGPSPNFPPTPKIQKAWDNISSQVILDTLINISPSLKDRARLEAVARPESGHWLHAYPSPNTGTFIDPTTLRLAIGLRLGAEVCIEHSCGSCGASVDRLGHHGLACSSSAGRLSRHAAINDILRRSLVSANVPAILEPQHIARDDGKRPDGMSMIPWRMGRPLVWDATCADTLAATYLPATAKRAGAAAEIRERSKVGKYSCLGAQYEFVAFGVETLGPWGPGAHSLFMELGKRLREATGDSRAGSFLAQRLSIAIQRGNAAAMMGTLPRGPGFLHLF

SEQ ID NO: 17947 - protein, 944 aa, Blastobasis lacticolella
MQHCVVCLRSFNSIKGLHIHQSRVHHARILLCSPCSQSHDSQNNNTPLTNTSTPLHLLLSQLKSSTAIVKRIPRGARSCVASALAECIKRCTRDNNLVSWHDLLTFSYKTLHTSLENKTSLTQQIKNNTSPNTQLPQAAPRRPQHSRRHNDIFSKVEEKVQDGDLKGAARLLFSNDTIAPDSPETATALQSKHRPGPSCPPFVDPPSDIATCLRAKEEDVVAAIATFPTGSASGLDGISPQHLKDLTSHGVGMAGDHVISALTGLVNVMLEGNVCQEVTPILYGANLIALTKKDGGVRPIAVGFTLRRLAAKICVRLTRSKFQSLFEPVQVGFGTRGGCEATVHAVRTFTQDDLCEVILKLDVKNAFNSVNRDTLLNKIKLHVPEIYNFMLQCYHCPSKLLHKNNEILSAVGCQQGDPLGPAIFSLAINSIIHSVKSKLNVWYLDDGTIAGDAQTVLTDLEMVKHNFDLIGLELNFNKCELFISEKIDTTLAQSIIQNFNSVAPNIKILTKDSLSLLGSPIFDEAIPPLLTSSISKFNEFSDRLLKISSHFALFILKFCLFVPKFTYLLRCCPVWKFPVLIQHLDNVIKFQIESITNIRLSEQAWTQASLPIRYGGLGTRKISSVALPAFLSSIYSSSDLTGNILKAPAATNCEVACLAEAETAWLAGPSPNFPPTPKIQKAWDNISSQVILDTLLNISPSLKDRARLEAVARPESGHWLHAYPSPNTGTFIDPTTLRLAIGLRLGAEVCIEHSCASCGASVDRLGHHGLACSSSAGRLSRHAAINDILRRSLVSANVPAILEPQHIARDDGKRPDGMSMIPWRMGRPLVWDATCADTLAATYLPATAKRAGAAAEIRERSKVGKYSCLGAQYEFVAFGVETLGPWGPGAHSLFMELGKRFREATGDPRAGSFLAQRLSIAIQRGNAAAMMGTLPRGPGFLHLF

SEQ ID NO: 17948 - protein, 944 aa, Blastobasis lacticolella
MQHCVVCLRSFNSIKGLHIHQSRVHHARILLCSPCSQSHDSQNNNTPLTNTSTPLHLLLSQLKSSTAIVKRIPRGARSCVASALAECIKRCTRDNNLVSWHDLLTFSYKTLHTSLENKTSLTQQIKNNTSPDTQSPQAAPRRPQHSRRHNDIFSKVEEKVQDGDLKGAARLLFSNDTIAPDSPETATALQSKHPPGPSCPPFVDPPSDIATCLRAKEEDVVAAIATFPTGSASGLDGISPQHLKDLTSHGVGMAGDHVISALTGLVNVMLEGNVCQEVTPILYGANLIALTKKDGGVRPIAVGFTLRRLAAKICVRLTRSKFQSLFEPVQVGFGTRGGCEATVHAVRTFTQDDLCEVILKLDVKNAFNSVNRDTLLNKIKLHVPEIYNFMLQCYHCPSKLLHKNNEILSAVGCQQGDPLGPAIFSLAINSIIHSVKSKLNVWYLDDGTIAGDAQTVLTDLEMVKHNFDLIGLELNFNKCELFISEKIDTTLTKSIIQNFNSVAPNIKILTKDSLSLLGSPIFDEAIPPLLTSSISKFNEFSDRLLKISSHSALFILKFCLFVPKFTYLLRCCPVWKFPVLIQHLDNVIKFQIESITNIRLSEQAWTQASLPIRYGGLGTRKISSVALPAFLSSIYSSSDLTGNILKAPAATNCEVACLAEAETAWLAGPSPNFPPTPKIQKAWDNISSQVILDTLLNISPSLKDRARLEAVARPESGHWLHAYPSPNTGTFIDPTTLRLAIGLRLGAEVCIEHSCASCGASVDRLGHHGLACSSSAGRLSRHAAINDILRRSLVSANVPAILEPQHIARDDGKRPDGMSMIPWRMGRPLVWDATCADTLAATYLPATAKRAGAAAEIRERSKVGKYSCLGAQYDFVAFGVETLGPWGPGAHSLFMELGKRLREATGDSRAGSFLAQRLSIAIQRGNAAAMMGTLPRGPGFLHLF

SEQ ID NO: 17949 - protein, 944 aa, Blastobasis lacticolella
MQHCVVCLRSFNSIKGLHIHQSRVHHARILLCSPCSQSHDSQNNNTPLTNTSTPLHLLLSQLKSSTAIVKRIPRGARSCVAFALAECIKRCTRDNNLVSWHDLLTFSYKTLHTSLENKTSLTQQIKNNTSPNTQLPQAAPRRPQHSRHHNDIFSKVEEKVQDGDLKGAARLLFSNDTIASDSPETATALQSKHPPGPSCPPFVDPPSDIATCLRAKEEDVVAAIATFPAGSASGLDGISPQHLKDLTSHGVGMAGDHVISALTGLVNVMLEGNVCQEVTPILYGANLIALTKKDGGVRPIAVGSTLRRLAAKICVRLTRSKFQSLFEPVQVGFGTRGGCEATVHAVRTFTQDDLCEVILKLDVKNAFNSVHRDTLLNKIKLHVPEIYNFMLQCYHCPSKLLHRNNEILSAVGCQQGDPLGPAIFSLAINSIIHNVKSKLNVWYLDDGTIAGDAQTVLTDLEMVKHNFDLIGLELNFNKCELFISEKIDTTLAQSIIQNFNSVAPNIKILTKDSLSLLGSPIFDEAIPPLLTSSVSKFNEFSDRLLKISSHSALFILKFCLFVPKFTYLLRCCPVWKFPVLIQHLDNVIKFQIESITNIRLSEQAWTQASLPIRYGGLGTRKISSVALPAFLSSIYSSSDLTGNILKAHAATNCEVACLAEAETAWLAGPSPNFPPTPKIQKAWDNISSQVILDTLINISPSLKDRARLEAVARPESGHWLHAYPSPNTGTFIDPTTLRLAIGLRLGAEVCIEHSCGSCGASVDRLGHHGLACSSSAGRLSRHAAINDILRRSLVSANVPAILEPQHIARDDGKRPDGMSMIPWRMGRPLVWDATCADTLAATYLPATAKRAGAAAEIRERSKVGKYSCLGAQYEFVAFGVETLGPWGPGAHSLFMELGKRLREATGDSRAGSFLAQRLSIAIQRGNAAAMMGTLPRGPGFLHLF

SEQ ID NO: 17950 - protein, 944 aa, Blastobasis adustella
MQHCTVCLRSFTSIKGLHIHQSRVHHARIILCPPCSQSPDSQTNNTPLTNTSTPLHSLLSQLKHSTAIVKRIPRGARSCVASALAESIKRCTRDNNFASWHDLLTFSYKTLHASLENKISLTQQIKNNTAPNTQLPQAAPRRPPHSRHNNDIFLKVEEKVQDGDLKGATRLLFSNDSIAPDSPETAAALQSKHPPGPSCPPFVDPPSDIATCLRAKEEDVVAAIASFPAGSASGLDGISPQHLKDLTSHGVGMAGDHVISALTGLVNVMLEGNVCQEVTPILYGANLIALTKKDGGVRPIAVGSTLRRLAAKICVRLTRSKFQSLFEPVQVGFGTRGGCEATVHALRTFTQDDLCEVILKLDVKNAFNSVNRDTLLNKIKLHVPEIYNFMLQCYHCPSKLLHKNNEILSAVGCQQGDPLGPAIFSLAINSIIHSVNSKLNVWYLDDGTIAGDAQTVLTDLEMIIHNFDLIGLELNFNKCELYISEKIDTSLAQSIVQNFNSVAPNIRILTKYSLSLLGSPIFDEAIPPLLSSSVSKFNEFSDRLLKISSHSALFILKFCLFVPKFTYLLRCCPVWKFPDLIKDLDNVIKFQIESITNIRLSEQAWTQASLPIRYGGLGTRKISSVALPAFLSSIHSSSDLTGNILKAPVATNCEVACLAEAETAWLAGPSPNFPPTPKIQKAWDNISSQVVLDTLINNSSSLKDRARLEAVARRESGHWLNAYPSPNTGTFIDPTTLRLAIGLRLGAEVCIDHGCASCGASVDRLGHHGLACSSSAGRLSRHAAINDILRRSLVSANVPAILEPQHIARDDGKRPDGMSMIPWRMGRPLVWDATCADTLAATYLPATAKRAGAAAEMRERSKMGKYSCLGAQYDFVAFGVETLGPWGPGAHSLFRELSKRLREATGDPRAGGFLAQRISIAIQRGNAAAMMGTLPRGPGFLHLF

SEQ ID NO: 17951 - protein, 943 aa, Blastobasis adustella
MQHCAVCLRSFTSIKGLHIHQSRVHHARIILCPPSSQSPDSQTNNTPLTNTSTPLHSLLSQLKHSTAIVKRIPRGARSCVASALAESIKRCTRDNNFASWHDLLTFSYKTLHASLENKISLTQQIKNNTAPHTQLPQAAPRRPPHSRHNNDIFLKVEEKVQDGDLKGATRLLFSNDSIAPDSPETAAALQSKHPPGPSCPPFVDPPSDIATCLRAKEEDVVAAIASFPAGSASGLDGISPQHLKDLTSHGVGMAGDHVISALTGLVNVMLEGNVCQEVTPILYGANLIALTKKDGGVRPIAVGSTLRRLAAKMYVRLTRSKFQSLFEPVQVGFGTRGGCEATVHALRTFTQDDLCEVILKLDVKNAFNSVNRDTLLNKIKLHVPEIYNFMLHCYHCPSKLLHKNNEILSAVGCQQGDPLGPAIFSLAINSIIHSVNSKLNVWYLDDGTIAGDAQTVLTDLEMIIHNFDLIGLELNFNKCELYISEKIDTSLAQSIVQNFNSVAPNIRILTKYSLSLLGSPIFDEAIPPLLTSSVSKFNEFSDRLLKISSHSALFILKFCLFVPKFTYLLRCCPVWKFPDLIKDLDNVKKFQIESITNIRLSEQAWTQASLPIRYGGLGTRKISSVALPAFLSSINSSSDLTGNILKAPVATNCEVACLAQAETAWLAGPSPNFPPTPKIQKAWDNISSQVVLDTVINNSSSLKDRARLEAVARRESGHWLNAYPSPNTGTFIDPTTLRLAIGLRLGAEVCIDHGCASCGASVDRLGHHGLACSSSAGRLSRHAAINDILRRSLVSANVPAILEPQHIARDDGKRPDGMSMIPWRMGRPLVWDATCADTLAATYLPATAKRAGAAEMREHSKMGKYSCLGAQYDFVAFGVETLGPWGPGAHSLFRELSKRLREATGDPRAGGFLAQRISSAIQRGNAAAMMGTLPRGPGFLHLF

SEQ ID NO: 17952 - protein, 944 aa, Blastobasis lacticolella
MQHCVVCLRSFNSIKGLHIHQSRVHHARILLCSPCSQSHDSQNNNTPLTNTSTPLHLLLSQLKSSTAIVKRIPCGARSCVASALAECIKRCTRDNNLVSWHDLLTFSYKTLHTSLENKTSLTQQIKNNTSPNTQLPQAAPRRPQHSRHHNDIFSKVEEKVQDGDLKGAARLLFSNDTIAPDSPETATALQSKHPPGPSCPPFVDPPSDIATCLRAKEEDVVAAIATFPAGSASGLDGISPQHLKDLTSHGVGMAGDHVISALTGLVNVMLEGNVCQEVTPILYGANLIALTKKDGGVRPIAVGFTLRRLAAKICVRLTRSKFQSLFEPVQVGFGTRGGCEATVHAVRTFTQDDLCEVILKLDVKNAFNSVNRDTLLNKIKLHVPEIYNFMLQCYHCPSKLLHKNNEILSAVGCQQGDPLGPAIFSLAINSIIHSVKSKLNVWYLDDGTIAGDAQTVLTDLEMVKHNFDLIGLELNFNKCELFISEKIDTTLAQSIIQNFNSVAPNIKILTKDSLSLLGSPIFDEAIPPLLTSSVSKFNEFSDRLLKISSHSALFILKFCLFVPKFTYLLRCCPVWKFPVLIQHLDNVIKFQIESITNIRLSEQAWTQASLPIRYGGLGTRKISSVALPAFLSSIYSSSDLTGNILKAPAATNCEVACLAEAETAWLAGPSPNFPPTPKIQKAWDNISSQVILDTLINISPSLKDRARLEAVARRESGHWLHAYPSPNTGTFIDPTTLRLAIGLRLGAEVCIEHSCASCGASVDRLGHHGLACSSSAGRLSRHAAINDILRRSLVSANVPAILEPQHIARDDGKRPDGMSMIPWRMGRPLVWDATCADTLAATYLPATAKRAGAAAEIRERSKVGKYSCLGAQYEFVAFGVETLGPWGPGAHSLFMELGKRLREATGDPRAGSFLAQRLSIAIQRGNAAAMMGTLPRGPGFLHLF

SEQ ID NO: 17953 - protein, 944 aa, Blastobasis lacticolella
MQHCVVCLRSFNSIKGLHIHQSRVHHARILLCSPCSQSHDSQNNNTPLTNTSTPLHLLLSQLKSSTAIVKRIPRGARSCVASALAECIKRCTRDNNLVSWHDLLTFSYKTLHTSLENKTSLTQQIKNNTSPNTQLPQAAPRRPQHSRRHNDIFSKVEEKVQDGDLKGAARLLFSNDTIAPDSPETATALQSKHPPGPSCPPFVDPPSDIATCLRAKEEDVVAAIATFPTGSASGLDGISPQHLKDLTSHGVGMASDHVISALTGLVNVMLEGNVCQEVTPILYGANLIALTKKDGGVRPIAVGFTLRRLAAKICVRLTRSKFQSLFEPVQVGFGTRGGCEATVHAVRTFTQDDLCEVILKLDVKNAFNSVNRDTLLNKIKLHVPEIYNFMLQCYHCPSKLLHKNNEILSAVGCQQGDPLGPAIFSLAINSIIHSVKSKLNVWYLDDGTIAGDAQTVLTDLEMVKHNFDLIGMELNFNKCELFISEKIDTTLAQSIIQNFNSVAPNIKILTKDSLSLLGSPIFDEAIPPLLTSSISKFNEFSDRLLKISSHSALFILKFCLFVPKFTYLLRCCPVWKFPVLIQHLDNVIKFQIESITNIRLSEQAWTQASLPIRYGGLGTRKISSVALPAFLSSIYSSSDLTGNILKAPAATNCEVACLAEAETAWLAGPSPNFPPTPKIQKPWDNISSQVILDTLLNISPSLKDRARLEAVARPESGHWLHAYPSPNTGTFIDPTTLRLAIGLRLGAEVCIEHSCASCGASVDRLGHHGLACSSSSGRLSRHAAINDILRRSLVSANVPAILEPQHIARDDGKRPDGMSMIPWRMGRPLVWDATCADTLAATYLPATAKRAGAAAEIRERSKVGKYSCLGAQYEFVAFGVETLGPWGPGAHSLFMELGKRLREATGDPRAGSFLAQRLSIAIQRGNAAAMMGTLPRGPGFLHLF

SEQ ID NO: 17954 - protein, 944 aa, Blastobasis lacticolella
MQHCVVCLRSFNSIKGLHIHQSRVHHARILLCSPCSQSHDSQNNNTPLTNTSTPLHLLLSQLKSSTAIVKRIPRGARSCVASALAECIKRCTRDNNLVSWHDLLTFSYKTLHTSLENKTSLTQQIKNNTSPNTQLPQAAPRRPQHSRHHNDIFSKVEEKVQDGDLKGAARLLFSNDTIAPDSPETATALQSKHPPGPSCPPFVDPPSDIATCLRAKEEDVVAAIATFPAGSASGLDGISPQHLKDLTSHGVGMAGDHVISALTGLVNVMLEGNVCQEVTPILYGANLIALTKKDGGVRPIAVGSTLRRLAAKICVRLTRSKFQYLFEPVQVGFGTRGGCEATVHAVRTFTQDNLCEVILKLDVKNAFNSVHRDTLLNKIKLHVPEIYNFMLQCYHCPSKLLHRNNEILSAVGCQQGDPLGPAIFSLAINSIIHSVKSKLNVWYLDDGTIAGDAQTVLTDLEMVKHNFDLIGLELNFNKCELFISEKIETTLAQSIIQNFNSVAPNIKILTKDSLSLLGSPIFDEAIPPLLTSSVSKFNEFSDRLLKISSHSALFILKFCLFVPKFTYLLRCCPVWKFPVLIQHLDNVIKFQIESITNIRLSEQAWTQASLPIRYGGLGTRKISSVALPAFLSSIYSSSDLTGNILKAPAATNCEVACLAEAETAWLAGPSPNFPPTPKIQKAWDNISSQVILDTLINISPSLKDRARLEAVARPESGHWLHAYPSPNTGTFIDPTTLRLAIGLRLGAEVCIEHSCGSCGASVDRLGHHGLACSSSAGRLSRHAAINDILRRSLVSANVPAILEPQHIARDDGKRPDGMSMIPWRMGRPLVWDATCADTLAATYLPATAKRAGAAAEIRERSKVGKYSCLGAQYEFVAFGVETLGPWGPGAHSLFMELGKRLREATGDSRAGSFLAQRLSIAIQRGNAAAMMGTLPRGPGFLHLF

SEQ ID NO: 17955 - protein, 944 aa, Blastobasis lacticolella
MQHCVVCLRSFNSIKGLHIHQSRVHHARILLCSPCSQSHDSQNNNTPLTNTSTPLHLLLSQLKSSTAIVKRIPRGARSCVASALAECIKRCTRDNNLVSWHDLLTFSYKTLHTSLENKTSLTQQIKNNTSPNTQLPQAAPRRPQHSRRHNDIFSKVEEKVQDGDLKGAARLLFSNDTIAPDSPETATALQSKHPPGPSCPPFVDPPSDIATCLRAKEEDVVAAIATFPTGSASGLDGISPQHLKDLTSHGVGMASDHVISALTGLVNVMLEGNVCQEVTPILYGANLIALTKKDGGVRPIAVGFTLRRLAAKICVRLTRSKFQSLFEPVQVGFGTRGGCEATVHAVRTFTQDDLCEVILKLDVKNAFNSVNRDTLLNKIKLHVPEIYNFMLQCYHCPSKLLHKNNEILSAVGCQQGDPLGPAIFSLAINSIIHSVKSKLNVWYLDDGTIAGDAQTVLTDLEMVKHNFDLIGLELNFNKCELFISEKIDTTLAQSIIQNFNSVAPNIKILTKDSLSLLGSPIFDEAIPPLLTSSISKFNEFSDRLLKISSHSALFILKFCLFVPKFTYLLRCCPVWKFPVLIQHLDNVIKFQIESITNIRLSEQAWTQASLPIRYGGLGTRKISSVALPAFLSSIYSSSDLTGNILKAPAATNCEVACLAEAETAWLAGPSPNFPPTPKIQKPWDNISSQVILDTLLNISPSLKDRARLEAVARPESGHWLHAYPSPNTGTFIDPTTLRLAIGLRLGAEVCIEHSCASCGASVDRLGHHGLACSSSSGRLSRHAAINDILRRSLVSANVPAILEPQHIARDDGKRPDGMSMIPWRMGRPLVWDATCADTLAATYLPATAKRAGAAAEIRERSKVGKYSCLGAQYEFVAFGVETLGPWGPGAHSLFMELGKRLREATGDPRAGSFLAQRLSIAIQRGNAAAMMGTLPRGPGFLHLF

SEQ ID NO: 17956 - protein, 944 aa, Blastobasis adustella
MQHCAVCLRSFTSIKGLHIHQSRVHHARIILCPPCSQSPDSQTNNTPLTNTSTPLHSLLNQLKHFTAIVKRIPRGARSCVASALAESIKRYTRDNNFASWHDLLTFSYKTLHASLENKISLTQQIKNNTAPNTQLPQAAPRRPPHSRHNNDIFLKVEEKVQDGDLKSATQLLFSNNSIAPDSPETAAARQSKHPPGPSCPPFVDPPSDIATCLRAKEEDVVAAIASFPAGSASGLDGISPQHLKDLTSHGVGMAGDHVISALTGLVNVMLEGNVCQEVTPILYGANLIALTKKDGGVRPIAVGSTLRRLAAKICVRLTRSKFQSLFEPVQVGFGTRGGCEATVHALRTFTQDDLCEVILKLDVKNAFNSVNRDTLLNKIKLHVPEIYNFMLQCYHCPSKLLHKNNEILSAVGCQQGDPLGSAIFSLAINSIIHSVNSKLNVWYLDDGTIAGDAQTVLTDLEMIIHNFDLIGLELNFNKCELYISEKIDSSLAQSIFHNFNSVAPNIRILTKYSLSLLGSPIFDEAIPPLLTSSVSKFNEFSDRLLKISSHSALFILKFCLFVPKFTYLLRCCPVWKFPDLIKDLDNIIKFQIESITNIRLSEQAWTQASLPIRYGGLGTRKISSVALPAFLSSIHSSSDLTGNILKAPVATNCEVACLAEAETAWPAGPSPNFPPTPKIQKAWDNISSQIVLDTLINNSSSLKDRARLEAVARRESGHWLNAYPSPNTGPFIDPTTLRLAIGLKLGAEVCIGHGCASCGASVDRLGHHGLACSSSAGRLSRHAAINDILRRSLVSANVPAILEPQHIARDDGKRPDGMSMIPWRMGRPLVWDATCADTLAATYLPATAKRAGAAAEMRERLKMGKYSCLGAQYDFVAFGVETLGPWGPGAHSLFRELSKRLREATGDPRAGGFLTQRISIAIQRGNAAAMMGTLPQGPGFLHIF

SEQ ID NO: 17957 - protein, 944 aa, Blastobasis lacticolella
MQHCVVCLRSFNSIKGLHIHQSRVHHARILLCSPCSQSHDSQNNNTPLTNTSTPLHLLLSQLKSSTAIVKRIPRGARSCVASALAECIKRCTRDNNLVSWHDLLTFSYKTLHTSLENKTSLTQQIKNNTSPNTQLPQAAPRRPQHSRRHNDIFSKVEEKVQDGDLKGAARLLFSNDTIAPDSPETATALQSKHPPGPSCPPFVDPPSDIATCLRAKEEDVVAAIATFPTGSASGLDGISPQHLKDLTSHGVGMASDHVISALTGLVNVMLEGNVCQEVTPILYGANLIALTKKDGGVRPIAVGFTLRRLAAKICVRLTRSKFQSLFEPVQVGFGTRGGCEATVHAVRTFTQDDLCEVILKLDVKNAFNSVNRDTLLNKIKLHVPEIYNFMLQCYHCPSKLLHKNNEILSAVGCQQGDPLGPAIFSLAINSIIHSVKSKLNVWYLDDGTIAGDAQTVLTDLEMVKHNFDLIGLELNFNKCELFISEKIDTTLAQSIIQNFNSVAPNIKILTKDSLSLLGSPIFDEAIPPLLTSSISKFNEFSDRLLKISSHSALFILKFCLFVPKFTYLLRCCPVWKFPVLIQHLDNVIKFQIESITNIRLSEQAWTQASLPIRYGGLGTRKISSVALPAFLSSIYSSSDLTGNILKAPAATNCEVACLAEAETAWLAGPSPNFPPTPKIQKPWDNISSQVILDTLLNISPSLKDRARLEAVARPESGHWLHAYPSPNTGTFIDPTTLRLAIGLRLGAEVCIEHSCASCGASVDRLGHHGLACSSSSGRLSRHAAINDILRRSLVSANVPAILEPQHIARDDGKRPDGMSMIPWRMGRPLVWDATCADTLAATYLPATAKRAGAAAEIRERSKVGKYSCLGAQYEFVAFGVETLGPWGPGAHSLFMELGKRLREATGDPRPGSFLAQRLSIAIQRGNAAAMMGTLPRGPGFLHLF

SEQ ID NO: 17958 - protein, 944 aa, Blastobasis adustella
MQHCTVCLRSFTSIKGLHIHQSRVHHARIILCPPCSQSPDSQTNNTPLTNTSTPLHSLLSQLKHSTAIVKRIPRGARSCVASALAESIKRCTRDNNFASWHDLLTFSYKTLHASLENKISLTQQIKNNTAPNTQLPQAAPRRPPHSRHNNDIFLKVEEKVQDGDLKGATRLLFSNDSIAPDSPETAAALQSKHPPGPSCPPFVDPPSDIATCLCAKEEDVVAAIASFPAGSASGLDGISPQHLKDLTSHGVGMAGDHVISALTGLVNVMLEGNVCQEVTPILYGANLIALTKKDGGVRPIAVGSTLRRLAAKICVRLTRSKFQSLFEPVQVGFGTRGGCEATVHALRTFTQDDLCEVILKLDVKNAFNSVNRDTFLNKIKLHVPEIYNFMLQCYHCPSKLLHKNNEILSAVGCQQGDPLGPAIFSLAINSIIHSVNSKLNVWYLDDGTIAGDAQTVLTDLEMIIHNFDLIGLELNFNKCELYISEKIDTSLAQSIVQNFNSVAPNIRILTKYSLSLLGSPIFDEAIPPLLTSSVSKFNEFSDRLLKISSHSALFILKFCLFVPKFTYLLRCCPVWKFPDLIKDLDNVIKFQIESITNIRLSEQAWTQASLPIRYGGLGTRKTSSVALPAFLSSIHSSSDLTGNILKAPVATNCEVACLAEAETAWLAGPSPNFPPTPKIQKAWDIISSQVVLDTLINNSSSLKDRARLEAVARRESGHWLNAYPSPNTGTFIDPTTLRLAIGLRLGAEVCIDHGCASCGASVDRLGHYGLACSSSAGRLSRHAAINDILRRSLVSANVPAILEPQHIARDDGKRPDGMSMIPWRMGRPLVWDATCADTLAATYLPATAKRAGAAAEMRERSKMGKYSCLGAQYDFVAFGVETLGPWGPGAHSLFRELSKRLREATGDPRAGGFLAQRISIAIQRGNAAAMMGTLPRGPGFLHFF

SEQ ID NO: 17959 - protein, 944 aa, Blastobasis lacticolella
MQDCVVCLRSFNSIKGLHIHQSRIHHARILLCSPCSQSHGSQNNNTPLTNTSTPLHLLLSQLKSSTAIVKRIPRGARSCVASALAECIKRCTRDNNLVSWHDLLTFSYKTLHTSLENKTSLTQQIKNNTSPNTQLPQAAPRRPQHSRRHNDIFSKVEEKVQDGDLKGAARLLFSNDTIAPDSPETATALQSKHPPGPSCPPFVDPPSDIATCLRAKEEDVVAAIATFPTGSASGLDGISPQHLKDLTSHGVGMAGDHVISALTGLVNVMLEGNVCQEVTPILYGANLIALTKKDGGVRPIAVGFTLRRLAAKICVRLTRSKFQSLFEPVQVGFGTRGGCEATVHAVRTFTQDDLCEVILKLDVKNAFNSINRDTLLNKIKLHVPEIYNFMLQCYHCPSKLLHKNNEILSAVGCQQGDPLGPAIFSLAINSIIHSVKSKLNVWYLDDGTIAGDAQTVLTDLEMVKHNFDLIGLELNFNKCELFISEKIDTTLAQSIIQNFNSVAPNIKILTKDSLSLLGSPIFDEAIPPLLTSSISKFNEFSDRLLKISSHSALFILKFCLFVPKFTYLLRCCPVWKFPVLIQHLDNVIKFQIESITNIRLSEQAWTQASLPIRYGGLGTRKISSVALPAFLSSIYSSSDLTGNILKAPAATNCEVACLAEAETAWLAGPSPNFPPTPKIQKAWDNISSQVILDTLLNISPSLKDRARLEAVARPESGHWLHAYPSPNTGTFIDPTTLRLAIGLRLGAEVCIEHSCASCGASVDRLGHHGLACSSSAGRLSRHAAINDILRRSLVSANVPAILEPQHIARDDGKRPDGMSMIPWRMGRPLVWDATCADTLAATYLPATAKRAGAAAEIRERSKVGKYSCLGAQYEFVAFGVETLGPWGPGAHSLFMELGKRLREATGDPRAGSFLAQRLSIAIQRGNAAAMMGTLPRGPGFLHLF

SEQ ID NO: 17960 - protein, 944 aa, Blastobasis lacticolella
MQHCVVCLRSFNSIKGLHIHQSRVHHARILLCSPCSQSHDSQNNNTPLTNTSTPLHLLLSQLKSSTAIVKRIPRGARSCVASALAECIKRCTRDNNLVSWHDLLTFSYKTLHTSLENKTSLTQQIKNNTSPNTQLPQAAPRRPQHSRRHNDIFSKVEEKVQDRDLKGAARLLFSNDTIAPDSPETATALQSKQPPGPSCPPFVDPPSDIATCLRAKEEDVVAAIATFPAGSASGLDGISPQHLKDLTSHGVGMAGDHVISALTGLVNVMLEGNVCQEVTSILYGANLIALTKKDGGVRPIAVGFTLRRLAAKICVRLTRSKFQSLFEPVQVGFGTRGGCEATVHAVRTFTQDDLCEVILKLDVKNAFNSVNRDTLLNKIKLHVPEIYNFMLQCYHCPSKLLHKNNEILSAVGCQQGDPLGPAIFSLAINSIIHSVKSKLNVWYLDDGTIAGDAQTVLTDLEMVKHNFDLIGLELNFNKCELFISEKIDTTLTKSIIQNFNSVAPNIKILTKDGLSLLGSPIFDEAIPPLLTSSISKFNEFSDRLLKISSHSALFILKFCLFVPKFTYLLRCCPVWKFPVLIQHLDNVIKFQIESITNIRLSEQAWTQASLPIRYGGLGTRKISSVALPAFLSSIYSSSDLTGNILKAPAATNCEVACLAEAETAWLAGPSPNFPPTPKIQEAWDNISSQVILDTLLNISPSLKDRARLEAVARPESGHWLHAYPSPNTGTFIDPTTLRLAIGLRLGAEVCIEHSCASCGASVDRLGHHGLACSSSAGRLSRHAAINDILRRSLVSANVPAILEPQHIARDDGKRPDGMSMIPWRMGRPLVWDATCADTLAATYLPATAKRAGAAAEIRERSKVGKYSCLGAQYEFVAFGVETLGPWGPGAHSLFMELGKRLREATGDSRAGSFLAQRLSIAIQRGNAAAMMGTLPRGPGFLHLF

SEQ ID NO: 17961 - protein, 944 aa, Blastobasis lacticolella
MQDCVVCLRSFNSIKGLHIHQSRVHHARILLCSPCSQSHDSQNNNTPLTNTSTPLHLLLSQLKSSTAIVKRIPRGARSCVASGLAECIKRCTRDNNLVSWHDLLTFSYKTLHTSLENKTSLTQQIKNNTSPNTQLPQAAPRRPQHSRRHNDLFSKVEEKVQDGDLKGAARLLFSNDTIAPDSPETATALQSKHPPGPSCPPFVDPPSDIATCLRAKEEDVVAAIATFPTGSASGLDGISPQHLKDLTSHGVGMAGDHVISALTGLVNVMLEGNVCQEVTPILYGANLIALTKKDGGVRPIAVGFTLRRLAAKICVRLTRSKFQSLFEPVQVGFGTRGGCEATVHAVRTFTQDDLCEVILKLDVKNAFNSVNRDTLLNKIKLHVPEIYNFMLQCYHCPSKLLHKNNEILSAVGCQQGDPLGPAIFSLAINSIIHSVKSKLNVWYLDDGTIAGDAQTVLTDLEMVKHNFDLIGLELNFNKCELFISEKIDTTLAQSIIQNFNSVAPNIKILTKDSLSLLGSPIFDEAIPPLLTSSISKFNEFSDRLLKISSHSALFILKFCLFVPKFTYLLRCCPVWKFPVLIQHLDNVLKFQIESITNIRLSEQAWTQASLPIRYGGLGTRKISSVALPAFLSSIYSSSDLTGNILKAPAVTNCEVACLAEAETAWLAGPSPNFPPTPKIQKAWDNISSQVILDTLLNISPSLKDRARLEAVARPESGHWLHAYPSPNTGTFIDPTTLRLAIGLRLGAEVCMEHSCASCGASVDRLGHHGLACSSSAGRLSRHAAINDILRRSLVSANVPAILEPQHIARDDGKRPDGMSMIPWRMGRPLVWDATCADTLAATYLPATAKRAGAAAEIRERSKVGKYSCLGAQYEFVAFGVETLGPWGPGAHSLFMELGKRLREATGDPRAGSFLAQRLSIAIQRGNAAAMMGTLPRGPGFLHLF

SEQ ID NO: 17962 - protein, 944 aa, Blastobasis lacticolella
MQHCVVCLRSFNSIKGLHIHQSRVHHARILLCSPCSQSHDSQNNNTPLTNTSTPLHLLLSQLKSSTAIVKRIPRGARSCVASALAECIKRCTRDNNLVSWHDLLTFSYKTLHTSLENKTSLTQQIKNNTSPNTQLPQAAPRRPQHSKRHNDIFSKVEEKVQDGDLKGAARLLFSNDTIAPDSPETATALQSKHPPGPSCPPFVNPPSDIATCLRAKEEDVVAAIATFPTGSASGLDGISPQHLKDLTSHGVGMAGDHVISALTGLVNVMLEGNVCQEVTPILYGANLIALTKKDGGVRPIAVGFTLRRLAAKICVRLTRSKFQSLFEPVQVGFGTRGGCEATVHAVRTFTQDDLCEVILKLDVKNAFNSVNRDTLLNKIKLHVPEIYNFMLQCYHCPSKLLHKNNEILSAVGCQQGDPLGPAIFSLAINSIIHSVKSKLNVWYLDDGTIAGDAQTVLTDLEMVKHNFDLIGLELNFNKCELFISEKIDTTLAQSIIQNFNSVAPNIKILTKDSLSLLGSPIFDEAIPPLLTSSISKFNEFSDRLLKISSHSALFILKFCLFVPKFTYLLRCCPVWKFPVLIQHLDNVIKFQIESITNIRLSEQAWTQASLPIRYGGLGTRKISSVALPAFLSSIYSSSDLTGNILKAPAATNCEVACLAEAETAWLAGPSPNFPPTPKIQKAWDNISSQVILDTLLNISPSLKDRARLEAVARPESGHWLHAYPSPNTGTFIDPTTLRLAIGLRLGAEVCIEHSCASCGASVDRLGHHGLACSSSAGRLSRHAAINDILRRSLVSANVPAILEPQHIARDDGKRPDGMSMIPWRMGRPLVWDATCADTLAATYLPATAKRAGAAAEIRERSKVGKYSCLGAQYEFVAFGVETLGPWGPGAHSLFMELGKRLREATGDPRAGSFLAQRLSIAIQRGNAAAMMGTLPRGPGFLHLF

SEQ ID NO: 17963 - protein, 944 aa, Blastobasis adustella
MQHCTVCLRSFTSIKGLHIHQSRVHHARIILCPPCSQSPDSQTNNTPLTNTSTPLHSLLSQLKHSTAIVKRIPRGARSCVASALAESIKRCTRDNNFASWHDLLTFSYKTLHASLENKISLTQQIKNNTAPNTQLPQAAPRRPPHSRHNNDIFLKVEEKVQDGDLKGATRLLFSNDSIAPDSPETAAALQSKHPPGPSCPPFVDPPSDIATCLRAKEEDVVAAIASFPAGSASGLDGISPQHLKDLTSHGVGMAGDHVISALTGLVNVMLEGNVCQEVTPILYGANLIALTKKDGGVRPIAVGSTLRRLAAKICVRLTRSKFQSLFEPVQVGFGTRGGCEATVHALRTFTQDDLCEVILKLDVKNAFNSVNRDTLLNKIKLHVPEIYNFMLQCYHCPSKLLHKNNEILSAVGCQQGDPLGPAIFSLAINSIIHSVNSKLNVWYLDDGTIAGDAQTVLTDLEMIIHNFDLIGLELNFNKCELYISEKIDTSLAQSIVQNFNSVAPNIRILTKYSLSLLGSPIFDEAIPPLLSSSVSKFNEFSDRLLKISSHSALFILKFCLFVPKFTYLLRCCPVWKFPDLIKDLDNVIKFQIESITNIRLSEQAWTQASLPIRYGGLGTRKISSVALPAFLSSIHSSSDLTGNILKAPVATNCEVACLSEAETAWLAGPSPNFPPTPKIQKAWDNISSQVVLDTLINNSSSLKDRARLEAVARRESGHWLNAYPSPNTGTFIDPTTLRLAIGLRLGAEVCIDHGCASCGASVDRLGHHGLACSSSAGRLSRHAAINDILRRSLVSANVPAILEPQHIARDDGKRPDGMSMIPWRMGRPLVWDATCADTLAATYLPATAKRAGAAAEMRERSKMGKYSCLGAQYDFVAFGVETLGPWGPGAHSLFRELSKRLREATGDPRAGGFLAQRISIAIQRGNAAAMMGTLPRGPGFLHLF

SEQ ID NO: 17964 - protein, 944 aa, Blastobasis lacticolella
MQHCVVCLRSFNSIKGLHIHQSRVHHARILLCSPCSQSHDSQNNNTPLTNTSTPLHLLLSQLKSSTAIVKRIPRGARSCVASALAECIKRCTRDNNLVSWHDLFTFSYKTLHTSLENKISLTQQIKNNTSPNTQLPQAAPRRPQHSRHHNDIFSKVEEKVQDGDLKGAARLLFSNDTIAPDSPETATALQSKHPPGPSCPPFVDPPSDIATCLRAKEEDVVAAIATFPAGSASGLDGISPQHLKDLTSHGVGMAGDHVISALTGLVNVMLEGNVCQEVTPILYGANLIALTKKDGGVRPIAVGFTLRRLAAKICVRLTRSKFQSLFEPVQVGFGTRGGCEATVHAVRTFTQDDLCEVILKLDVKNAFNSVNRDTLLNKIKLHVPEIYNFMLQCYHCPSKLLHKNNEILSAVGCQQGDPLGPAIFSLAINSIIHSVKSKLNVWYLDDGTIAGDAQTVLTDLEMVKHNFDLIGLELNFNKCELFISEKIDTTLAQSIIQNFNSVAPNIKILTKDSLSLLGSPIFDEAIPPLLTSSVSKFNEFSDRLLKISSHSALFILKFCLFVPKFTYLLRCCPVFKFPVLIQNLDNVIKFQIESITNIRLSEQAWTQASLPIRYGGLGTRKISSIALPAFLSSIYSSSDLTGNILKAPAATNCEVACLAEAETAWLAGPSPNFPPTPKIQKAWDNISSQVILDTLINISPSLKDRARLEAVARRESGHWLHAYPSPNTGTFIDPTTLRLAIGLRLGAEVCIEHSCASCGASVDRLGHHGLACSSSAGRLSRHAAINDILRRSLVSANVPAILEPQHIARDDGKRPDGMSMIPWRMGRPLVWDATCADTLAATYLPATAKRAGAAAEIRERSKVGKYSCLGAQYEFVAFGVETLGPWGPGAHSLFMELGKRLREATGDSRAGGFLAQRLSIAIQRGNAAAMMGTLPRGPGFLHLF

SEQ ID NO: 17965 - protein, 944 aa, Blastobasis lacticolella
MQDCVVCLRSFNSIKGLHIHQSRVHHARILLCSPCSQSHDSQNNNTPLTNTSTPLHLLLSQLKSSTAIVKRIPRGARSCVASALAECIKRCTRDNNLVSWHDLLTFSYKTLHTSLENKTSLTQQIKNNTSPNTQLPQAAPRRPQHSRRHNDIFSKVEEKVQDGDLKGAARLLFSNDTIAPDSPETATALQSKHPPGPSCPPFVDPPSDIATCLRAKEEDVVAAIATFPTGSASGLDGISPQHLKDLTSHGVGMAGDHVISALTGLVNVMLEGNVCQEVTPILYGANLIALTKKDGGVRPIAVGFTLRRLAAKICVRLTRSKFQSLFEPVQVGFGTRGGCEATVHAVRTFTQDDLCEVILKLDVKNAFNSVHRDTLLNKIKLHVPEIYNFMLQCYHCPSKLLHKNNEILSAVGCQQGDPLGPAIFSLAINSIIHSVKSKLNVWYLDDGTIAGDAQTVLTDLEMVKHNFDLIGLELNFNKCELFISEKIDTTLAQSIIQNFNSVAPNIKILTKDSLSLLGSPIFDEAIPPLLTSSISKFNEFSDRLLKISSHSALFILKFCLFVPKFTYLLRCCPVWKFPVLIQHLDNVIKFQIESITNIRLSEQAWTQASLPIRYGGLGTRKISSVALPAFLSSIYSSSDLTGNILKAPAATNCEVACLAEAETAWLAGPSPNFPPTPKIQKAWDNISSQVILDTLLNISPSLKDRARLEAVARPESGHWLHAYPSPNTGTFIDPTTLRLAIGLRLGAEVCMEHSCASCGASVDRLGHHGLACSSSAGRLSRHAAINDILRRSLVSANVPAILEPQHIARDDGKRPDGMSMIPWRMGRPLVWDATCADTLAATYLPATAKRAGAAAEIRERSKVGKYSCLGAQYEFVAFGVETLGPWGPGAHSLFMELGKRLREATGDPRAGSFLAQRLSIAIQRGNAAAMMGTLPRGPGFLHLF

SEQ ID NO: 17966 - protein, 944 aa, Blastobasis lacticolella
MQHCVVCLRSFNSIKGLHIHQSRVHHARILLCSPCSQSHDSQNNNTPLTNTSTPLHLLLSQLKSSTAIVKRIPRGARSCVASALAECIKRCTRDNNLVSWHDLLTFSYKTLHTSLENKTSLTQQIKNNTSPNTQLPQAAPRRPQHSRHHNDIFSKVEEKVQDGDLKGAARLLFSNDTIAPDSPETATALQSKHPPGPSCPSFVDPPSDIATCLRAKEEDVVAAIATFPAGSASGLDGISPQHLKDLTSHGVGMAGDHVISALTGLVNVMLEGNVCQEVTPILYGANLIALTKKDGGVRPIAVGSTLRRLAAKICVRLTRSKFQSLFEPVQVGFGTRGGCEATVHAVRTFTQDDLCEVILKLDVKNAFNSVHRDTLLNKIKLHVPEIYNFMLQCYHCPSKLLHKNNEILSAVGCQQGDPLGPAIFSLAINSIIHSVKSKLNVWYLDDGTIAGDAQTVLTDLEMVKHNFDLIGLELNFNKCELFISEKIDTTLAQSIIQNFNSVAPNIKILTKDSLSLLGSPIFDEAIPPLLTSSVSKFNEFSDRLLKISSHSALFILKFCLFVPKFTYLLRCCPVWKFPVLIQHLDNVIKFQIESITNIRLSEQTWTQASLPIRYGGLGTRKISSVALPAFLSSIYSSSDLTGNILKAPAATNCEVACLAEAETAWLAGPSPNFPPTPKIQKAWDNISSQVILDTLINISPSLKDRARLEAVARPESGHWLHAYPSPNTGTFIDPTTLRLAIGLRLGAEVCIEHSCASCGASVDRLGHHGLACSSSAGRLSRHAAINDILRRSLVSANVPAILEPQHIARDDGKRPDGMSMIPWRMGRPLVWDATCADTLAATYLPATAKRAGAAAEIRERSKVGKYSCLGAQYEFVAFGVETLGPWGPGAHSLFMELGKRLREATGDSRAGSFLAQRLSIAIQRGNAAAMMGTLPRGPGFLHLF

SEQ ID NO: 17967 - protein, 937 aa, Cydia splendana
MECCVCKKTFSTTKGLHIHQSRIHHVRVYPAPPALSPQNTHCSSTSPPQPEIPLQTLLGKLKLSTPLIKRIPRGARPAVAEALTATINNCLKDNNLDSWRDLLTFSFKILYVSDNNDKISLTQKIKNNILAPNLPPTTRSPRDRSNNNYDLCKKVEDKVHDGDLKGAARLLFSNDTLAPDTPESVAALQAKHPVGPSTPIFADTPSDPSACLHASPEDVMSALASFTKGSASGLDGISAQHLLDLTSHCTGISGELLTDSITRLINLMLLGDVCQDVTAVIYGANLIALSKKDGGVRPIAVGSTFRRLAAKVCVRHTRAKLQKLFEPVQVGFGTRGGCEAAVHAVRTFVQTDSCEVLLKIDVKNAFNSVNRDTLLSVIKIHVPEIYNLLLQCYHSPSKLVHKGNEILSAVGCQQGDPLGSAIFSLAINSAIHSLTSKLNVWYLDDGTIGGDSQSVLADLSLVIQKFSEIGLKLNFDKCELYISENLEPSLAPQVLQSFSSLAPNIKILSKDNLHLLGSPIFDEAIPSVLAKSISKFRVNSDRLIKISSHSALFILKFCLLVPKFTYLLRCCPIWKVANLVQPIDSLLKSQLESILNVRFNEPAWTQASLPIRFGGLGTRKISSVALPAFLSSIHSTSDLAGKILKTTNCEIACLDEARNAWLAKLRDVPPRPERQRAWDNLACTAVMKSLVDSSSGRDRARLLAVSRPESGQWLHAYPSPHTGTFIEPNTLRIAIGLRVGADVCVDHSCASCGAPVNRLGHHGLACSSGAGRLSRHAALNDILRRALVSADVPAALEPQIARDDGKRPDGMSLIPWRLGRALVWDATCADTLAASYISATSKQAGAAADVRERSKVNKYSCLGAHYEFVAFGVETLGPWGRGARGLHKELSKRLRQATGDPRAGSFLAQRLAIAIQRGNAACVMGTLPRAQSFDKYF

SEQ ID NO: 17968 - protein, 937 aa, Cydia splendana
MECCVCKKTFSTTKGLHIHQSRIHHVRVYPAPPALSPQNTHCSSTSPPQPEIPLQTLLGKLKLSTPLIKRIPRGARPAVAEALTATINNCLKDNNLDSWRDLLTFSFKILYVSDNNDKISLTQKIKNNILAPNLPPTTRPPRDRSNNNYDLCKKVEDKVHDGDLKGAARLLFSNDTLAPDTPESVAALQAKHPVGPSTPIFADTPSDPSACLHASPEDVMSALASFTKGSASGLDGISAQHLLDLTSHCTGISGELLTDSITRLINLMLLGDVCQDVTAVIYGANLIALSKKDGGVRPIAVGSTFRRLAAKVCVRHTRAKLQKLFEPVQVGFGTRGGCEAAVHAVRTFVQTDSCEVLLKIDVKNAFNSVNRDTLLSVIKIHVPEIYNLLLQCYHSPSKLVHKGNEILSAVGCQQGDPLGPAIFSLAINSAIHSLTSKLNVWYLDDGTIGGDSQSVLADLSLVIQKFSEIGLKLNFDKCELYISENLEPSLAPQVLQSFSSLAPNIKILSKDNLHLLGSPIFDEAIPSVLAKSISKFRVNSDRLIKISSHSALFILKFCLLVPKFTYLLRCCPIWKVANLVQPIDSLLKSQLESILNVRFNEPAWTQASLPIRFGGLGTRKISSVALPAFLSSIHSTSDLAGKILKTTNCEIACLDEARNAWLAKLRDVPPRPERQRAWDNLACTAVMKSLVDSSSGRDRARLLAVSRPESGQWLHAYPSPHTGTFIEPNTLRIAIGLRVGADVCVDHSCASCGAPVNRLGHHGLACSSGAGRLSRHAALNDILRRALVSADVPAALEPQIARDDGKRPDGMSLIPWRFGRALVWDATCADTLAASYISATSKQAGAAADVRERSKVNKYSCLGAHYEFVAFGVETLGPWGRGARGLHKELSKRLRQATGDPRAGSFLAQRLAIAIQRGNAACVMGTLPRAQSFDKYF

SEQ ID NO: 17969 - protein, 937 aa, Cydia splendana
MECCVCKKTFSTTKGLHIHQSRIHHVRVYPAPPALSPQNTHCSSTSPSQPEIPLQTLLGKLKLSTPLIKRIPRGARPAVAEALTATINNCLKDNNLDSWRDLLTFSFKILYVSDNNDKISLTQKIKNNILAPNLPPTTRSPRDRSNNNYDLCKKVEDKVHNGDLKGAARLLFSNDTLAPDTPESVAALQAKHPVGPSTPIFADTPSDPSACLHASREDVMSALASFTKGSASGLDGISAQHLLDLTSHCTGISGELLTDSITRLINLMLLGDVCQDVTAVIYGANLIALSKKDGGVRPIAVGSTFRRLAAKVCVRHTRAKLQKLFEPVQVGFGTRGGCEAAVHAVRTFVQTDSCEVLLKIDVKNAFNSVNRDTLLSVIKIHVPEIYNLLLQCYHSPSKLVHKGNEILSAVGCQQGDPLGPAIFSLAINSAIHSLTSKLNVWYLDDGTIGGDSQSVLADLSLVIQKFSEIGLKLNFDKCELYISENLEPSLAPQVLQSFSSLAPNIKILSKDNLHLLGSPIFDEAIPSVLAKSISKFRVNSDRLIKISSHSALFILKFCLLVPKFTYLLRCCPIWKVANLVQPIDSLLKSQLESILNVRFNEPAWTQASLPIRFGGLGTRKISSVALPAFLSSIHSTSDLAGKILKTTNCEIACLDEARNAWLAKLRDVPPRPERQRAWDNLACTAVMKSLVDSSSGRDRARLLAVSRPESGQWLHAYPSPHTGTFIEPNTLRIAIGLRVGADVCVDHSCASCGAPVNRLGHHGLACSSGAGRLSRHAALNDILRRALVSADVPAALEPQIARDDGKRPDGMSLIPWRLGRALVWDATCADTLAASYISATSKQAGAAADVRERSKVNKYSCLGAHYEFVAFGVETLGPWGRGARGLHKELSKRLRQATGDPRAGSFLAQRLAIAIQRGNAACVMGTLPRAQSFDKYF

SEQ ID NO: 17970 - protein, 937 aa, Cydia splendana
MECCVCKKTFSTTKGLHIHQSRIHHVRVYPAPPALSPQNTHCSSTSPPQPEIPLQTLLGKLKLSTPLIKRIPRGARPAVAEALTATINNCLKDNNLDSWRDLLTFSFKILYVSDNNDKISLTQKIKNNILAPNLPPTTRSPRDRSNNNYDLCKKVEDKVHDGDLKGAARLLFSNDTLAPDTPESVAALQAKHPVGPSTPIFADTPSDPSACLHASPEDVMSALASFTKGSASGLDGISAQHLLDLTSHCTGISGELLTDSITRLINLMLLGDVCQDVTAVIYGANLIALSKKDGGVRPIAVGSTFRRLAAKVCVRHTRAKLQKLFEPVQVGFGTRGGCEAAVHAVRTFVQTDSCEVLLKIDVKNAFNSINRDTLLSVIKIHVPEIYNLLLQCYHSPSKLVYKGNEILSAVGCQQGDPLGPAIFSLAINSAIRSLTSKLNVWYLDDGTIGGDSQSVLADLSLVIQKFSEIGLKLNFDKCELYISENLEPSLAPQVLQSFSSLAPNIKILSKDNLHLLGSPIFDEAIPSVLAKSISKFRVNSDRLIKISSHSALFILKFCLLVPKFTYLLRCCPIWKVANLVQPIDSLLKSQLESILNVRFNEPAWTQASLPIRFGGLGTRKISSVALPAFLSSIHSTSDLAGKILKTTNCEIACLDEARNAWLAKLRDVPPRPERQRAWDNLACTAVMKSLIDSSSGRDRARLLAVSRPESGQWLHAYPSPHTGTFIEPNTLRIAIGLRVGADVCVDHSCASCGAPVNRLGHHGLACSSGAGRLSRHAALNDILRRALVSADVPAALEPQIARDDGKRPDGMSLIPWRLGRALVWDATCADTLAASYISATSKQAGAAADVRERSKVNKYSCLGAHYEFVAFGVETLGPWGRGARGLHKELSKRLRQATGDPRAGSFLAQRLAIAIQRGNAACVMGTLPRAQSFDKYF

SEQ ID NO: 17971 - protein, 937 aa, Cydia splendana
MECCVCKKTFSTTKGLHIHQSRIHHVRVYPVPPALSPQNTHCSSTSPPQPEIPLQTLLGKLKLSTPLIKRIPRGARPAVAEALTATINNCLKDNNLDSWRDLLTFSFKILYVSDNNDKISLTQKIKNNILAPNLPPTTRSPRDRSNNNYDLCKKVEDKVHDGDLKGAARLLFSNDTLAPDTPESVAALQAKHPVGPSTPIFADTPSDPSACLHASPEDVMSALASFTKGSASGLDGISAQHLLDLTSHCTGISGELLTDSITRLINLMLLGDVCQDVTAVIYGANLIALSKKDGGVRPIAVGSTFRRLAAKVCVRHTRAKLQKLFEPVQVGFGTRGGCEAAVHAVRTFVQTDSCEVLLKIDVKNAFNSVNRDTLLSVIKIHVPEIYNLLLQCYHSPSKLVHKGNEILSAVGCQQGDPLGPAIFSLAINSAIHSLTSKLNVWYLDDGTIGGDSQSVLADLSLVIQKFSEIGLKLNFDKCELYISENLEPSLAPQVLQSFSSLAPNIKILSKDNLHLLGSPIFDEAIPSVLAKSISKFRVNSDRLIKISSHSALFILKFCLLVPKFTYLLRCCPIWKVANLVQPIDSLLKSQLESILNVRFNEPAWTQASLPIRFGGLGTRKISSVALPAFLSSIHSTSDLAGKILKTTNCEIACLDEARNAWLAKLRDVPPRPERQRAWDNLACTAVMKSLVDSSSGRDRARLLAVSRPESGQWLHAYPSPHTGTFIEPNTLRIAIGLRVGADVCVDHSCASCGAPVNRLGHHGLACSSGAGRLSRHAALNDILRRALVSADVPAALEPQIARDDGKRPDGMSLIPWRLGRALVWDATCADTLAASYISATSKQAGAAADVRERSKVNKYSCLGAHYEFVAFGVETLGPWGRGARGLHKELSKRLRQATGDPRVGSFLAQRLAIAIQRGNAACVMGTLPRAQSFDKYF

SEQ ID NO: 17972 - protein, 937 aa, Cydia splendana
MECCVCKKTFSTTKGLHIHQSRIHHVRVYPAPPALSPQNTHCSSTSPPQPEIPLQTLLGKLKLSTPLIKRIPRGARPAVAEALTATINNCLKDNNLDSWRDLLTFSFKILYVSDNNDKISLTQKIKNNILAPNLPPTTRPPRDRSNNNYDLCKKVEDKVHDGDLKGAARLLFSNDTLAPDTPESVAALQAKHPVGPSTPIFADTPSDPSACLHASPEDVMSALASFTKGSASGLDGISAQHLLDLTSHCTGISGELLTDSITRLINLMLLGDVCQDVTAVIYGANLIALSKKDGGVRPIAVGSTFRRLAAKVCVRHTRAKLQKLFEPVQVGFGTRGGCEAAVHAVRTFVQTDSCEVLLKIDVKNAFNSVNRDTLLSVIKIHVPEIYNLLLQCYHSPSKLVHKGNEILSAVGCQQGDPLGPAIFSLAINSAIHSLTSKLNVWYLDDGTIGGDSQSVLADLSLVIQKFSEIGLKLNFDKCELYISENLEPSLAPQVLQSFSSLAPNIKILSKDNLHLLGSPIFDEAIPSVLAKSISKFRVNSDRLIKISSHSALFILKFCLLVPKFTYLLRCCPIWKVANLVQPIDSLLKSQLESILNVRFNEPAWTQASLPIRFGGLGTRKISSVALPAFLSSIHSTSDLAGKILKTTNCEIACLDEARNAWLAKLRDVPPRPERQRAWDNLACTAVMKSLVDSSSGRDRARLLAVSRPESGQWLHAYPSPHTGTFIEPNTLRIAIGLRVGADVCVDHSCASCGAPVNRLGHHGLACSSGAGRLSRHAALNDILRRALVSADVPAALEPQIARDDGKRPDGMSLIPWRLGRALVWDATCADTLAASYISATSKQAGAAADVRERSKVNKYSCLGAHYEFVAFGVETLGPWGRGARGLHKELSKRLREATGDPRAGSFLAQRLAIAIQRGNAACVMGTLPRAQSFDKYF

SEQ ID NO: 17973 - protein, 937 aa, Cydia splendana
MECCVCKKTFSTTKGLHIHQSRIHHVRVYPAPPALSPQNTHCSSTSPPQPEIPLQTLLGKLKLSTPLIKRIPRGARPAVAEALTATINNCLKDNNLDSWRDLLTFSFKILYVSDNNDKISLTQKIKNNILAPNLPPTTRPPRDRSNNNYDLCKKVEDKVHDGDLKGAARLLFSNDTLAPDTPESVAALQAKHPVGPSTPIFADTPSDPSACLHASPEDVMSALASFTKGSASGLDGISAQHLLDLTSHCTGISGELLTDSITRLINLMLLGDVCQDVTAVIYGANLIALSKKDGGVRPIAVGSTFRRLAAKVCVRHTRAKLQKLFEPVQVGFGTRGGCEAAVHAVRTFVQTDSCEVLLKIDVKNAFNSINRDTLLSVIKIHVPEIYNLLLQCYHSPSKLVHKGNEILSAVGCQQGDPLGPAIFSLAINSAIHSLTSKLNVWYLDDGTIGGDSQSVLADLSLVIQKFSEIGLKLNFDKCELYISENLEPSLAPQVLQSFSSLAPNIKILSKDNLHLLGSPIFDEAIPSVLAKSISKFRVNSDRLIKISSHSALFILKFCLLVPKFTYLLRCCPIWKVANLIQPIDSLLKSQLESILNVRFNEPAWTQASLPIRFGGLGTRKISSVALPAFLSSIHSTSDLAGKILKTTNSEIACLDEARNAWLAKLRDVPPRPERQRAWDNLACTAVMKSLVDSSSGRDRARLLAVSRPESGQWLHAYPSPHTGTFIEPNTLRIAIGLRVGADVCVDHSCASCGAPVNRLGHHGLACSSGAGRLSRHAALNDILRRALVSADVPAALEPQIARDDGKRPDGMSLIPWRLGRALVWDATCADTLAASYISATSKQAGAAADVRERSKVNKYSCLGAHYEFVAFGVETLGPWGRGARGLHKELSKRLRQATGDPRAGSFLAQRLAIAIQRGNAACVMGTLPRAQSFDKYF

SEQ ID NO: 17974 - protein, 937 aa, Cydia splendana
MECCVCKKTFSTTKGLHIHQSRIHHVRVYPAPPALSPQNTHCSSTSLPQPEIPLQTLLGKLKLSTPLIKRIPRGARPAVAEALTATINNCLKDNNLDSWRDLLTFSFKILYVSDNNDKISLTQKIKNNILAPNLPPTTRPPRDRSNNNYDLCKKVEDKVHDGDLKGAARLLFSNDTLAPDTPESVAALQAKHPVGPSTPIFADTPSDPSACLHASPEDVMSALASFTKGSASGLDGISAQHLLDLTSHCTGISGELLTDSITRLINLMLLGDVCQDVTAVIYGANLIALSKKDGGVRPIAVGSTFRRLAAKVCVRHTRAKLQKLFEPVQVGFGTRGGCEAAVHAVRTFVQTDSCEVLLKIDVKNAFNSVNRDTLLSVIKIHVPEIYNLLLQCYHSPSKLVHKGNEILSAVGCQQGDPLGPAIFSLAINSAIHSLTSKLNVWYLDDGTIGGDSQSVLADLSLVIQKFSEIGLKLNFDKCELYISENLEPSLAPQVLQSFSSLAPNIKILSKDNLHLLGSPIFDEAIPSVLAKSISKFRVNSDRLIKISSHSALFILKFCLLVPKFTYLLRCCPIWKVANLVQPIDSLLKSQLESILNVRFNEPAWTQASLPIRFGGLGTRKISSVALPAFLSSIHSTSDLAGKILKTTNCEIACLDEARNAWLAKLRDVPPRPERQRAWDNLACTAVMKSLVDSSSGRDRARLLAVSRPESGQWLHAYPSPHTGTFIEPNTLRIAIGLRVGADVCVDHSCASCGAPVNRLGHHGLACSSGAGRLSRHAALNDILRRALVSADVPAALEPQIARDDGKRPDGMSLIPWRLGRALVWDATCADTLAASYISATSKQAGAAADVRERSKVNKYSCLGAHYEFVAFGVETLGPWGRGARGLHKELSKRLRQATGDPRAGSFLAQRLAIAIQRGNAACVMGTLPRAQSFDKYF

SEQ ID NO: 17975 - protein, 937 aa, Cydia splendana
MECCVCKKTFSTTKGLHIHQSRIHHVRVYPAPPALSPQNTHCSSTSPPQPEIPLQTLLGKLKLSTPLIKRIPRGARPAVAEALTATINNCLKDNNLDSWRDLLTFSFKILYVSDNNDKISLTQKIKNNILAPNLPPTTRPPRDRSNNNYDLCKKVEDKVHDGDLKGAARLLFSNDTLAPDTPESVAALQAKHPVGPSTPIFADTPSDPSACLHASPEDVMSALASFTKGSASGLDGISAQHLLDLTSHCTGISGELLTDSITRLINLMLLGDVCQDVNAVIYGANLIALSKKDGGVRPIAVGSTFRRLAAKVCVRHTRAKLQKLFEPVQVGFGTRGGCEAAVHAVRTFVQTDSCEVLLKIDVKNAFNSVNRDTLLSVIKIHVPEIYNLLLQCYHSPSKLVHKGNEILSGVGCQQGDPLGPAIFSLAINSAIHSLTSKLNVWYLDDGTIGGDSQSVLADLSLVIQKFSEIGLKLNFDKCELYISENLEPSLAPQVLQSFSSLAPNIKILSKDNLHLLGSPIFDEAIPSVLAKSISKFRVNSDRLIKISSHSALFILKFCSLVPKFTYLLRCCPIWKVANLVQPIDSLLKSQLESILNVRFNEPAWTQASLPIRFGGLGTRKISSVALPAFLSSIHSTSDLAGKILKTTNCEIACLDEARNAWLAKLRDVPPRPERQRAWDNLACTAVMKSLVDSSSGRDRARLLAVSRPESGQWLHAYPSPHTGTFIEPNTLRIAIGLRVGADVCVDHSCASCGAPVNRLGHHGLACSSGAGRLSRHAALNDILRRALVSADVPAALEPQIARDDGKRPDGMSLIPWRLGRALVWDATCADTLAASYISATSKQAGAAADVRERSKVNKYSCFGAHYEFVAFGVETLGPWGRGARGLHKELSKRLRQATGDPRAGSFLAQRLAIAIQRGNAACVMGTLPRAQSFDKYF

SEQ ID NO: 17976 - protein, 937 aa, Cydia splendana
MECCVCKKTFSTTKGLHIHQSRIHHVRVYPAPPALSPQNTHCSSTSPPQPEIPLQTLLGKLKLSTPLIKRIPRGARPAVAEALTATINNCLKDNNLDSWRDLLTFSFKILYVSDNNDKISLTQKIKNNILAPNLPPTTRSPRDQSNNNYDLCKKVEDKVHDGDLKGAARLLFSNDTLAPDTPESVAALQAKHPVGPSTPIFADTPSDPSACLHASPEDVMSALASFTKGSASGLDGISAQHLLDLTSHCTGISGELLTDSITRLINLMLLGDVCQDVAAVIYGANLIALSKKDGGVRPIAVGSTFRRLAAKVCVRHTRAKLQKLFEPVQVGFGTRGGCEAAVHPVRTFVQTDSYEVLLKIDVKNAFNSVNRDTLLSVIKIHVPEIYNLLLQCYHSPSKLVHKGNEILSAVGCQQGDPLGPAIFSLAINSAIHSLTSKLNVWYLDDGTIGGDSQSVLADLSLVIQKFSEIGLKLNFDKCELYISENLEPSLAPQVLQSFSSLAPNIKILSKDNLHLLGSPIFDEAIPSVLAKSISKFRVNSDRLIKISSHSALFILKFCLLVPKFTYLLRCCPIWKVANLVQPIDSLLKSQLESIFNVRFNEPAWTQASLPIRFGGLGTRKISSVALPAFLSSIHSTSDLAGKILKTTNCEIACLDEARNAWLAKLRDVPPRPERQRAWDNLACTAVMKSLVDSSSGRDRARLLAVSRPESGQWLHAYPSPHTGTFIEPNTLRIAIGLRVGADVCVDHSCASCGAPVNRLGHHGLACSSGAGRLSRHAALNDILRRALVSADVPAALEPQIARDDGKRPDGMSLIPWRLGRALVWDATCADTLAASYISATSKQAGAAADFRERSKVNKYSCLGAHYEFVAFGVETLGPWGRGARGLHKELSKRLRQATGDPRAGSFLAQRLAIAIQRGNAACVMGTLPRAQSFDKYF

SEQ ID NO: 17977 - protein, 682 aa, Blastobasis adustella
MAGEHVISALTGLVNVMLEGNVCQEVTPILYGANLIALTKKYGGVRPIAVGSTLRRLAAKICVRLTRSKFPSLFEPVQVGFGTRGGCEATVHALRTFTQDDLCEVILKLDVKNAFNSVNRDTLNKIKLHVPEIYNFMLQCYHCPSKLLHKNNENLLAVGCQQGDPLAPAIFSLAINSIIHSVNSKLNVWYLDDGTIAGDAQTVLTDLEMIIHNFDLIGLKINFNKCELYISEKIDTSSVQSIVQNFNSVAPNIRKLTKYSLSLLGSPIFDEAIPPLLTSSDRLLKISSHSALFILKFCLFVPKFTYLLRCCPVWKFPDLIKDLDNVIKFQIESITNIRLSEQAWTQASLPIRYGGLGTRKISSVALPAFLSSISSDLTGNILKAPVATNCEVACLAEAETAWLAGPSPNFSPTPKIQKAWDNISSQVVLDTLINNSSSLKDRARLEAVARRESGHWLNAYPSPNTGTFIDLTTLRLAIGLRLGAEVCIDHGCASCGASVDRLGHHGLACSSSAGRLSRHAAINDILRRSLVSASVPAILEPQHIARDDGKRPDGMSMIPWRMGRPLVWDATCADTLAATYLPATAKRAGAAAEMRERSKMGKYSCLGAQYDFVAFGVETLGPWGPGAHSLFREFSKRLREATGDPRAGGFLAQRISIAIQRGNAAAMMGTLPRGPGFLYLLI

SEQ ID NO: 17978 - protein, 673 aa, Ephestia elutella
MLRGDVCQDVTPILYGANLIALTKKDGGVRPIAVGTTFRRLAAKICVRITRQKLQDLFEPVQVGFGTRGGCEAAVHAVRTFAQSNLCEVILKLDVKNAFNSVNRDTLLNEIKYHIPEIYNFMIQCYHSPSKLMHKNNEILSAVGCQQGDPLGPAIFSLAINSIIHSLNSKLNVWYLDDGTLGGDSQTVLNDLTQIINKFQEIGLDLNLNKCELFININDNTLASKIIQNFNIIAPNLKIITKENFHLLGSPIFEDAIPSLLRNSFSKFSDYSDRLVKISSHSALFILKFCLIMPKFTYLLRCCPIWKFPDLLQPIDLLLKSQIEAILNIHLSEQAWAQASLPIRLGGLGTRKISSVALPAFLSSIHSTSNLAGKILNTTSVTNCEIACLDEASNAWLAGPGQNLPSKLYKQRAWDTISSTNLFQSILNSTSGRERARLLAVSRPESGHWLHAYPSPALGTFIDPLTLRIAVCLRLGTDVCVSHNCNSCGAAVDGLGHHGLACTSGAGRQSRHAALNDILRRALVSAKVPVALEPRIARDDGKRPDGMSLIPWNMGRALVWDATCADTLAASYLPATSRQAGAAADARERLKTNKYSCLGAQYQFVAFGVETLGSWGSGARGLHRELSKRLREATGDPRAGSFLAQRLAIAIQRGNAACVMGTLPTTPNLELDF

SEQ ID NO: 17979 - protein, 891 aa, Ephestia elutella
MQCCVCQRTFTTLRGLHIHQSRAHQVRIHSSSSISTNSVSPLCNHSIPLQSLLGQLEQSNPIIKRIPRGARTAVAEALTEVISNCVSANSIDSWRNVVTCAFKILHVSDQSKNNVSLTQKIKNNILTPAFDQNCSNFRKNSTQRKHYDLLGKVEEKIHDGDLKGATRLLFSNDSLAPDTPETAAALQSKHPPGPSNPFFVDPPLENSSCLQASDKDIIAAIVSFPKGSASGLDGISPQHLVDLTSHGTGVAGKKIMSCITKLVNLMLRGDVCQDVTPILYGANLIALTKKDGGVRPIAVGTTFRRLAAKICVRITRQKLQHLFEPVQVGFGTRGGCEAAVHAVRTFAQSNLCEVILKLDVKNAFNSVNRDTLLNEIKYHIPEIYNFMLQCYHSPSQLMHKNNEILSAVGCQQGDPLGPAIFSLAINSIIHSLNSKLNVWYLDDGTLGGDSQTVLNDLTQINNKFHEIGLDLNLSKCELFININNNILASQIIQNFNNIAPNLKIITKESFHLLGSPIFEDAIPSLLRNLFSKFSDYSDRLVKISSHSALFILKFCLIMPKFTYLLRCCPIWKFPDLLQPIDLLLKSQIEAILNINLSVQAWAQASLPIRLGGLGTRKISSVALPAFLSSIHSTSNLAGKILITTSVTNCEIACLDEATNAWLAGPSPNLPSKLNKQRAWDTISSTNSFQSILNSTSGRERARLLAVSRPESGHWLHVYPSSALGTFIDPLTLRIAVCLRLGTDVCVSHNCASCGAAVDGLGHHGLACSSGAGRQSRHAALNDILRRALVSANVPVALEPRIARDDGKRPDGMSLIPWNMGRALVWDATCADTLAASYLLATSRQAGAAADARERLKTNKYSTRRTIPVYGFWRRDSRLMGQWRTGAPQGAQ

SEQ ID NO: 17980 - protein, 938 aa, Ephestia elutella
MQCCVCLRTFTTLRGLHIHQSRAHQVRIHSSPSISTSSVSPPLNHSIPLQSLLGQLKQSNQIIKRIPRGARTAVAEALTEVISNCVSANSIDSWRNVLIFAFKILHVSDQTKNNVSLTQKIKNNILTPTFDQNCSNFRKNSTQRKHFDLLGKAEEKIHDGDLKGATRLLFSNDSLAPDTPETAAALQSKHPPGPSTPFFVDPPLENSSCLQATDKDIIAAIASFPKGSASGLDGISPQHLVDLTSHGTGVAGQKLISCITKLVNLMLRGDVCQDVTPILYGANLIALTKKDGGVRPIAVGTTFRRLAAKICVRITRQKLQDLFEPVQVGFGTRGGCEAAVHAVRTFAQSNLCEVILKLDVKNAFNSVNRDTLLNEIKYHIPEIYNFMIQCYHSPSKLMHKNNEILSAVGCQQGDPLGPAIFSLAINSIIHSLNSKLNVWYLDDGTLGGDSKTVLNDLTQIINKFQEIGLDLNLNKCELFINRNDNTLASKIIQNFNIIAPNLKIITKESFHLLGSPIFEDAIPSLLRNSFSKFSDYSDRLVKISSHSALFILKFCLIMPKFTYLLRCCPIWKFPDLLQPIDLLLKSQIEAILNIHLSEQAWAQASLPIRLGGLGTRKISSVALPAFLSSIHSTSNLAGKILNTTSVTNCEIACLDEASNAWLAGPGQNLPSKLYKQRAWDTISSNNSFQSILNSTSGRERARLLAVSRPESGHWLHAYPSPALGTFIDPLTLRIAVCLRLGTDVCVSHNCASCGAAVDGLGHHGLACSSGAGRQSRHAALNDILRRALVSAKVPVALEPRIARDDGKRPDGMSLIPWNMGRALVWDATCADTLAASYLPATSRQAGAAADARERLKTNKYSCLGAQYQFVAFGVETLGSWGSGARGLHRELSKRLREATGDPRAGSFLAQRLAIAIQRGNAACVMGTLPTTPNLELDF

SEQ ID NO: 17981 - protein, 938 aa, Ephestia elutella
MQCCVCLRTFTTLRGLHIHQSRAHQVRIHSSPSISTSSVSPPCNHSIPLQSLLGQLKQSNQIIKRIPRGARTAVAEALTEVISNCVSANSIDSWRNVLTFAFKILHVSDQTKNNVSLTQKIKNNILTPTFDQNCSNFWKNSTQRKHFDLLGKVEEKIHDGDLKGATRLLFSNDSLAPDTPETAAALQSKHPPGPSTPFFVDPPLENSSCLQASDKDIIAAIASFPKGSASGLDGISPQHLVDLTSHGTGVAGQKLISCITKLVNLMLRGDVCQDVTPILYGANLIALTKKDGGVRPIAVGTTFRRLAAKICVRITRQKLQDLFEPVQVGFGTRGGCEAAVHAVHTFAQSNLCEVILKLDVKNAFNSVNRDTLLNEIKYHIPEIYNFMIQCYHSPSKLMHKNNEILSAVGCQQGDPLGPAIFSLAINSIIHSLNSKLNVWYLDDGTLGGDSQTVLNDLTQIINKFQEIGLDLNLNKCELFININDNTLASKIIQNFNIIAPNLKIITKENFHLLGSPIFEDAIPSLLRNSFSKFSDYSDRLVKISSHSALFILKFCLIMPKFTYLLRCCPIWKFPDLLQPIDLLLKSQIEAILNIHLSEQAWAQASLPIRLGGLGTRKISSVALPAFLSSIHSTSNLAGKILNTTSVTNCEIACLDEASNAWLAGPGQNLPSKLYKQRAWDTISSTNLFQSILNSTSGRERARLLAVSRPESGHWLHAYPSPALGTFIDPLTLRIAVCLRLGTDVCVSHNCNSCGAAVDGLGHHGLACTSGAGRQSRHAALNDILRRALVSAKVPVALEPRIARDDGKRPDGMSLIPWNMGRALVWDATCADTLAASYLPATSRQAGAAADARERLKANKYSCLGAQYQFVAFGVETLGSWGSGARGLHRELSKRLREATGDPRAGSFLAQRLAIAIQRGNAACVMGTLPTTPNLELDF

SEQ ID NO: 17982 - protein, 938 aa, Ephestia elutella
MQCCVCLRTFTTLRGLHIHQSRAHQVRIHSSPSISTSSVSPPCNHSIPLQSLLGQLKQSNQIIKRIPRGARTAVAEALTEVISNCVSANSIDSWRNVLTFAFKILHVSDQTKNNVSLTQKIKNNILTPTFDQNCSNFWKNSTQRKHFDLLGKVEEKIHDGDLKGATRLLFSNDSLAPDTPETAAALQSKHPPGPSTPFFVDPPLENSSCLQASDKDIIAAIASFPKGSASGLDGISPQHLVDLTSHGTGVAGQKLISCITKLVNLMLRGDVCQDVTPILYGANLIALTKKDGGVRPIAVGTTFRRLAAKICVRITRQKLQDLFEPVQVGFGTRGGCEAAVHAVRTFAKSNLCEVILKLDVKNAFNSVNRDTLLNEIKYHIPEIYNFMIQCYHSPSKLMHKNNEILSAVGCQQGDPLGPAIFSLAINSIIHSLNSKLNVWYLDDGTLGGDSQTVLNDLTQIINKFQEIGLDLNLNKCELFIKINDNTLASKIIQNFNIIAPNLKIITKENFHLLGSPIFEDAIPSLLRNSFSKFSDYSDRLVKISSHSALFILKFCLIMPKFTYLLRCCPIWKFPDLLQPIDLLLKSQIEAILNIHLSEQAWAQASLPIRLGGLGTRKISSVALPAFLSSIHSTSNLAGKILNTTSVTNCEIACLDEASNAWLAGPGQNLPSKLYKQRAWDTISSTNLFQSILNSTSGRERARLLAVSRPESGHWLHAYPSPALGTFIDPLTLRIAVCLRLGTDVCVSHNCNSCGAAVDGLGHHGLACTSGAGRQSRHAALNDILRRALVSAKVPVALEPRIARDDGKRPDGMSLIPWNMGRALVWDATCADTLAASYLPATSRQAGAAADARERLKTNKYSCLGAQYQFVAFGVETLGSWGSGARGLHRELSKRLREATGDPRAGSFLAQRLAIAIQRGNAACVMGTLPTTPNLELDF

SEQ ID NO: 17983 - protein, 938 aa, Apotomis turbidana
MQCCVVCNKSFQSTKGLHIHQSRTHQVRILSILPHSSSQTPSTSSTSHTLPLNSLLGKLKLSTPLIKRIPRGARSTVAEALSSSITSCIRDNNETSWRDLLTFPFKILHVSKKTDANISLCQKIKSNVSSPTLATPSLSSRPSNYNLYKKVEEKIYDGDLKGATRLLFSDDTIAPDTPETAAALHLKHPPGPSTPIFVDPSSDPTACLQATERDILAALSSFPKGSASGLDGISPQHLIDLTSHGSGVAGEHLTASLTKLVNFMIVGDVCQDVTPVLYGANLIALKKKDGGIRPIAVGSTFRRLAAKVCVRLTRNKLQNIFEPVQVGFGTRGGCEAAVHATRTFVEDDQCEVLLKIDVKNAFNSVNRDALLNEIKVHVPEIYNFLLQCYLCPSKLMHKNYEILSAVGCQQGDPLGPAIFSLAINSIIHNLNSKLNVWYLDDGTLGGDWQTVLKDLSELKIKFNSIGLDLNFDKCELYISQKVNTSLAFQIHQNFNILAPNIKILSKNSLYLLGSPIFDEAIPPLLTNSFSKFNNHSDRLAKISSHSALFILKFCLLVPKFTYLLRCCPIWKFPILVRSIDLTLKFQIESILSNISLSEQAWTQASLPIRNGGLGTRTICSIALPAFLSSIHSTSDLAGKILKADMAANCEIACLAEAKNAWLAGPNPILPDAPKKQRAWDTLASDAILESLILNSSGRDRARLQAVSRPESGHWLHAYPCPNAGTYIDPNTLRIAAGLRLGADVCEEHACTACGANANRLGHHGLVCSSGAGRYSRHAALNDILRRALVSVNVPAALEPQIVRDDGKRPDGMSLIPWRMGRALVWDATCADTLAASYLPATSRRAGAAADARERIKVSKYSCLGAQYDFIAFGVETLGPWGQGARGLHRELSKRLREATGDPRAGSFLAQRLSIAIQRGNAACVMGTLPKGLSFINIF

SEQ ID NO: 17984 - protein, 1321 aa, Adineta ricciae
MRGMMSTTDLSPPLAATQRSGLQLRNRKVAWPTVVSPGAGPTADDGVSTDKGEKNVTVGVQAVTPLTQQSEISSSGRIKGPSRGASACQRKIGLSWKGKEEEELRRLVGIYTGQTGIISWSKIEEAWNQLADVSVRSKSSLSSKWRDLRSKPHLLGSSGARDDSTVGVSATIEADLVRSNSPVDPPSSTVVADTREEKSGSKRGKKKNSNNRRNGSPPVNVNIVNNNNNNNNFINNNDGSGSDKDEGEGGEKTEIVLPEISEDDIQPDLGALFIRNLKKARKEGCDGFRKSLKKVNIKSTDPLMNKVDRLIKEDFVQRKIDKPTWNQLSIGVYAGAMTVEMVANRSTVEIQRRTANWFKATSMEMDKLRKTIGKATAELGRRKSNVELAPTPRQVSNIRLLEKRYRCSSNDDINSLVERLKHRLRLLSERIELRKADENRIKIRRSPPKMIFIDNSGEENTDTTDIHKIRRYWKNIVGVKKDFQAHDQHLTDWKQSISKVSEGGRIGDDLTTEMWQEVIRNLKPWKASGPDGIQGFWWKSFPSANNYLYKLVYHHLTTGTPLPQGWIANGRTVLLYKAGSREDPSNFRPITCLNTCYKILTGYIAIYLSRYINERNILPIEQRALQKNVWGCTHALIVDQTVVADAFYQKQRPLSVAWIDYAKAFDSVPHKYILWVLEAMQVPSPLRALIKSLMSQWRVKYEVKAKRGKCIRSQFLKIKSGVLQGDSFSPLLFCLSMAPLSHALNHLGLRYETACGRKENLTLSLSHQFYMDDLKLYASSRENLKKLLNVVKAVSKAISMKINAQKCATAHFVPKWLKNSNKVSTTTDDGDIPTLDGGSHYKYLGIDQNMQEKGDVSWDRVAKKCLQKCKRLWTSDLTYRQKVVVYNTTIIPALTYVSANLIKVSGKYESQLAKGESFDKDIRKMLVTEKARYKANSVSRLYLSADKGGCNLKSIRDSVEETTIYTWAYLCTRADLKPSLNLFGKMANRSKRSIVSDARSVLKSYGISAKEDLETSTVSVDGVQFNKAKKLAQHVVAKMRDVNNIRRLEEWKNLKLAGRTLRTEVDIDFAVSYLWLKEGRLSSVGVRNALAVQEGCLLTKTHPACGGQNSSLNCRKCNSKEESIEHVTSSCPKWLCTLYIDRHDSVARNIYYILCRKYDIQPPHYTQSVSSVKETEYVKLYWNQPVMTRTIIRHNKPDIVVFDKVKRTAVIFEVAVSWFTGLQRQVDIKVNRYSVNGNWDQELATPYPRGANLVTELTTLGWNVTFVPVVIGVTGETLSSLIQNLQSSLQINKSSALKLVERLQRSAVLGTSRIVKNHLST

SEQ ID NO: 17985 - protein, 1321 aa, Adineta ricciae
MRGMMSTTDLSPPLAATQRSGLQLRNRKVAWPTVDSPGAGPTADDGVSTDKSEKNVTVGVQAVTPLTQQSEISSSERIKGPSRGTSACQRKIGLSWKGKEEEELRRLVGIYTGQTGIISWSKIEEAWNQLADVSVRSKSSLSSKWRDLRSKPHLLSSTGARDDSSAGVSATIEEELVRSNSPVDPPSSTVVADTHEEKSGSKRGKKKNSNNRRNGSPPVNVNIVNNNNYNNFINNNNNDSGGDKDEGEGGDKAEIALPEISEDDIQPDLRALFHRNLKKARKEGCDGFRKSLKKVNIKSTDPLMNKVDRLIKEDFVQRKIDKPTWNQLSIGVYAGAMTVEVVANRSTVEIQRRTANWFKATSMEMDKLRKTIGKATAELGRRKNNVELAPTPRQVSNIRLLEKRYRCSSNDDINSLVERLKHRLRLLSERIDLRKADENRIKIRRSPPKMIFIDNSGEENTNATDIHKIRRYWKNIVGVKKDFQEHDQHLANWKQSISNVSEGGRIGDDLTTEMWQEVIKNLKPWKASGPDGIQGFWWKSFPSANTYLHKLVYHHLTTGTPLPQGWIANGRTVLLYKAGSRDDPSNFRPITCLNTCYKILTGYIAIYMSRYINERNMLPIEQRALQKNVWGCTHALIVDQTVVADAYYQKQRPLSVAWIDYAKAFDSVPHKYILWVLEAMQVPSPLRALIKSLMTQWRVKYEVKAKRGKCIRSQFLKIKSGVLQGDSFSPLLFCLSMAPLSHALNHLGLRYETACGRKENLTLSLTHQFYMDDLKLYASSRENLKQLLNVVKAVSKAISMKINTKKCATAHFVPKWLKNSNTVSTTTDDGDIPTLDGGSHYKYLGIDQNMQEKGDVSWDRVAKKCLQKCKRLWTSDLTYRQKVAVYNTTIIPALTYVSANLIKVSGKYESQLAKGESFDKDVRKLLVTEKARYKANSVSRLYLSADKGGCNLKSTRDSIEETTIYTWAYLCTRADLKPSLNLFGKMANRSKRSIVSDARSVLKSYKMTAKEDLETSTVLVDGVQFNKAKKLAQHVVAKMRDVNNIRRLEEWKNLKLAGRTLRTEVDIDFTVSYLWLKEGRLSSVGVRNTLAVQEGCLLTKTHPACVGQNSSLNCRKCNSKEESIEHVTSSCPKWLCTLYIDRHDSVARNIYYILCRKYDIQPPHYTQSVSSVKETEYVKLYWNQPVMTRTIIRHNKPDIVVFDKVKRTAVIFEVAVSWFTGLQRQVDIKVNRYSVNGNWEQELATPYPRGANLVTELTTMGWNVTFVPVVIGVTGETLSSLIHNLQSSLTINKSSTLKLVERLQRSAVLGTSRIVKNHLST

SEQ ID NO: 17986 - protein, 1129 aa, Cyprideis torosa
MERTLGEPLDASMPENTGIEKPDTVDLVTYPLQLPISCRRCDLIFGTYKSFRSHIGTHGVDCQLECISCGACFLNPQSMGGHWRTCKKSYEPIEAQKETHEFVCKECEGTDVERSFATLAGLQLHRKRKHPAAYNISLPDRSKSTKGTKWSDDEVRHIACIMLDVPAELTSLSAKAKWLSERYKERPVAGLERMLKLPRFRSVLAEMEEAEEARTDLGMAGGDGEKPPEDSDTSGSSSSTSSDSSEPESPSPGSSADEEEDDPMRLVREHLIELCSHEVQSDALVAANTYVASALDGFDPNAGFETFCQDVFGKTGMPLHPRKVREHARERNPRNNAERKRASYRQHQELYKSNKRLLSQVLIDGLPVDAKPPPKTIVEETYQQRFGVSVADPEPTRYKAGREEPDFLIHPISRNEVRMLCKRWSSTASSPGPDRITIKDLQKTPQGVFQRVFNLWLLLNRVPDTIKLCTTKLIPKKNEGLHDIGAWRPLTIGSLLLRGYARILDQRIDISLDPRQRAFIPVNGCLENTALLQSLLSYAWKKRKEINVVWCDLHKAFDNVPHDSIWRALRRQRIHPNLISIVQDMYKDARTRVESGNGLTKWIDILRGVKQGCPLSPKLFNAVLDELFDEIGNEWGFEFLEQKVNSLAHADDLVAVSCRKFGMNWLLGKIGKFFGARSMAVNPMKCLSLRIVAAPKTKTMKVVVGDPFMIEGLHIPEMNIEETNRYLGAFVSPFGSTKLRNERLHEWLELFSRARLKPGQKLVMLRDHLMPKMMWDLVVSTNVNKGLLEKFDRKIRCMVKRILHMPPGVPNSFFYAKVSHGGIGLTRFVEAVPFDKLKNIHRLSSSQDALISSAAGEAFWTKELQRVSRWVQMDPMTDLESLQKRKKAVKTNHSKILEEAESTAGYGQIRKGFKATSLLSGYLPIKGSQYVNSAKLMCNILPVRTNLRRGNRDADVTCRRCGAWRESQAHILQSCQPMSAIITARHNTIVKRVSSEANKKNWVTHLEPRIRDDDGNIWKPDIVLCRDRVGVICDVQVPYEDRRQNLKDRWEEKKRKYQNIKASVREKYQLTDVSVLPLIVGARGTWFHKNDGLMTKLGLPKSLARPLCTNAVLGSVKIFEKFMWSLILR

SEQ ID NO: 17987 - protein, 942 aa, Plutella xylostella
MNISRAVCPHCPGSVKQYTIPRGLNIHIGRIHRVPQSGTSQPDRPDGSPSPRPPPPCILEQLAQLKKKVRVLKHVPKGARHMAAGKLAEVIQRCMRLNGVEDWFELLSFSYSCLKVPSRDKQDRSLTSKVKANIISSSLEEDPEAFSDNLNFKQRSLYKIVENKVYDGDLAGAVRILLSDCSIANNNTETLNALQSKHPPPSRDLVYPPEPNLTSDHLVVKGSDVLEAISSFKNGSAGGLDGLRPEHLKELTSASAGDNGATLVRALVDLSNFLLKGLVNREVCPFLYGASLCALGKRDGGIRPVAVGSVIRRLASKLGCRAAREAAVKVLEPLQLGFGIPLGCEAAIHATRAFALSATADKVIVKVDVKNAFNCIERDIILDKTREHVPSLYPYLHQCYAYPSNLFFGEHKIKSQVGVQQGDPLGPLLFSLAIQDVVKSLRSPLNVWYLDDGCIGGSPDEVLNDIETLKTQFKRIGLELNPEKCELFSPENTSDNATQFGRKLPGIKLLVKTNFSLLGSPIFPEGIPNILNSKISTLKGTMPHLKHLPAHVAFTILRSCLSIPKLTYFARTAPVWSHRTLADTYDAVLKELSEVILNVEMSPSQWDQAALPVRHGGLGIRRLQDTELPAFLASSHGVLNLVTRILKINGDGFSIPFVGEAERLWRSRCPGSDVPEQPGAQRMWDDELCKLALEQLMAQSTGEELARLRSASCPESGAWLHAVPSPHLGTLLDGDTLRVAIALRLGCNVCHPHRCICGAEVNGQGRHGLHCVRSAGRFSRHQALNDVVKRGLTSAGIPCALEPRGLSRTDGKRPDGLTLIPWEKGRCLLWDATCVCTFAQSHLAATTVTAGAAAESAARAKTLKYSNLLPSFIFVPLAIETTGAWGRQGKAFVKEIGRRMRDKGLDPRSGAFLLQRLSLAVQRGNAACILGTCNSHIPDRPQ

SEQ ID NO: 17988 - protein, 1000 aa, Aurelia aurita
MIDSIASKTLEYDRFQFKGNYELWVKVIRLISSQFTDTDGSFKSLQGPGQPWKIQFVKFCNRVVHSLPWEHNKFEKNWSKLELLEGQLSYIKKTIQPYFSSKQYNTNNNNNKVTREKLVQLWFDEKKKAINIINNKGAWPETVHAKIDKQKTEEYYENKYSRHRSNLKQIVEDFPGRNDNIPNFTPEEAGDIIRGLPSGKKWGYDGVCFEDFKKDLPNTSVQVSDILNVIKHYKKSPRTWKGALIRRNPKKNYDPDDLTTLRDISLLPTIYKIFAKCLVKRILPKIIGTAVQFWQRAYIKNRDRQELIFLMKTAIDDFKHTSSRFYAIFVDFRDAFGSIDQEYLIRSLLDCGLEKTYCLLIADIYQDSYFEVICGKELSKEFLLTIGTKTGDPLSAILFIITLDKALKEVHNRAIISLNIQDEQRISPLPFAGYADDIALVSCFENVLKEMLDVLIEKTRDSKLCIRPDKCAILYERRSGNRWYKAKGDKPPDIKINGEKIKVNGRHEPFTYLGKPLTVAGEDENQVPNMLRDYSEILENIIACSLPLALKIEALGTMGLSKIEHHFGNTCITEEQLQEFDKVLISCLRKIFNLNNNTTTRTMFIKKQHGGLGVRKPSTIYRATRINLLIKMLNHPDSNFQFIARNSLILDFKKRGIPRSEANNNFLGYAVKENGMLETHIKGGFGVQSDWPQLFHLVKKIDADLKWEKNTEDLHCAGKAQLILKLKHNETRLVQNNRIQKEIIGDQLSKELENLKDLPMQGRLVDNKSADYLMSQNIFRNYKLTDELIYFWYKARHNVLPCYYTLSLWYANQPATCVLDGYHIESTAHVLNGCQKLKNNYSKRHDRIVDKIGNDVKSNENTVIINKTVRTALQESGLESEDNDEELLNLKPDILIKEENRIIILDIACPYDLYLAELYELKLDKYRDLQRYITEKFLPCKVDAIVIGSLGTVHTNALKVLIDTGMSKTKAKGLLKWSSTSCIIGSRQIWNIRCKLVKEN

SEQ ID NO: 17989 - protein, 757 aa, Oikopleura albicans
MTSKTKTAAGASRVNMGQLKKFAKSNLDDLCVFFNALLRAGQLPSMLKRGRVTLLPKVSSAGNDPALYRPLTVNCVLFRSMMKIVDRRLKTALDGKISPYQLGLKQGTNGCAVGVISARAAVAHAQSKQRSIVVAALDMKKAFDSVKHSAIYDALINAEVPIYLVNIILASLQGITRTIKTKSGQVFIKPTRGVAQGLAVSGTLFCLVTDVFREVMVNHGYPLTDEIQAIPTPNQLYSGFFYHDDLVLADSSPYSIAHRVERLVELAEGVGLTLNWNKSSFFGTHRERNKSKKYTKLSEDIVIGQKTLKCIRSLKYLGAELEMKREKPNFKLNLSAKIDAIVNSELSMKNKLTALRIHVFPTQLYTLSLHSTVSYWRKSERVNKSRLYLHLDKLISDAIRRILHIGPAGGTMKLAYVPTGKGGLGFTRYQDVVPGMRYRLMRSFDSSNQNHIIKRFCFQDEANLSEFERELNYTTRENRREKIASKKVTEFTSLRNGAGNWLLPDHKVCFAPLNTRMLSGRGLLASFRLRSLQLGLRIGSNCRFCGRAPETAIHLLCQFGSRCDDKVKQYQIDRHNYISQIVFDNLDRQLKPQNRLGFIDIIKEGTFGTGVNRVRPDIVIIDRKNHCVFVMDIQVTYGSKREPNSGRRVETLNARASEKVNKYRAYDGVFLTLINWIPDQICKVYHIPFVVGAFGTSLTTYRSITTASYRKLESLGVKPQKILRAAAAGALRWGAVHLHNLLENNTQPPPRTVRINY

SEQ ID NO: 17990 - protein, 956 aa, Oikopleura albicans
MSKKRRRNSLGSLQPESKRMQATRAPRTLGESPVRQSVLPVPHPLVQVDVESGDPSGPFLPLEAPDEPRNGYPSHLQPEIPVLVTLNELLLAGATPVVDNSTYCKVVAFITDKYFILRSRKRGKRRSETVNDRFNIDPSKTIKGITGTPTTTALPTARSVRRLYNALWVQDERFQYPQLACSQEQVEWFQPCEVKDAILTSKTKTAAGASRVNMGQLKKFAKTNLDDLCVFFNALLRAGQLPSMLKRGRVTLLPKVTNAGNDPSLYRPLTVNCTLFRTMMKIVDKRLKIALDGKISPYQLGLKQGTNGCAVGVISARAAVAHAQMKQRSIVVAALDMKKAFDSVKHSAIYDALINAEVPIYLVNIILASLQGITRTIKTKSGQVFIKPTRGVAQGLAVSGTLFCLVTDVFREVMVNHGYPLTDDIQAIPTPNQLYSGFFYHDDLLLADSSPYSIAHRVERLVELAEGVGLTLNWAKSSFFGTHRERTKAKKYTKLSEDITIGQNTLKCIRNLKYLGAELEMKREKPKFKDKLSAKIDAILNSELSMKNKLTALKIHVFPTELYALSLHSTVSYWRKSERINKSRLYSHLDKLILDAIRRILHIGPAGGTMKLAYVPTGKGGLGFTRYQDVVPGMRYRLMRSFDSSNQNHIIKRFCFQDEANLCEFERELNYTTRENRREKVATKKVSEFTSLRNGAGNWLISDHKVCYASLNTRLLSGRGLLASFRLRSLLLGLRLGFNCRFCGRAPETAIHLLCQFGNSRCDDRVKQYQINRHNYVAQIVFDNLDRQLKPNNRVGNIDLFKEQSFGTGRNMIKPDIVLVDRNNNCVFVMDIKVSYGSKREPNSGRRVETLNAGASEKVNKYRAYDSVFMSLINWIPGQICKVYHIPFVVGAFGTYLTRHRSITTVSSRKLESLGVKPQKILRAAAAGALRWGAVHLHNLLENNIQPPPHAVRINY

SEQ ID NO: 17991 - protein, 1155 aa, Alatina alata
MTTRKDGLTIGKTVDAGKTDRSSWAYNPGFWYIIVTSAKVNDSPMIDREGGVENQSTQRKTKMDSERKRTTNLDNGKTEDNYGCSECNRTFKSERGLRIHQGKVCKKRLMQCGSSDRKTRSKSSPEANHSGAIIATAETCSVSSKEVKGNGVGENSTKKPKVLWPAASEKTKYKDLEEKVCKGVYKMKGTTQEKLKKLSNTIYDIAAELFGVRTGASSGPRIETKGLSRRERRLLQLRREKNQLRKRWKKATDIEKPGLKVLHEEMKKKCREVQRNLRRCKRRKESRTAREQFLKNPYEAAKKMFTKAKGGMLKCTKKELDDHISKTFSDAKRDETLPPMEGLKHPTKPGVKFDLGGIREKEVEDFVRKARAKSAPGGDGVSYKVYKYCTRLRHKLFLLLRDLWQKTEIAEEWCEAEGTYLPKETESELINQFRPISILNVDGKIFMGILAKRTMTYLQDNGYVDVTVQKAGIPGVPGCVEHAFSIWDTIQNAKRNKEDLSVVWLDLANAYGSVPHQLLMKSMEHFYIPGKVQVLMKRYYNKFKMRFTTKEFTTDWHPLEVGIAAGCTISVIWFVLVMELLLRSTHCPEEVAHVQPNKAFMDDITLLTRSQIVMRNTLERLDSLVTWGRMTFKTKKSRSVTFRKGVQKEVKYSLNGEYIPTVKEEPVKSLGRWYANTLSDRSRGIEVMNQAEEGLAAIDQSKLPGKYKIWCLQFGLYPRLAWPLMMYDVALSRVEIIEQKCSVCIRKWLGLPNVTNNSALYRSKGSLQLPITSIVEIYKTGKVRTVMMLKESKDSTISTCHPEVRTGRKWNAEEETENCISSLEHRDIIGAVCKGRKGFGSDPFKPFSCMSQKERRESVVQCIKDSEAEKRELHLIQCAHQGQMTKWEENVVERKIGWKEIWEWSTSRTSFLIRSTYDVLPSLTNLVRWKIAEDDTCRCGKKGTMKHILSNCNLALDRYTWRHNEVLKILFREATAQIKEINFGKRPKRFAAKQNITFVRQGQPSCIKQDVAMEEKELWSGTWEVAADLARCQMQFPIPTAKKPDMFIVCKERKTVNMIEFTVPHEDNMDAAQVRKDERYEGLINECEDAGWQVTHFPVEVGCRGFIGGRMRRWLLTLGLSHRKVSKVQMEIQKTVEKASHWIWLKRNDGEWSEK

SEQ ID NO: 17992 - protein, 1373 aa, Pardosa pseudoannulata
MPFCIFCAGPEFGNEDAVFRHIYDEHRIYNDSGGWSEDQIIHLAKIENFVNVLKPEVRNINVVLASCFYGHDRNDIKRFRATARYKEHLELINETSVLCHENVGDTSDISFTDNGDMGSGLPNPSNNNDVVAHNLELNVTADIGTTVASPLSNNDLSTSDVDPGAKHVCIFCDKYFKTKIGVSQHKRHRHLEEYLLEIQLKYGSSRNTLWTDEELALLAYANHKARNIPGIKFINQHLNSLFPHRSTNQISCIRKTKRFRLLYSDICKTGTTGSSDFFSPRTSGVPVIDASMSSEASRSLSSTGKFSGVNLLFSPTGTSSPLSVANRNYDLNNGEDSLANCQVSYIPDTQAAEENKAEMEVTSNDEGNGDCVNIYGNSGVNSVRNNGVNSKNELVNCDDEPNNRDDGSVLQNNFINCRNVDVSNLTGNVDGSPEGVIMMNDTSVLVPSTQSMCDDPCTVGVATVDSVVHEPLVIDETVMEVRNNTDKDNLDANIVCWRKKCSDRILEFLGKIDQTGVPDGFGDGLFSFDTFYENDGFSKYLQDFIIRHFKLEGISFNDNGVVFDKIKPFNHDFTKRILNPDNPNRRTHKARQYAEFQKLFCKNRRRACSDLLDGSNSAEDISPGDITSFWSRIFRPYGVNDEVYNTTNNFNEDDFNFWRPIGLTEIKSCLPDSSVAAGPDGINAGAIRGCSLNLLCFILNSFILLGSVPLFLRESRTIFIPKCIDAKDPGQLRPISMASVLCRLYHKVIARRIEDQNNYVNQFGFKRLDGTAACVYMTDALIKFHKKEIKPFYLAFMDLKKAFDSVDHGAIFCVLAKKGLPTSFVDYVKKFYCDASSILMWKGRRVARVFPSRGVRQGDPLSSTIFNIVIESILKQLNPIVGIKINSNNERINNIAYADDVALLANSEIGLKMLVDQFGELCGKVGLQINFEKSRVIKLRPIGKVGKIIPDMVDLKCKNGVIPALGYKSHASFKYMGVSFCANGIVAYRVGDEISSYLNSIKSCPMKPQQRLWIVKNIVIPRIIAKLAFNVYTIKCIKSVDVKIRSYLRDVLKLPHDVPNAYFHAGVGDGGVGVLDFRWRAFILRHNRLNNFVRSVGAVSDIFIKYAESYMELCNKALVYDAATIRSGSDVLNMHRDALYHSNDGGDLSASNRVNGQHKWINSCNRFFTGHDYIAMHRLRINALPSRVRCSRGRANDHKCTAGCPSTETTYHMVQSCPKTHGIRVKRHDNIVKYVAKRAGARADHVVVEPHINTNDGLRKPDLLVIKNKVAYVVDVQIVNYDNKYLEQYNTNKINYYKNNKSLTSNIKEKFEVSNVHYKALTISWKGVWCRSSATAMVNLGFISKNDLMILSTRAMVGGIIAFKFWQRSTSYF

SEQ ID NO: 17993 - protein, 1655 aa, Ephydatia muelleri
MAGSLSDDDCWTRVYPEKGLLSCPRCYVSFWRAKLREKHVSESHNLPRQQWMCSECQGCFPTKRHVANHFIRAHPSSSSRVSSDDEDLEEDGAAEVLAFQCQYCEKSLPSKQGLRNHERQFHQAAVSAALAQQAATEQTSSSRSVGVPPQQAVAHQTRKSWTDQEVERFKEAAKRLGLKSNIALAKAVGTRSAKQIASFKSRFIRNNPTWAHLLELPTQTPPTPCSSVSTGGSTPPSAYTPNGQQRESVATPTSEHTLHDSPPPFGEHTVSAPSPSLSDLMSRQDDPGEQPRTSAMVDMANRVLRVLRRPAEEMGVAEKGSQSLSTPSGQPRDRIPSNNTTLPADSEVVEILNQLLETPMTWEREPANGPEEEVLTNFDLGDAPDWEELPPSPQPCTEENNTPCVTGWPFSPVSPTAIGYSPVTNTEETEDHCLEGGSESQGTPTPQGTRSGPDYALRDYLQGNVVFLSPRIHWPYSPIPPNTPGPGISNYLDPKSPKPPSRVPDRGWMDSQNSGKGKSPVGRKGYNKGGRTRKVAQGTNQPCRGVVVQGSGMGQGPTRNGASSHRPNTAGQRTIVRPPPIQVPQSTPEVTPRPRKDGSGRPRPSTMDLDTNQSPRGVVVQGVGHRQGPISREESSSGNSTAGQRATGHPPPTHVPQTTRGTAPRPQDAFGRPRPQTRDLGTTNRPATSTSNPPPEIAPLPMCKEDDRAPQKLFNTLRPLTGRVLSPVEWTRWCHGLERWTAGLSEWAYRRAEVTTPQKAWKRRQMDKRSGQQQGQRGEPRQVAGLEGRSQGPHQTGQPQRNRTITRMANLQRKYNDSPKQCMDAIRHTPPTLRCEVSIEEVNAHFAAKLASPQGIDDSVPPPVDLRQNRVPCDVLGPPITQGEVKRTLQSMDSRSAPGPDRIRYNTWKHLDPQQEIVTVILNTCRANGKIPPAWKTSATILIHKGDDPLVLDNWRPIALQNTLYKVYAAIIAKRISSWAMETGVMSPSQKGFLPMEGCLEHNHLMTSVLQDSRRRKRPAYLMWLDLKDAYGSVPHEILFRVMELSGLEGTTMDVVKDFYEGTTTSIRTKRKATDPITIKRGVKQGCPLSPILFNLVMEVLIRAAEEVPEAGYKIANSTIKSLAYADDLCILASSPQKLQEMLDRLHLASTWAGLSFSPRKCAALSIVRSYRARQRVDNCIYKLGDTVVPTMAWEDRYKYLGVKKGADHSPDLQAVGKEYLKDVEVIASSELTDWQKLDAIHRFAKPRLVYALQNQLPPIQWGKTLDKKVRALMKNNLKLPRRTNDGFMYAPTRVGGLGLPRVEDEIHIYGVSTAYRLLAISKDPIVTDTAVSGLGATAKRRAGGRRTAEEFLNAPPEKGEGKQGDIKSLWSRVRMSLQCCQATISLARKTITIAGREFGPSKRNLVCRAMRTAIQEGHLLRWIRAKDQGRAAECLAAHPSGNHWIRGGKYTSFSEYRFAHKARVNLLPTRTVRKRSGEMIADVSCPKCHEEQETLAHVLNHCPPHVGLIRARHNKILHRLAKAVPPAKGRQFLEQMVPGDRMALKPDLVILNEAKSEAYVVDVAVPFEGEESFPAARRAKEDKYNHLKALLRSKGYRKVEVDGFVIGALGSWDPENEAVLHKLSIGHKYASLFRKLCCTEAIKGSYAIWKAKTG

SEQ ID NO: 17994 - protein, 828 aa, Lamprigera yunnana
MSIDVVLGELGVGKGGTDHRGRPPPSGTYEGKGAERRHKYKIAQRLYHSDRARLANSILSDVPLDSVTDYPKVSQVEEVYRGLFETPGPPDDEPFDVLEGGTGREWSPILADEISWALRSTKSPAVGSDGIKLTTLRRAPSHRIGLLVNAILLLGRLPVSISDSRTILIPKGKGDPKNVGSWRPITIGSAVARVMSKILAKRLAGLPIHPHQRGFRAVDGVLMNCVTLDALITARRRAGRPYSCVALDLAKAFDSVSHSAINRALRRFGVDARLAGFVGGCYAAARTRIQLGTRNTSWISIKRGVKQGDPLSPILFSLVLDELVVRLESLGQGLGYGEDGRSVSCLAYADDLVLASDSEKGCRTLLNEAASFFDRRGLMINPDKSVALSVRVVPGKKTLFTSTVSRLFVKGRPIKPLAPGEWFKYLGQRYSSAGMVKTAIDDLRAQLRRVSAAPLKPNQKFDILRNYLCPRVLAALLNCRVGMGCLKSADRLVRIEARKILHLNRTCADAFIHAPVRLGGLGVPALHTQVPAILVRRLTRMSLEPSASPILALPSVVQTLGRLGRWAEKYGGTTTTENRRMWGERLDASYSGGGLMQGHNSTYSGAWIADPPAFWSGADYIKAVQLRGNLLPTRGIPSNPPPLRRCRAGCNRVESLSHVLQGCPSVHWQRIRRHNRVCARVRQLAVRKGWSVEEEPHLRLANGELRKPDLLLFKGDEAVVCDVAIPWEGPRSLAAASCEKITYYNQPLVAQALARRYQGLSISHMPLIIGARGTWCDANDRLCRTLRLSKAEVRTLVHNTIDGSVILHREFMRAVWARSADHMLPRGQ

SEQ ID NO: 17995 - protein, 1023 aa, Sacculina carcini
MISCVVCDLHGQTHLRFGAVVCRACQAFFGRHHSDDRSSRTCQNGGHCDVSHGSRICAPCRLDKCIAAGMLYQVREQQPAGSVSHIASDETAACSVCSLTNSRKRSINCTACSQSFHLSSAGLTRRQADSLQSWCCDGCLEAEAHEDAINGPAEEMGPETPSNIADALAALSRQASVRQHVPRRLRHRVASELAHLIKEAIDQRSLRAWWHLLSYARTGPMSNQPTAPTSQMTRSGGSDTRSPTSSCSALSRRVNTKCADGDIRGALRLLSSSDTVIPPTADIAAIIQEKHPDTADELPADLLSDVPPAMIVDENEVRQAINTLPKGSSGGLDGIRPMHLRQLVSPKTAEAGQHLLTALTALCNTAIAGNIPDFARSGFFTARLIAVRKKSGGVRPIAVGSTLRRLASKLVASRLAASVTPLLRPVQLGGATPMGCEAAVHATREYATEHIDSPEHIIFKLDLQNAFNTVSRRAVLQEVRRRFPAAVQLVYQAYGHPTPLYLGQTKIWSCTGVQQGDPLGPLLFALAVDHVARSCQSPLNAWYLDDATLGGPATSVRNDIKKIVPLLRSIGLEVNSAKCEVCRLSNCGAIQADSDPLSQAKVIPLSELTLLGAPLMHGGIDFALTKIAEATNLLRERSAGLQSHVALFFLSRYSSVPRATYLMRAAPVHTASTQLKSIDDTLRAAICQSCNVSMTNSSWTQASLPVGLGGIGSRRMADVALPAFVASLESTIYLVSRIIGRESVDRPGALVAALQQYVAEQCPNWSSDETITQRNLDRQASKMRQQNLLSTANQIERARILAAATSHIGAWLHALPVASLGLLLPDDVVRVGVALRIGSPVQQSHRCRCGAMSDKWGHHALSCQQSAGRIPRHTALNDTVYRGLAAAGIGAVLEPRGLDRGDGRRPDGITVYPFTSGKSLVWDATCSNTFSTTHTLNCAINAGAAALAAEQRKRQRYASLTDRYHFVPVAVETSGALGPACETLCKHIGRKITERTGEKRETAWLIQRVSLAIMRGNAACVLL

SEQ ID NO: 17996 - protein, 1023 aa, Sacculina carcini
MISCVVCDLHGQTHLRFGAVVCRACQAFFGRHHSDDRSSRTCQNGGHCDVSHGSRPCAPCRLDKCIAAGMLYQVRGQQPAGSVSHIARDETAACSVCSLTNSRKRSINCTACSQSFHLSCAGLTRRQADSLQSWCCDGCLEAEANEDAINGPAEEMGPETPSNIADALAALSRQASVRQHVPRRLRHRVASELAHLIKEAIDQRSFRAWWHLLSYARTGPMSNQPTAPTSQMTRSGGSDTRSPTSSCSALSRRVNTKCADGDIRGSLRLLSSSDTVIPPTADIAAIIQDKHPDTADELPADLLSDVPPAMIVDENEVRQAINILPKGSSGRLDGIRPMHLRQLVSPKTAEAGQHLLTALTALCNTAIAGNIPDFARSGFFTARLIAVRKKSGGVRPIAVGSTLRRLASKLVASRMAASVTPLLRPVQLGVATPMGCEAAVHATREYATEHIDSPEHIIFKLDLQNAFNTVSRRAVLQEVRRRFPAAVQLVYQAYGHPTPLYLGQTKICSCTGVQQGDPLGPLLFALAVDPVARSCQSPLNAWYLDDATLGGPATSVRNDINKIVPLLRSIGLEVNSAKCEVCRLSNCGAIQADSDPLSQAKVIPLSELTLLGAPLMHGGIDFALTKIAEATNLLRERSAGLQSHVALYFLSRYSSVPRATYLMRAAPVHTASTQLKSIDDTLRAAICQSCNVSMTNSSWTQASLPVGLGGIGSRRMADVALPAFVASLESTRYLVSRIIGRESVDRPGALVAALEQYVAEQCPNWSSDETITQRNLDRQASKMRQLNLLSTANQIERARILAAATSHSGAWLHAVPVASLGLLLPDDVVRVGVALRIGSPVQQPHRCRCGAMSDKWGHHALSCQQSAGRIPRHTALNDTVYRGLAAAGIGAVLEPRGLDRGDGRRPDGITVYPFTSGKSLVWDATCSNTFSTTHTLNCAINAGAAALAAEQRKRQRYASLTDRYHFVPVAVETSGALGPACETLCKHIGRKITERTGEKRETAWLIQRVSLAIMRGNAACVLL

SEQ ID NO: 17997 - protein, 1269 aa, Emydura subglobosa
MEKTEILFHTGLALDRVKNAPATSFDAPASSIKLIRGIIHRAGPMLSPYAIDRVKDGIAGFMDDFNLQVGEKSVVREEQEDFSESQVLDFNLLPMAFTNVLYSDLKIIDSKSSFYDKYLDSFDDPYLIEFNNLNNNNINFNNLQHDFMENRRNILGDNFNTNFMNTASFKESSSFKEGIFYLEYPVDCFNCPICSQILASFGKWAKHINNVHKSTSIRVICKKCGKHSQFHNIACHYPKCRPKEVDNSEKKYACTVCGSAFYTRSGRSQHIRHRHPVVRNEERKEARVVGKTIRSRVWTEEEIELLIQLEIKYVGTRNINKCIESELKTKTNKQISDKRRDLAKNKVKKDEDSMVLWEEGGMGDILEDIPPREKIKPLKDKILIDRILTGVRCNGAHILEKLDFIEQQLNASATVAEGWGLFEELCKLLMNSPHEDVENLENNKENNIQNDNGKQGRKVGKPPDKYNRNRKYAGRKAKFRFYQTLFEKDKKRLARIIMGEPDKATCKIAVKEIETYYKEILGREGHGNTRGWPKVKEVLDNEILNWPLSIDEIREALREIDNSSAPGPDGIKVKDLWDIYNLDSRILVRIFNIWFLNRQIPECFKGNRTILIPKVKDPQELKKISSWRPLTIGSIWIRLYTKILAKRLSSAVKLCPRQKGFIAASGCEENISILEKLIKGAKKNKDEIAVVFIDLAKALDLVGHGHILKGLKRFGISESFIDIVKDLYTDCYTEISVGDDKTEPILIKSGVKQGDPLSPILFNIAMDPLLYKLEDEGDGFIVQGRKITSLAFADDIAILSRSYKGMVKNLKTLNQFCKNSSLKVNVKKTKGFHIFPSMGTYVINPKDKWGLGDELIDYIQPGESERYLGARIDPWMGVANNSPKEKLVDWCESLCKAPLKPAQKLINLKVYILTRIFYELLLIEPPLYMLNELDVLVRNTLKKILHLPQCTTDGLFYARTRDGGLAVTKFSTQIPNMLIRKWRRHIVSKDDWIDFSFLYAGESLVEKILIYSAKTANPKTWRDEEFLKWSNLRCQGIGIKYFKNDCISNSFLKYPCLARSSSLIAALQTRANVFPTREALARGRKMEEGLCRWCGKVKETIPHISGQCIKTKEARIKRHNRIVKALIDKVGNKGCKIWIEPYLHNKEGKLRKPDLIIEKEGVVAVVDVTVRWEDNADSVEAAHSEKEVYYSELEEEVLQLTGGKIIHFLGFVVGARGKWSERNDEIFKILGIDKFKSFKESVCRLAMYATTDMLALFSDKHSFCVSCGF

SEQ ID NO: 17998 - protein, 908 aa, Emydura subglobosa
MVLWEEGGMGDILEDIPPREKIKPLKDNILIDRFLTGVRCNGARILEKLDFIEQQLNASATVAEGWGLFEELCKLLMNSPHEDVENLENNKENNIQNDNGKQGGKVGKPPDKYNRNRKYAGRKAKFRFYQTLFEKDKKRLARIIMGEPDKATCKIAVKEIETYYKEILGKEGHGNTRGWPKVKEVVDNEILNWPLSIDEIREALREIDNSSAPGPDGIKVKDLWDIYNLDSRILVRIFNIWFLNRQIPECFKGNRTILIPKVKDPQELKKISSWRPLTIGSIWIRLYTKILAKRLSSAVKLCPRQKGFIAASGCEENISILEKLIKGAKKNKDEIAVVFIDLAKAFDSVGHGHILKGLKRFGISESFIDIVKDLYTDCYTEISVGEDKTEPILIKSGVKQGDPLSPILFNIAMDPLLYKLEDEGDGFIVQGRKITSLAFADDIAILSRSYKGMVKNLKILNQFCKNSSLKVNVKKTKGFHVFPSMGTYVINPKDKWGLGDELIDYIQPGESERYLGARIDPWVGVANNSPKEKLIDWCESLCKAPLKPAQKLIILKVYILTRVFYELLLIEPPLYMLNELDVLVRNTLKKILHLPQCTTDGLFYARTRDGGLAVTKFSTQIPNMLIRKWRRHIVSKDDWIDFSFLYAGENLVEKILIYSAKTANPKTWRDEEFLKWSNLRCQGIGIKYFKNDCISNSFLKYPCLARSSSLIAALQTRANVFPTREALARGRKMEEGLCRWCGKVKETIPHISGQCIKMKEARIKRHNRIVKALIDKVGNKGCKIWIEPYLHNKEGKLRKPDLIIEKEGVVAVVDVTVRWEDNADSVEAAHIEKEAYYSELEEEVLQLTGGKIIHFFGFVVGARGKWSERNDEIFKILGIDKFKSFKESVCRLAMYATTDMLALFSDKQ

SEQ ID NO: 17999 - protein, 1260 aa, Emydura subglobosa
MEKTEILFHTGLALDRVKNAPATSFDAPASSVKLIRGIIHRAGPMLSPYAIDRVKDGIAGFMDDFNLRGGEKSVVREEQEDFSESQVLDFNLLPMAFTNVLYSDLKIIDSKSSFYDKYLDSFDDPYLIEFNNLNNNTNFNNLQRDSMENRRNILGDNFNTNFMNTASFKESSSFKEGIFYLEYPVDCFNCPICSQILASFGKWAKHINNVHKSTSIRVICKKCGKYSQFHNIACHYPKCRPREVDNSEKKYACTVCGSAFYTRSGRSQHIRHRHPAVRNEERKEARVVGKTSRSRVWTEEEIELLIQLEIKYAGTRNINKCIESELKTKTNKQISNKRRDLARNKVKKDEDSMVLWEEGGMGDILEDIPPREKIKPLKDNILIDRFLTGVRCNGARILEKLDFIEQQLNASATVAEGWGLFEELCKLLMNSPHEDVENLENNKENNIQNDNGKQGGKVGKPPDKYNRNRKYAGRKAKFRFYQTLFEKDKKRMARIIMGEPDKATCKIAVKEIETYYKEILGKEGHGNTRGWPKVKEVVDNEILNWPLSIDEIREALREIDNSSAPGPDGIKVKDLWDIYNLDSRILVRIFNIWFLNRQIPECFKGNRTILIPKVKDPQELKKISSWRPLTIGSIWIRLYTKILAKRLSSAVKLCPRQKGFIAASGCEENISILEKLIKGAKKNKDEIAVVFIDLAKAFDSVGHGHILKGLKRFGISESFIDIVKDLYTDCYTEISVGEDKTEPILIKSGVKQGDPLSPILFNIAMDPLLYKLEDEGDGFIVQGRKITSLAFADDIAILSRSYKGMVKNLKILNQFCKNSSLKVNVKKTKGFHVFPSMGTYVINPKDKWGLGDELIDYIQPGESERYLGARIDPWVGVANNSPKEKLIDWCESLCKAPLKPAQKLIILKVYILTRVFYELLLIEPPLYMLNELDVLVRNTLKKILHLPQCTTDGLFYARTRDGGLAVTKFSTQIPNMLIRKWRRHIVSKDDWIDFSFLYAGENLVEKILIYSAKTANPKTWRDEEFLKWSNLRCQGIGIKYFKNDCISNSFLKYPCLARSSSLIAALQMRANVFPTREALARGRKMEEGLCRWCGKVKETIPHISGQCIKMKEARIKRHNRIVKALIDKVGNKGCKIWIEPYLHNKEGKLRKPDLIIEKEGVVAVVDVTVRWEDNADSVEAAHIEKEAYYSELEEEVLQLTGGKIIHFFGFVVGARGKWSERNDEIFKILGIDKFKSFKESVCRLAMYATTDMLALFSDKQ

SEQ ID NO: 18000 - protein, 809 aa, Emydura subglobosa
MVLWEEGGMGDILEDIPPREKIKPLKDKILIDRFLTGVRCNGARILEKLDFIEQHLNASATVAEGWGLFEELCKLLMNSPHEDVENLENNKENNIQNDNGKQGRKVGKPPDKYNRNRKYAGRKAKFRFYQTLFEKDKKRLSRIIMGEPDKATCKIAVKEIETYYKEILGREGHGNTRGWPKVKEVVDNEILNWPLSIDEIREALREIDNSSAPGPDGIKVKDLWDIYNLDSRILVRIFNIWFLNRQIPECFKGNRTILIPKVKDPQELKKISSWRPLTIGSIWIRLYTKILAKRLSSAVKLCPRQKGFIAASGCEENISILEKLIKGAKKNKDEIAVVFIDLAKAFDSVGHGHILKGLKRFGISESFIDIVKDLYTDCYTEISVGEDKTEPILIKSGVKQGDPLSPILFNIAMDTLLYKLEDEEDGFIVQGRKITSLAFADDIAILSRSYKGMVKNLKILNQFCKNSSLKVNVKKTKGFHIFPSMGTYVINPKDKWGLGDELIDYIQLGESERYLGARIDPWVGEANNSPKEKLIDWSESLCKAPLKPAQKLIILKVYILTRVFYELLLIEPPLYMLNELDVLVRNTFKKILHLPQCTTDGLFYARTRDGGLAVTKFSTQIPNMLIRKWRRHIVSKDDWIDFSFLYAGENLVEKILIYSAKTANSKTWRDEEFLKWSNLRRQGIGIKYFKNDCISNSFLKYPCLARSSSLIAALQTRANVFPTREALARGWKIEEGLCRWCGKVKETIPHISGHCIKMKEARIKRHNRIVKALIDKVGNKGCKIWIEPYLHNKEGKLRKPNLIIERKEW

SEQ ID NO: 18001 - protein, 908 aa, Podocnemis expansa
MVLWEEGGMGDILEDIPPREKIKPLKDNILIDRFLTGVRCNGARILEKLDFIEQQLNASATVAEGWGLFEELCKLLMNSPHEDVENLENNKENNIQNDNGKQGGKVGKPPDKYNRNRKYAGRKAKFRFYQTLFEKDKKRLARIIMGEPDKATCKIAVKEIETYYKEILGKEGHGNTRGWPKVKEVVDNEILNWPLSIDEIREALREIDNSSAPGPDGIKVKDLWDIYNLDSRILVRIFNIWFLNRQIPECFKGNRTILIPKVKDPQELKKISSWRPLTIGSIWIRLYTKILAKRLSSAVKLCPRQKGFIAASGCEENISILEKLIKGAKKNKDEIAVVFIDLAKAFDSVGHGHILKGLKRFGISESFIDIVKDLYTDCYTEISVGEDKTEPILIKSGVKQGDPLSPILFNIAMDPLLYKLEDEGDGFIVQGRKITSLAFADDIAILSRSYKGMVKNLKILNQFCKNSSLKVNVKKTKGFHIFPSMGTYVINPKDKWGLGDELIDYIQPGESERYLGARIDPWVGVANNSPKEKLIDWCESLCKAPLKPAQKLIILKVYILTRVFYELLLIEPPLYMLNELDVLVRNTLKKILHLPQCTTDGLFYARTRDGGLAVTKFSTQIPNMLIRKWRRHIVSKDDWIDFSFLYAGENLVEKILIYSAKTANPKTWRDEEFLKWSNLRCQGIGIKYFKNDCISNSFLKYPCLARSSSLIAALQTRANVFPTREALARGRKMEEGLCRWCGKVKETIPHISGQCIKMKEARIKRHNRIVKALIDKVGNKGCKIWIEPYLHNKEGKLRKPDLIIEKEGVVAVVDVTVRWEDNADSVEAAHIEKEAYYSELEEEVLQLTGGKIIHFFGFVVGARGKWSERNDEIFKILGIDKFKSFKESVCRLAMYATTDMLALFSDKQ

SEQ ID NO: 18002 - protein, 1260 aa, Emydura subglobosa
MEKTEILFHTGLALDRVKNAPATSFDAPASSVKLIRGIIHRAGPMLSPYAIDRVKDGIAGFMDDFNLRGGEKSVVREEQEDFSESQVLDFNLLPMAFTNVLYSDLKIIDSKSSFYDKYLDSFDDPYLIEFNNLNNNTNFNNLQRDSMENRRNILGDNFNTNFMNTASFKESSSFKEGIFYLEYPVDCFNCPICSQILASFGKWAKHINNVHKSTSIRVICKKCGKYSQFHNIACHYPKCRPREVDNSEKKYACTVCGSAFYTRSGRSQHIRHRHPAVRNEERKEARVVGKTSRSRVWTEEEIELLIQLEIKYAGTRNINKCIESELKTKTNKQISNKRRDLARNKVKKDEDSMVLWEEGGMGDILEDIPPREKIKPLKDNILIDRFLTGVRCNGARILEKLDFIEQQLNASATVAEGWGLFEELCKLLMNSPHEDVENLENNKENNIQNDNGKQGGKVGKPPDKYNRNRKYAGRKAKFRFYQTLFEKDKKRLARIIMGEPDKATCKIAVKEIETYYKEILGKEGHGNTRGWPKVKEVVDNEILNWPLSIDEIREALREIDNSSAPGPDGIKVKDLWDIYNLDSRILVRIFNIWFLNRQIPECFKGNRTILIPKVKDPQELKKISSWRPLTIGSIWIRLYTKILAKRLSSAVKLCPRQKGFIAASGCEENISILEKLIKGAKKNKDEIAVVFIDLAKAFDSVGHGHILKGLKRFGISESFIDIVKDLYTDCYTEISVGEDKTEPILIKSGVKQGDPLSPILFNIAMDPLLYKLEDEGDGFIVQGRKITSLAFADDIAILSRSYKGMVKNLKILNQFCKNSSLKVNVKKTKGFHVFPSMGTYVINPKDKWGLGDELIDYIQPGESERYLGARIDPWVGVANNSPKEKLIDWCESLCKAPLKPAQKLIILKVYILTRVFYELLLIEPPLYMLNELDVLVRNTLKKILHLPQCTTDGLFYARTRDGGLAVTKFSTQIPNMLIRKWRRHIVSKDDWIDFSFLYAGENLVEKILIYSAKTANPKTWRDEEFLKWSNLRCQGIGIKYFKNDCISNSFLKYPCLARSSSLIAALQMRANVFPTREALARGRKMEEGLCRWCGKVKETIPHISGQCIKMKEARIKRHNRIVKALIDKVGNKGCKIWIEPYLHNKEGKLRKPDLIIEKEGVVAVVDVTVRWEDNADSVEAAHIEKEAYYSELEEEVLQLTGGKIIHFFGFVVGARGKWSERNDEIFKILGIDKFKSFKESVCRLAMYATTDMLALFSDKQ

SEQ ID NO: 18003 - protein, 1155 aa, Emydura subglobosa
MAQCSKSSFYDKYLDSFDDPYLIEFNNLNNNTNFNNLQRDSMENRRNILGDNFNTNFMNTASFKESSSFKEGIFYLEYPVDCFNCPICSQILASFGKWAKHINNVHKSTSIRVICKKCGKYSQFHNIACHYPKCRPREVDNSEKKYACTVCGSAFYTRSGRSQHIRHRHPAVRNEERKEARVVGKTSRSRVWTEEEIELLIQLEIKYAGTRNINKCIESELKTKTNKQISNKRRDLARNKVKKDEDSMVLWEEGGMGDILEDIPPREKIKPLKDNILIDRFLTGVRCNGARILEKLDFIEQQLNASATVAEGWGLFEELCKLLMNSPHEDVENLENNKENNIQNDNGKQGGKVGKPPDKYNRNRKYAGRKAKFRFYQTLFEKDKKRLARIIMGEPDKATCKIAVKEIETYYKEILGKEGHGNTRGWPKVKEVVDNEILNWPLSIDEIREALREIDNSSAPGPDGIKVKDLWDIYNLDSRILVRIFNIWFLNRQIPECFKGNRTILIPKVKDPQELKKISSWRPLTIGSIWIRLYTKILAKRLSSAVKLCPRQKGFIAASGCEENISILEKLIKGAKKNKDEIAVVFIDLAKAFDSVGHGHILKGLKRFGISESFIDIVKDLYTDCYTEISVGEDKTEPILIKSGVKQGDPLSPILFNIAMDPLLYKLEDEGDGFIVQGRKITSLAFADDIAILSRSYKGMVKNLKILNQFCKNSSLKVNVKKTKGFHVFPSMGTYVINPKDKWGLGDELIDYIQPGESERYLGARIDPWVGVANNSPKEKLIDWCESLCKAPLKPAQKLIILKVYILTRVFYELLLIEPPLYMLNELDVLVRNTLKKILHLPQCTTDGLFYARTRDGGLAVTKFSTQIPNMLIRKWRRHIVSKDDWIDFSFLYAGENLVEKILIYSAKTANPKTWRDEEFLKWSNLRCQGIGIKYFKNDCISNSFLKYPCLARSSSLIAALQTRANVFPTREALARGRKMEEGLCRWCGKVKETIPHISGQCIKMKEARIKRHNRIVKALIDKVGNKGCKIWIEPYLHNKEGKLRKPDLIIEKEGVVAVVDVTVRWEDNADSVEAAHIEKEAYYSELEEEVLQLTGGKIIHFFGFVVGARGKWSERNDEIFKILGIDKFKSFKESVCRLAMYAMTDMLALFSDKQ

SEQ ID NO: 18004 - protein, 1200 aa, Emydura subglobosa
MDDFNLRVGEKSVVREEQEDFSESQVLDFNLLPMAFTNVLYSDLKIIDSKSSFYDKYLDSFDDPYLIEFNNLNNNNTNFNNLQRDSMENRRNILGDNFNTNFMNTASFKESSSFKEGIFYLEYPVDCFNCPICSQILASFGKWAKHINNVHKSTSIRVICKKCGKYSQFHNIACHYPKCRPREVDNSEKKYACTVCGSAFYTRSGRSQHIRHKHPAVRNEERKEARVVGKTSRSRVWTEEEIELLIQLEIKYAGTRNINKCIENELKTKTNKQISNKRRDLARNKVKKDEDSMVLWEEGGMGDILEDIPPREKIKPLKDNILIDRFLTGVRCNGARILEKLDFIEQQLNASATVAEGWGLFEELCKLLMNSPHEDVENLENNKENNIQNDNGKQGGKVGKPPDKYNRNRKYAGRKAKFRFYQTLFEKDKKRLARIIMGEPDKATCKIAVKEIETYYKEILGKEGHGNTRGWPKVKEVVDNEILNWPLSIDEIREALREIDNSSAPGPDGIKVKDLWDIYNLDSRILVRIFNIWFLNRQIPECFKGNRTILIPKVKDPQELKKISSWRPLTIGSIWIRLYTKILAKRLSSAVKLCPRQKGFIAASGCEENISILEKLIKGAKKNKDEIAVVFIDLAKAFDSVGHGHILKGLKRFGISESFIDIVKDLYTDCYTEISVGEDKTEPILIKSGVKQGDPLSPILFNIAMDPLLYKLEDEGDGFIVQGRKITSLAFADDIAILSRSYKGMVKNLKILNQFCKNSSLKVNVKKTKGFHVFPSMGTYVINPKDKWGLGDELIDYIQPGESERYLGARIDPWVGVANNSPKEKLIDWCESLCKAPLKPAQKLIILKVYILTRVFYELLLIEPPLYMLNELDVLVRNTLKKILHLPQCTTDGLFYARTRDGGLAVTKFSTQIPNMLIRKWRRHIVSKDDWIDFSFLYAGENLVEKILIYSAKTANPKTWRDEEFLKWSNLRCQGIGIKYFKNDCISNSFLKYPYLARSSSLIAALQTRANVFPTREALARGRKMEEGLCRWCGKVKETIPHISGQCIKMKEARIKRHNRIVKALIDKVGNKGCKIWIEPYLHNKEGKLRKPDLIIEKEGVVAVVDVTVRWEDNADSVEAAHIEKEAYYSELEEEVLQLTGGKIIHFFGFVVGARGKWSERNDEIFKILGIDKFKSFKESVCRLAMYATTDMLALFSDKQ

SEQ ID NO: 18005 - protein, 908 aa, Emydura subglobosa
MVLWEEGGMGDILEDIPPREKIKPLKDKILIDRFLTGVRCNGARILEKLDFIEQQLNASATVAEGWGLFEELCKLLMNSPHEDVENLENNKENNIQNDNGKKGRKVGKPPDKYNRNRKYAGRKAKFRFYQTLFEKDKKRLARIIMGEPDKATCKIAVKEIETYYKEILGREGHGNTRGWPKVKEVVDNEILNWPLSIDEIREALREIDNSSAPGPDGIKVKDLWDIYNLDSRILVRIFNIWFLNRQIPECFKGNHTILIPKVKDPQELKKISSWRPLTIGSIWIRLYTKILAKRLSSAVKLCPRQKGFIAASGCEENISILEKLIKGAKKNKDEIAVVFIDLAKALDSVGHGHILKGLKRFGMSESFIDIVKDLYTDCYTEISVGEDKTEPILIKSGVKQGDPLSPILFNIAMDPLLYKLEDERNGFIVQGRKITSLAFADDIAILSRSYKGMVKNLKILNQFCKNSSLKVNVKKTKGFHIFPNMGTYVINPKDKWGLGDELIDYIQPGESERYLGGRIDPWVGVANNSPKEKLIDWCESLCKAPLKPAQKLIILKVYILTRVFYELLLIEPPLYMLNELDVLVRNTLKKILHLPQCTTDGLFYARTRDGGLAVTKFSTQIPNMLIHKWRRHIVSKDDWIDFSFLYVGENLVEKILIYSAKTANPKTWRDEEFLKWSNLRCQGIGIKYFKNDCISNSFLKYPCLARSSSLIAALQTRANVFPTREALARGWKMEEGLCRWCGKVKEIIPHISGQCIKMKEARIKRHNRIVKALIDKVGNKGCKNWIEPYLHNKEGKLRKPDLIIEKEGVVAVVDVTVRWEDNADSVEAAHIEKEAYYSELEEEVLQLTGGKIIHFFGFVVEARGKWSERNDEIFKMLGIDKFKSFKESVCRLAMYATTDMLALFSDKQ

SEQ ID NO: 18006 - protein, 1261 aa, Emydura subglobosa
MEKTEILFHTGLALDRVKNAPATSFDAPASSVKLIRGIIHRAGPMLSPYAIDRVKDGIAGFMDDFNLRVGEKSVVREEQEDFSESQVLDFNLLPMAFTNVLYSDLKIIDSKSSFYDKYLDSFDDPYLIEFNNLNNNNTNFNNLQRDSMENRRNILGDNFNTNFMNTASFKESSSFKEGIFYLEYPVDCFNCPICSQILASFGKWAKHINNVHKSTSIRVICKKCGKYSQFHNIACHYPKCRPREVDNSEKKYACTVCGSAFYTRSGRSQHIRHRHPAVRNEERKEARVVGKTSRSRVWTEEEIELLIQLEIKYAGTRNINKCIESELKTKTNKQISNKRRDLARNKVKKDEDSMVLWEEGGMGDILEDIPPREKIKPLKDNILIDRFLTGVRCNGARILEKLDFIEQQLNASATVAEGWGLFEELCKLLMNSPHEDVENLENNKENNIQKDNGKQGGKVGKPPDKYNRNRKYAGRKAKFRFYQTLFEKDKKRLARIIMGEPDKATCKIAVKEIETYYKEILGKEGHGNTRGWPKVKEVVDNEILNWPLSIDEIREALREIDNSSAPGPDGIKVKDLWDIYNLDSRILVRIFNIWFLNRQIPECFKGNRTILIPKVKDPQELKKISSWRPLTIGSIWIRLYTKILAKRLSSAVKLCPRQKGFIAASGCEENISILEKLIKGAKKNKDEIAVVFIDLAKAFDSVGHGHILKGLKRFGISESFIDIVKDLYTDCYTEISVGEDKTEPILIKSGVKQGDPLSPILFNIAMDPLLYKLEDEGDSFIVQGRKITSLAFADDIAILSRSYKGMVKNLKILNQFCKNSSLKVNVKKTKGFHVFPSMGTYVINPKDKWGLGDELIDYIQPGESERYLGARIDPWVGVANNSPKEKLIDWCESLCKAPLKPAQKLIILKVYILTRVFYELLLIEPPLYMLNELDVLVRNTLKKILHLPQCITDGLFYARTRDGGLAVTKFSTQIPNMLIRKWRRHIVSKDDWIDFLFLYAGENLVEKILIYSAKTANPKTWRDEEFLKWSNLRCQGIGIKYFKNDCISNSFLKYPCLARSSSLIAALQTRANVFPTREALARGRKMEEGLCRWCGKVKETIPHISGQCIKMKEARIKRHNRIVKALIDKVGNKGCKIWIEPYLHNKEGKLRKPDLIIEKEGVVAVVDVTVRWEDNADSVEAAHIEKEAYYSELEEEVLQLTGGKIIHFFGFVVGARGKWSERNDEIFKILGIDKFKSFKESVCRLAMYATTDMLALFSDKQ

SEQ ID NO: 18007 - protein, 1261 aa, Emydura subglobosa
MEKTEILFHTGLALDRVKNAPATSFDAPASSVKLIRGIIHRAGPMLSPYAIDRVKDGIAGFMDDFNLRVGEKSVVREEQEDFSESQVLDFNLLPMAFTNVLYSDLKIIDSKSSFYDKYLDSFDDPYLIEFNNLNNNNTNFNNLQRDSMENRRNILGDNFNTNFMNTASFKESSSFKEGIFYLEYPVDCFNCPICSQILASFGKWAKHINNVHKSTSIRVICKKCGKYSQFHNIACHYPKCRPREVDNSEKKYACTVCGSAFYTRSGRSQHIRHRHPAVRNEERKEARVVGKTSRSRVWTEEEIELLIQLEIKYAGTRNINKCIESELKTKTNKQISNKRRDLARNKVKKDEDSMVLWEEGGMGDILEDIPPREKIKPLKDNILIDRFLTGVRCNGARILEKLDFIEQQLNASATVAEGWGLFEELCKLLMNSPHEDVENLENNKENNIQNDNGKQGGKVGKPPDKYNRNRKYAGRKAKFRFYQTLFEKDKKRLARIIMGEPDKATCKIAVKEIETYYKEILGKEGHGNTRGWPKVKEVVDNEILNWPLSIDEIREALREIDNSSAPGPDGIKVKDLWDIYNLDSRILVRIFNIWFLNRQIPECFKGNRTILIPKVKDPQELKKISSWRPLTIGSIWIRLYTKILAKRLSSAVKLCPRQKGFIAASGCEENISILEKLIKGAKKNKDEIAVVFIDLAKAFDSVGHGHILKGLKRFGISESFIDIVKDLYTDCYTEISVGEDKTEPILIKSGVKQGDPLSPILFNIATDPLLYKLEDEGDGFIVQGRKITSLAFADDIAILSRSYKGMVKNLKILNQFCKNSSLKVNVKKTKGFHVFPSMGTYVINPKDKWGLGDELIDYIQPGESERYLGARIDPWVGVANNSPKEKLIDWCESLCKAPLKPAQKLIILKVYILTRVFYELLLIEPPLYMLNELDVLVRNTLKKILHLPQCTTDGLFYARTRDGGLAVTKFSTQIPNMLIRKWRRHIVSKDDWIDFSFLYAGENLVEKILIYSAKTANPKTWRDEEFLKWSNLRCQGIGIKYFKNDCISNSFLKYPCLARSSSLIAALQMRANVFPTREALARGRKMEEGLCRWCGKVKETIPHISGQCIKMKEARIKRHNRIVKALIDKVGNKGCKIWIEPYLHNKEGKLRKPDLIIEKEGVVAVVDVTVRWEDNADSVEAAHIEKEAYYSELEEEVLQLTGGKIIHFFGFVVGARGKWSERNDEIFKILGIDKFKSFKESVCRLAMYATTDMLALFSDKQ

SEQ ID NO: 18008 - protein, 1260 aa, Emydura subglobosa
MEKTEILFHTGLALDWVKNAPATSFDAPASSVKLIRGIIHRAGPMLSPYAIDRVKDGIAGFMDDFNLRVGEKSVVREEQEDFSESQVLDFNLLPMAFTNVLYSDLKIIDSKSSFYDKYLDSFDDPYLIEFNNLNNNTNFNNLQRDSMENRRNILGDNFNTNFMNTASFKESSSFKEGIFYLEYPVDCFNCPICSQILASFGKWAKHINNVHKSTSIRVICKKCGKYSQFHNIACHYPKCRPREVDNSEKKYACTVCGSAFYTRSGRSQHIRHRHPAVRNEERKEARVVGKTSRSRVWTEEEIELLIQLEIKYAGTRNINKCIESELKTKTNKQISNKRRELARNKVKKDEDSMVLWEEGGMGDILEDIPPREKIKPLKDNILIDRFLTGVRCNGARILEKLDFIEQQLNASATVAEGWGLFEELCKLLMNSPHEDVENLENNKENNIQNDNGKQGGKVGKPPDKYNRNRKYAGRKAKFRFYQTLFEKDKKRLARIIMGEPDKATCKIAVKEIETYYKEILGKEGHGNTRGWPKVKEVVDNEILNWPLSIDEIREALREIDNSSAPGPDGIKVKDLWDIYNLDSRILVRIFNIWFLNRQIPECFKGNRTILIPKVKDPQELKKISSWRPLTIGSIWIRLYTKILAKRLSSAVKLCPRQKGFIAASGCEENISILEKLIKGAKKNKDEIAVVFIDLAKAFDSVGHGHILKGLKRFGISESFNDIVKDLYTDCYTEISVGEDKTEPILIKSGVKQGDPLSPILFNIAMDPLLYKLEDEGDGFIVQGRKITSLAFADDIAILSRSYKGMVKNLKILNQFCKNSSLKVNVKKTKGFHVFPSMGTYVINPKDKWGLGDELIDYIQPGESERYLGARIDPWVGVANNSPKEKLIDWCESLCKAPLKPAQKLIILKVYILTRVFYELLLIEPPLYMLNELDVLVRNTLKKILHLPQCTTDGLFYARTRDGGLAVTKFSTQIPNMLIRKWRRHIVSKDDWIDFSFLYAGENLVEKILIYSAKTANPKTWRDEEFLKWSNLRCQGIGIKYFKNDCISNSFLKYPCLARSSSLIAALQTRANVFPTREALARGRKMEEGLCRWCGKVKETIPHISGQCIKMKEARIKRHNRIVKALIDKVGNKGCKIWIEPYLHNKEGKLRKPDLIIEKEGVVAVVDVTVRWEDNADSVEAAHIEKEAYYSELEEEVLQLTGGKIIHFFGFVVGARGKWSERNDEIFKILGIDKFKSFKESVCRLAMYATTDMLALFSDKQ

SEQ ID NO: 18009 - protein, 1216 aa, Emydura subglobosa
MLSPYAIDRVKDGIAGFMDDFNLRVVEKSVVREEQEDFSESQVLDFNLLPMAFTNVLYSDLKIIDSKSSFYDKYLDSFDDPYLIEFNNLNNNTNFNNLQRDSMENRRNILGDNFNTNFMNTASFKESSSFKEGIFYLEYPVDCFNCPICSQILASFGKWAKHINNVHKSTSIRVICKKCGKYSQFHNIACHYPKCRPREVDNSEKKYACTVCGSAFYTRSGRSQHIRHRHPAVRNEERKEARVVGKTSRSRVWTEEEIELLIQLEIKYAGTRNINKCIESELKTKTNKQISNKRRDLARNKVKKDEDSMVLWEEGGMGDILEDIPPREKIKPLKDNILIDRFLTGVRCNGARILEKLDFIEQQLNASATVAEGWGLFEELCKLLMNSPHEDVENLENNKENNIQNDNGKQGGKVGKPPDKYNRNRKYAGRKAKFRFYQTLFEKDKKRLARIIMGEPDKATCKIAVKEIETYYKEILGKEGHGNTRGWPKVKEVVDNEILNWPLSIDEIREALREIDNSSAPGPDGIKVKDLWDIYNLDSRILVRIFNIWFLNRQIPECFKGNRTILIPKVKDPQELKKISSWRPLTIGSIWIRLYTKILAKRLSSAVKLCPRQKGFIAASGCEENISILEKLIKGAKKNKDEIAVVFIDLAKAFDSVGHGHILKGLKRFGISESFIDIVKDLYTDCYTEISVGEDKTEPILIKSGVKQGDPLSPILFNIAMDPLLYKLEDEGDGFIVQGRKITSLAFADDIAILSRSYKGMVKNLKILNQFCKNSSLKVNVKKTKGFHVFPSMGTYVINPKDKWGLGDELIDYIQPGESERYLGARIDPWVGVANNSPKEKLIDWCESLCKAPLKPAQKLIILKVYILTRVFYELLLIKPSLYMLNELDVLVRNTLKKILHLPQCTTDGLFYARTRDGGLAVTKFSTQIPNMLIRKWRRHIVSKDDWIDFSFLYAGENLVEKILIYSAKTANPKTWRDEEFLKWSNLRCQGIGIKYFKNDCISNSFLKYPCLARSSSLIAALQTRANVFPTREALARGRKMEEGLCRWCGKVKETIPHISGQCIKMKEARIKRHNRIVKALIDKVGNKGCKIWIEPYLHNKEGKLRKPDLIIEKEGVVAVVDVTVRWEDNADSVEAAHIEKEAYYSELEEEVLQLTGGKIIHFFGFVVGARGKWSERNDDIFKILGIDKFKSFKESVCRLVMYATTDMLALFSDKQ

SEQ ID NO: 18010 - protein, 1096 aa, Emydura subglobosa
MNTASFKESSSFKEGIFYLEYPVDCFNCPICSQILASFGKWAKHINNVHKSTSVRVICKKCGKYSQFHNIACHYPKCRPREVDNSEKKYACTVCGSAFYTRSGRSQHIRHRHPAVRNEERKEARVVGKTSRSRVWTEEEIELLIQLEIKYAGTRNINKCIESELKTKTNKQISNKRRDLARNKVKKDEDSMVLWEEGGMGDILEDIPPREKIKPLKDNILIDRFLTGVRCNGARILEKLDFIEQQLNASATVAEGWGLFEELCKLLMNSPHEDVENLENNKENNIQNDNGKQGGKVGKPPDKYNRNRKYAGRKAKFRFYQTLFEKDKKRLARIIMGEPDKATCKIAVKEIETYYKEILGREGNTRGWPKVKEVVDNEILNWPLSIDEIREALREIDNSSAPGPDGIKVKDLWDIYNLDSRILVRIFNIWFLNRQIPECFKGNRTILIPKVKDPQELKKISSWRPLTIGSIWIRLYTKILAKRLSSAVKLCPRQKGFIAASGCEENISILEKLIKGAKKNKDEIAVVFIDLAKAFDSVGHGHILKGLKRFGISESFIDIVKDLYTDCYTEISVGEDKTEPILIKSGVKQGDPLSPILFNIAMDPLLYKLEDEGDGFIVQGRKITSLAFADDIAILSRSYKGMVKNLKILNQFCKNSSLKVNVKKTKGFHVFPSMGTYVINPKDKWGLGDELIDYIQPGESERYLGARIDPWVGVANNSPKEKIIDWCESLCKAPLKPAQKLIILKVYILTRVFYELLLIELPLYMLNELDVLVRNTLKKILHLPQCTTDGLFYARTRDGGLAVTKFSTQIPNMLIRKWRRHIVSKDDWIDFSFLYAGENLVEKILIYSAKTANPKTWRDEEFLKWSNLRCQGIGIKYFKNDCISNSFLKYPCLARSSSLIAALQTRANVFPTREALARGRKMEEGLCRWCGKVKETIPHISGQCIKMKEARIKRHNRIVKALIDKVGNKGCKIWIEPYLHNKEGKLRKPDLIIEKEGVVAVVDVTVRWEDNADSVEAAHIEKEAYYSELEEEVLQLTGGKIIHFFGFVVGARGKWSERNDEIFKILGIDKFKSFKESVCRLAMYATTDMLALFSDKQ

SEQ ID NO: 18011 - protein, 908 aa, Emydura subglobosa
MVLWEEGGMGDILEDIPPREKIKPLKDNILIDRFLTGVRCNGARILEKLDFIEQQLNASATVAEGWGLFEELCKLLMNSPHEDVENLENNKENNIQKDNGKQGGKVGKPPDKYNRNRKYAGRKAKFRFYQTLFEKDKKRLARIIMGEPDKATCKIAVKEIETYYKEILGKEGHGNTRGWPKVKEVVDNEILNWPLSIDEIREALREIDNSSAPGPDGIKVKDLWDIYNLDSRILVRIFNIWFLNRQIPECFKGNRTILIPKVKDPQELKKISSWRPLTIGSIWIRLYTKILAKRLSSAVKLCPRQKGFIAASGCEENISILEKLIKGAKKNKDEIAVVFIDLAKAFDSVGHGHILKGLKRFGISESFIDIVKDLYTDCYTEISVGEDKTEPILIKSGVKQGDPLSPILFNIAMDPLLYKLEDEGDGFIVQGRKITSLAFADDIAILSRSYKGMVKNLKILNQFCKNSSLKVNVKKTKGFHVFPSMGTYVINPKDKWGLGDELIDYIQPGESERYLGARIDPWVGVANNSPKEKLIDWCESLCKAPLKPAQKLIILKVYILTRVFYELLLIEPPLYMLNELDVLVRNTLKKILHLPQCTTDGLFYARTRDGGLAVTKFSTQIPNMLIRKWRRHIVSKDDWIDFSFLYAGENLVEKILIYSAKTANPKTWRDEEFLKWSNLRCQGIGIKYFKNDCISNSFLKYPCLARSSSLIAALQTRANVFPTREALARGRKMEEGLCRWCGKVKETIPHISGQCIKMKEARIKRHNRIVKALIDKVGNKGCKIWIEPYLHNKEGKLRKPDLIIEKEGVVAVVDVTVRWEDNADSVEAAHIEKEAYYSELEEEVLQLTGGKIIHFFGFVVGARGKWSERNDEIFKILGIDKFKSFKESVCRLAMYATTDMLALFSDKQ

SEQ ID NO: 18012 - protein, 1260 aa, Emydura subglobosa
MEKTEILFHTGLALDRVKNAPATSFDAPASSVKLIRGIIHRAGPMLSPYAIDRVKDGIAGFMDDFNLRVGEKSVVREEQEDFSESQVLDFNLLPMAFTNVLYSDLKIIDSKSSFYDKYLDSFDDPYLIEFNNLNNNTNFNNLQCDSMENRRNILGDNFNTNFMNTASFKESSSFKEGIFYLEYPVDCFNCPICSQILASFGKWAKHINNVHKSTSIRVICKKCGKYSQFHNIACHYPKCRPREVDNSEKKYACTVCGSAFYTRSGRSQHIRHRHPAVRNEERKEARVVGKTSRSRVWTEEEIELLIQLEIKYAGTRNINKCIESELKTKTNKQISNKRRDLARNKVKKDEDSMVLWEEGGMGDILEDIPPREKIKPLKDNILIDRFLTGVRCNGARILEKLDFIEQQLNASATVAEGWGLFEELCKLLMNSPHEDVENLENNKENNIQNDNGKQGGKVGKPPDKYNRNRKYAGRKAKFRFYQTLFEKDKKRLARIIMGEPDKATCKIAVKEIETYYKEILGKEGHGNTRGWPKVKEVVDNEILNWPLSIDEIREALREIDNSSAPGPDGIKVKDLWDIYNLDSRILVRIFNIWFLNRQIPECFKGNRTILIPKVKDPQELKKISSWRPLTIGSIWIRLYTKILAKRLLSAVKLCPRQKGFIAASGCEENISILEKLIKGAKKNKDEIAVVFIDLAKAFDSVGHGHILKGLKRFGISESFIDIVKDLYTDCYTEISVGEDKTEPILIKSGVKQGDPLSPILFNIAMDPLLYKLEDEGDGFIVQGRKITSLAFADDIAILSRSYKGMVKNLKILNQFCKNSSLKVNVKKTKGFHVFPSMGTYVINPKDKWGLGDELIDYIQPGESERYLGARIDPWVGVANNSPKEKLIDWCESLCKAPLKPAQKLIILKVYILTRVFYELLLIEPPLYMLNELDVLVRNTLKKILHLPQCTTDGLFYARTRDGGLAVTKFSTQIPNMLIRKWRRHIVSKDDWIDFSFLYAGENLVEKILIYSAKTANPKTWRDEEFLKWSNLRCQGIGIKYFKNDCISNSFLKYPCLARSSSLIAALQTRANVFPTREALARGRKMEEGLCRWCGKVKETIPHISGQCIKMKEARIKRHNRIVKALIDKVGNKGCKIWIEPYLHNKEGKLRKPDLIIEKEGVVAVVDVTVRWEDNADSVEAAHIEKEAYYSELEEEVLQLTGGKIIHFFGFVVGARGKWSERNDEIFKILGIDKFKSFKESVCRLAMYATTDMLALFSDKQ

SEQ ID NO: 18013 - protein, 1097 aa, Emydura subglobosa
MLSPYAIDRVKDGIAGFMDDFNLRVGEKNVVREEQEDFSESQVLDFNLLPMAFTNVLYSDLKIIDSKSSFYDKYLESFDDPYLIEFNNLNNNNTNFNNLQRDSMENRRNILGDNFNTNFMNTASFKESSSFKEGIFYLEYPVDCFNCPICSQILASFGKWAKHINNVHKSTSIRVICKKCGKYSQFHNIACHYPKCRPREVDNSEKKYACTVCGSAFYTRSGRSQHIRHRHPAVRNEERKEARVVGKTSRSWVWTEEEIELLIQLEIKYAGSRNINKCIESELKTKTNKQISNKRRDLARNKVKKDEDSMVLWEEGGMGDILEDIPPREKIKPLKDNILIDRFLTGVRCNGARILEKLDFIEQQLNASATVAEGWGLFEELCKLLMNSPHEDVENLENNKENNIQNDNGKQGGKVGKPPDKYNRNRKYAGRKAKFRFYQTLFEKDKKRLARIIMGEPDKATCKIAVKEIETYYKEILGKEGHGNTRGWPKVKEVVDNEILNWPLSIDEIREALREIDNSSASGPDGIKVKDLWDIYNLDSRILVRIFNIWFLNRQIPECFKGNRTILIPKVKDPQELKKISSWRPLTIGSIWIRLYTKILAKRLSSAVKLCPRQKGFIAASGCEENISILEKLIKGAKKNKDEIAVVFIDLAKAFDSVGHGHILKGLKRFGISESFIDIVKDLYTDCYTEISVGEDKTEPILIKSGVKQGDPLSPILFNIAMDPLLYKLEDEGDGFIVQGRKITSLAFADDIAILSRSYKGMVKNLKILNQFCKNSSLKVNVKKTKGFHVFPSMGTYVINPKDKWGLGDELIDYIQPGESERYLGARIDPWVGVANNSPKEKLIDWCESLCKAPLKPAQKLIILKVYILTRVFYELLLIEPPLYMLNELDVLVRNTLKKILHLPQCTTDGLFYARTRDGGLAVTKFSTQIPNMLIRKWRRHIVSKDDWIDFSFLYAGENLVEKILIYSAKTANPKTWRDEEFLKWSNLRCQGIGIKYFKNDCISNSFLKYPCLARSSSLIVALQTRANVFPTREALARGRKMEEGLCRWCGKVKETIPHISGQCIKMKEARIKRHNRIVKALIDKVGNKGCKIWIEP

SEQ ID NO: 18014 - protein, 1260 aa, Emydura subglobosa
MEKTEILFHTGLALDRVKNAPATSFDAPASSVKLIRGIIHRAGPMLSPYAIDRVKDGIAGFMDDFNLRVGEKSVVREEQEDFSESQVLDFNLLPMAFTNVLYSDLKIIDSKSSFYDKYLDSFDDPYLIEFNNLNNNNTNFNNLQRDSMENRRNILGDNFNTNFMNTASFKESSSFKEGIFYLEYPVDCFNCPICSQILASFGKWAKHINNVHKSTSIRVICKKCGKYSQFHNVACHYPKCRPREVDNSEKKYACTVCGSAFYTRSGRSQHIRHRHPAVRNEERKEARVVGKTSRSRVWTEEEIELLIQLEIKYAGTRNINKCIESELKTKTNKQISNKRRDLARNKVKKDEDSMVLWEEGGMGDILEDIPPREKIKPLKDNILIDRFLTGVRCNGARILEKLDFIEQQLNASATVAEGWGLFEELCKLLMNSPHEDVENLENNKENNIQNDNGKQGGKVGKPPDKYNRNRKYAGRKAKFRFYQTLFEKDKKRLARIIMGEPDKATYKIAVKEIETYYKAILGREGHGNTRGWPKVKVIDNEILNWPLSIDEIREALREIDNSSAPGPDGIKVKDLWDIYNLDSRILVRIFNIWFLNRQIPECFKGNRTILIPKVKDPQELKKISSWRPLTIGSIWIRLYTKILAKRLSSAVKLCPRQKGFIAASGCEENISILEKLIKGSKKNKDEIAVVFIDLAKAFDSVGHGHILKGLKRFGISESFIDIVKDLYTDCYTEISVGEDKTEPILIKSGVKQGDPLSPILFNIAMDPLLYKLEDEGDGFIVQGRKITSLAFADDIAILSRSYKGMVKNLKILNQFCKNSSLKVNVKKTKGFHVFPSMGTYVINPKDKWGLDDELIDYIQPGESERYLGARIDPWVGVANNSPKEKLIDWCESLCKAPLKPAQKLIILKVYILTRVFYELLLIEPPLYMLNELDVLVRNTLKKILHLPQCTTDGLFYARTRDGGLAVTKFSTQIPNMLIRKWRRHIVSKDDWIDFSFLYAGENLVEKILIYSAKTANPKTWRDEEFLKWSNLRCQGIGIKYFKNDCISNSFLKYPCLARSSSLIAALQTRANVFPTREALARGRKMEEGLCRWCGKVKETIPHISGQCIKMKEARIKRHNRIVKALIDKVGNKGCKIWIEPYLHNKEGKLRKPDLIIEKEGVVAVVDVTVRWEDNADSVEAAHIEKEAYYSELEEEVLQLTGGKIIHFFGFVVGARGKWSERNDEIFKILGIDKFKSFKESVCRLAMYATTDMLALFSDKQ

SEQ ID NO: 18015 - protein, 1261 aa, Emydura subglobosa
MEKTEILFHTGLALDRVKNAPATSFDAPASSVKLIRGIIHRAGPMLSPYAIDRVKDGIAGFMDDFNLRVGEKSVVREEQEDLSESQVLDFNLLPMAFTNVLYSDLKIIDSKSSFYDKYLDSFDDPYLIEFNNLNNNNTNFNNLQRDSMENRRNILGDNFNTNFMNTASFKESSSFKEGIFYLEYPVDCFNCPICSQILASFGKWAKHINNVHKSTSIRVICKKCGKYSQFHNIACHYPKCRPREVDNSEKKYACTVCGSAFYTRSGRSQHIRHRHPAVRNEERKEARVVGKTSRSRVWTEEEIELLIQLEIKYAGTRNINKCIESELKTKTNKQISNKRRDLARNKVKKDEDSMVLWEEGGMGDILEDIPPREKIKPLKDNILIDRFLTGVRCNGARILEKLDFIEQQLNASATVAEGWGLFEELCKLLMNSPHEDVENLENNKENNIQNDNGKQGGKVGKPPDKYNRNRKYAGRKAKFRFYQTLFEKDKKRLARIIMGEPDKATCKIAVKEIETYYKEILGKEGHGNTRGWPKVKEVVDNEILNWPLSIDEIREALREIDNSSAPGPDGIKVKDLWDIYNLDSRILVRIFNIWFLNRQIPECFKGNRTILIPKVKDPQELKKISSWRPLTIGSIWIRLYTKILAKRLSSAVKLCPRQKGFIAASGCEENISILEKLIKGAKKNKDEIAVVFIDLAKAFDSVGHGHILKGLKRFEISESFIDIVKDLYTDCYTEISVGEDKTEPILIKSGVKQGDPLSPILFNIAMDPLLYKLEDEGDGFIVQGRKITSLAFADDIAILSRSYKGMVKNLKILNQFCKNSSLKVNVKKTKGFHVFPSMGTYVINPKDKWGLGDELIDYIQPGESERYLGARIDPWVGVANNSPKEKLIDWCESLCKAPLKPAQKLIILKVYILTRVFYELLLIEPPLYMLNELDVLVRNTLKKILHLPQCTTDGLFYARTRDGGLAVTKFSTQIPNMLIRKWRRHIVSKDDWIDFSFLYAGENLVEKILIYSAKTANPKTWRDEEFSKWSNLRCQGIGIKYFKNDCISNSFLKYPCLARSSSLIAALQTRANVFPTREALARGRKMEEGLCRWCGKVKETIPHISGQCIKMKEARIKRHNRIVKALIDKVGNKGCKIWIEPYLHNKEGKLRKPDLIIEKEGVVAVVDVTVRWEDNADSVEAAHIEKEAYYSELEEEVLQLTGGKIIHFFGFVVGARGKWSERNDEIFKILGIDKFKSFKESVCRLAMYATTDMLALFSDKQ

SEQ ID NO: 18016 - protein, 1261 aa, Emydura subglobosa
MEKTEILFHTGLALDRVKNAPATSFDAPASSVKLIRGIIHRAGPMLSPYAIDRVKDGIAGFMDDFNLRVGEKSVVREEQEDFSESQVLDFNLLPMAFTNVLYSDLKIIDSKSSFYDKYLDSFDDPYLIEFNNLNNNNTNFNNLQRDSMENRRNILGDNFNTNFMNTASFKESSSFKEGIFYLEYPVDCFNCPICSQILASFGKWAKHINNVHKSTSIRVICKKCGKYSQFHNIACHYLKCRPREVDNSEKKYACTVCGSAFYTRSGRSQHIRHRHPAVRNEERKEARVVGKTSRSQVWTEEEIELLIQLEIKYAGTRNINKCIESELKTKTNKQISNKRRDLARNKVKKDEDSMVLWEEGGMGDILEDIPPREKIKPLKDNILIDRFLTGVRCNGARILEKLDFIEQQLNASATVAEGWGLFEELCKLLMNSPHEDVENLENNKENNIQNDNGKQGGKVGKPPDKYNRNRKYAGRKAKFRFYQTLFEKDKKRLARIIMGEPDKATCKIAVKEIETYYKEILGKEGHGNTRGWPKVKEVVDNEILNWPLSIDEIREALREIDNSSAPGPDGIKVKDLWDIYNLDSRILVRIFNIWFLNRQIPECFKGNRTILIPKVKDPQELKKISSWRPLTIGSIWIRLYTKILAKRLSSAVKLCPRQKGFIAASGCEENISILEKLIKGAKKNKDEIAVVFIDLAKAFDSVGHGHILKGLKRFGISESFIDIVKDLYTDCYTEISVGEDKTEPILIKSGVKQGDPLSPILFNIAMDPLLYKLEDEGDGFIVQGRKITSLAFADDIAILSRSYKGMVKNLKILNQFCKNSSLKVNVEKTKGFHVFPSMGTYVINPKDKWGLGDELIDYIQPGESERYLGARIDPWVGVANNSPKEKLIDWCESLCKAPLKPAQKLIILKVYILTRVFYELLLIEPPLYMLNELDVLVRNTLKKILHLPQCTTDGLFYARTRDGGLAVTKFSTQIPNMLIRKWRRHIVSKDDWIDFSFLYAGENLVEKILIYSAKTANPKTWRDEEFLKWSNLRCQGIGIKYFKNDCISNSFLKYPCLARSSSLIAALQTRANVFPTREALARGRKMEEGLCRWCGKVKETIPHISGQCIKMKEARIKRHNRIVKALIDKVGNKGCKIWIEPYLHNKEGKLRKPDLIIEKEGVVAVVDVTVRWEDNADSVEAAHIEKEAYYSELEEEVLQLTGGKIIHFFGFVVGARGKWSERNDEIFKILGIDKFKSFKESVCRLAMYATTDMLALFSDKQ

SEQ ID NO: 18017 - protein, 876 aa, Emydura subglobosa
MVLWEEGGMGDILEDIPPREKIKPLKDTILIDRFLTGVRCNGARILEKLDFIEQQLNASATVAEGWGLFEELCKLLMNSPHEDVENLENNKENNIQNDNGKQGRKVGKLPHKYNRNRKYAGRKAKFRFYQTLFEKDKKRLARIIMGEPDKATCKIAVKEIETYYKEILGREGHGNTRGWPKVKEVVDNEILNWPLSIDEIREALGEIDNSSAPGPDGIKVKDLWDIYNLDSRILVRIFNIWFLNRQIPECFKGNRTILIPKVKDPQELKKISSWRPLTIGSIWIRLYTKILAKRLLSAVKLCPRQKGFIAASGCEENISILEKLIKGAKKNKDEIAVVFIDLAKAFDSGGHGHILNGLKRFGISESFIDIVKDLYTDCYTEISVGEDKTEPILIKSGVKQGDPLSPLLFNIAMDPLLYKLEDEGDGFIVQGRKITSLAFADNIAILSRSYKGMVKNLKILNQFCKNSSLKVNVKKTKGFHIFPSMGTYVINPKDKWGLGDELIDYIQPGESERYLGARIDPWVGVANNSPKEKLIDWCESLCKAPLKPAQKLIILKVYILTRVFYELLLIEPPLYMLNELDVLVRNTLKKILHLPQCTTDGLFYARTRDGGLAVTKFSTQIPNMLIRKWRRHIVSKDDWIDFSFLYAGENLVEKILIYSAKTANPKTWRDEEFLKWSNLRCQGIGIKYFKNDCISNLFLKYPCLAKSSSLIVALQTRANVFPTRETLARGRKMEEGLCRWCGKVKETIPHISGQCIKMKEARIKRHNRIVKALIDKVGNKGYKIWIEPYLHNKEGKLRKPDLIIEKEGVVAVVDVTVRWEDNADSVEAAHIEKEAYYSELEEEVLSSLVGRSSTSLDLWLGREVNGVKEMMKFLKF

SEQ ID NO: 18018 - protein, 1229 aa, Emydura subglobosa
MYVTTIIHRAGPMLSPYAIDRVKDGIAGFMDDFNLRVGEKSVVREEQEDFSESQVLDFNLLPMAFTNVLYSDLKIIDSKSSFYDKYLDSFDDPYLIEFNNLNNNNTNFNNLQRDFMENRRNILGDNFNTNFMNTASFKESSSFKEGIFYLEYPVDCFNCPICSQILASFGKWAKHINNVHKSTSIRVICKKCGKYSQFHNIACHYPKCRPREVDNSEKKYACTVCGSAFYTRSGRSQHIRHRHPAVRNEERKEARVVGKTSRSRVWTEEEIELLIQLEIKYAGTRNINKCIESELKTKTNKQISNKRRDLARNKVKKDEDSMVLWEEGGMGDILEDIPPREKIKPLKDNILIDRFLTGVRCNGARILEKLDFIEQQLNASATVAEGWGLFEELCKLLMNSPHKDVENLENNKENNIQKDNGKQGGKVGKPPDKYNRNRKYAGRKAKFRFYQTLFEKDKKRLARIIMGEPDKATCKIAVKEIETYYKEILGKEGHGNTRGWPKVKEVVDNEILNWPLSIDEIREALREIDNSSAPGPDGIKVKDLWDIYNLDSRILVRIFNIWFLNRQIPECFKGNRTILIPKVKDPQELKKISSWRPLTIGSIWIRLYTKILAKRLSSAVKLCPRQKGFIAASGCEENISILEKLIKGAKKNKDEIAVVFIDLAKAFDSVGHGHILKGLKRFGISESFIDIVKDLYTDCYTEISVGEDKTEPILIKSGVKQGDPLSPILFNIAMDPLLYKLEDEGDGFIVQGRKITSLAFADDIAILSRSYKGMVKNLKILNQFCKNSSLKVNVKKTKGFHVFPSMGTYVINPKDKWGLGDELIDYIQPGESERYLGARIDPWVGVANNSPKEKLIDWCESLCKAPLKPAQKLIILKVYILTRVFYELILIEPPLYMLNELDVLVRNTLKKILHLPQCTTDGLFYARTRDGGLAVTKFSTQIPNMLIRKWRRHIVSKDDWIDFSFLYAGENLVEKILIYSAKTANPKTWRDEEFLKWSNLRCQGIGIKYFKNDCISNSFLKYPCLARSSSLIAALQTRANVFPTREALARGRKMEEGLCRWCGKVKETIPHISGQCIKMKEARIKRHNRIVKALIDKVGNKGCKIWIEPYLHNKEGTLRKPDLIIEKEGVVAVVDVTVRWEDNADSVEAAHIEKEAYYSELEEEVLQLTGGKIIHFFGFVVGARGKWSERNDEIFKILGIDKFKSFKESVCRLAMYATTDMLALFSDKQ

SEQ ID NO: 18019 - protein, 1260 aa, Emydura subglobosa
MEKTEILFHTGLALDRVKNAPATSFDAPASSVKLIRGIIHRAGPMLSPYAIDRVKDGIAGFMDDFNLRVGEKSVVREEQEDFSESQVLDFNLLPMAFTNVLYSDLKIIDSKSSFYDKYLDSFDDPYLIEFNNLNNNTNFNNLQRDSMENRRNILGDNFNTNFMNTASFKESSSFKEGIFYLEYPVDCFNCPICSQILASFGKWAKHINNVHKSTSIRVICKKCGKYSQFHNIACHYPKCRPREVDNSEKKYACTVCESAFYTRSGRSQHIRHRHPAVRNEERKEARVVGKTSRSRVWTEEEIELLIQLEIKYAGTRNINKCIESELKTKTNKQISNKRRDLARNKVKKDEDSMVLWEEGGMGDILEDIPPREKIKPLKDNILIDRFLTGVRCNGARILEKLDFIEQQLNASATVAEGWGLFEELCKLLMNSPHEDVENLENNKENNIQNDNGKQGGKVGKPPDKYNRNRKYAGRKAKFRFYQTLFEKDKKRLARIIMGEPDKATCKIAVKEIETYYKEILGKEGHGNTRGWPKVKEVVDNEILNWPLSIDEIREALREIDNSSAPGPDGIKVKDLWDIYNLDSRILVRIFNIWFLNRQIPECFKGNRTILIPKVKDPQELKKISSWRPLTIGSIWIRLYTKILAKRLSSAVKLCPRQKGFIAASGCEENISILEKLIKGAKKNKDEIAVVFIDLAKAFDSVGHGHILKGLKRFGISESFIDIVKDLYTDCYTEISVGEDKTEPILIKSGVKQGDPLSPILFNIAMDPLLYKLEDEGDGFIVQGRKITSLAFADDIAILSRSYKGMVKNLKILNQFCKNSSLKVNVKKTKGFHVFPSMGTYVINPKDKWGLGDELIDYIQPGESERYLGARIDPWVGVANNSPKEKLIDWCESLCKAPLKPAQKLIILKVYILTRVFYELLLIEPPLYMLNELDVLVRNTLKKILHLPQCTTDGLFYARTRDGGLAVTKFSTQIPNMLIRKWRRHIVSKDDWIDFSFLYAGENLVEKILIYSAKTANPKTWRDEEFLKWSNLRCQGIGIKYFKNDCISNSFLKYPCLARSSSLIAALQTRANVFPTREALARGRKMEEGLCRWCGKVKETIPHISGQCIKMKEARIKRHNRIVKALIDKVGNKGCKIWIEPYLHNKEGKLRKPDLIIEKEGVVAVVDVTVRWEDNADSVEAAHIEKEAYYSELEEEVLQLTGGKIIHFFGFVVGARGKWSERNDEIFKILGIDKFKSFKESVCRLAMYATTDMLALFSDKQ

SEQ ID NO: 18020 - protein, 1200 aa, Emydura subglobosa
MDDFNLRVGEKSVVREEQEDFSESQVLDFNLLPMAFTNVLYSDLKIIDSKSSFYDKYLDSFDDPYLIEFNNLNNNNTNFNNLQRDSMENRRNILGDNFNTYFMNTASFKESSSFKEGIFYLEYPVDCFNCPICSQILASFGKWAKHINNVHKSTSIRVICKKCGKYSQFHNIACHYPKCRPREVDNSEKKYACTVCGPAFYTRSGRSQHIRHRHPAVRNEERKEARVVGKTSRSRVWTEEEIELLIQLEIKYAGTRNINKCIESELKTKTNKQISNKRRDLARNKVKKDEESMVLWEEGGMGDILEDIPPREKIKPLKDNILIDRFLTGVRCNGARILEKLDFIEQQLNASATVAEGWGLFEELCKLLMNSPHEDVENLENNKENNIQNDNGKQGGKVGKPPDKYNRNRKYAGRKAKFRFYQTLFEKDKKRLARIIMGEPDKATCKIAVKEIETYYKEILGKEGHGNTRGWPKVKEVVDNEILNWPLSIDEIREALREIDNSSAPGPDGIKVKDLWDIYNLDSRILVRIFNIWFLNRQIPECFKGNRTILIPKVKDPQELKKISSWRPLTIGSIWIRLYTKILAKRLSSAVKLCPRQKGFIAASGCEENISILEKLIKGAKKNKDEIAVVFIDLAKAFDSVGHGHILKGLKRFGISESFIDIVKDLYTDCYTEISVGEDKTEPILIKSGVKQGDPLSPILFNIAMDPLLYKLEDEGDGFIVQGRKITSLAFADDIAILSRSYKGMVKNLKILNQFCKNSSLKVNVKKTKGFHVFPSMGTYVINPKDKWGLGDELIDYIQPGESERYLGARIDPWVGVANNSPKEKLIDWCESLCKAPLKPAQKLIILKVYILTRVFYELLLIEPPLYMLNELDVLVRNTLKKILHLPQCTTDGLFYARTRDGGLAVTKFSTQIPNMLIRKWRRHIVSKDDWIDFSFLYAGENLVEKILIYSAKTANPKTWRDEEFLKWSNLRCQGIGIKYFKNDCISNSFLKYPCLARSSSLITALQTRANVFPTREALARGRKMEEGLCRWCGKVKETIPHISGQCIKMKEARIKRHNRIVKALIDKVGNKGCKIWIEPYLHNKEGKLRKPDLIIEKEGVVAVVDVTVRWEDNADSVEAAHIEKEAYYSELEEEVLQLTGGKIIHFFGFVVGARGKWSERNDEIFKILGIDKFKSFKESVCRLAMYATTDMLALFSDKQ

SEQ ID NO: 18021 - protein, 818 aa, Emydura subglobosa
MVLWEEGGMGDILEDIPPREKIKSLKDTILIDRFLTGVRCNGARILEKLDFIEQQLNASATVAEGWGLFEELCKLLMNSPHEDVENLENNKENNIQNDNGKQGRKVGKPPDKYNRNRKYAGRKAKFRFYQTLFEKDKKRLARIIMGEPDKATCKIAVKEIETYYKDILGREGHGNTRGWPKVKEVVDNEILNWPLSIDEIREALREIDNSSAPGSNGIKVKDLWDIYNLDSRILVRIFNIWFLNRQIPECFKGNRTILIPKVKDPQELKKISSWRPLTIGSIWIRLYTKILAKRLSSAVKLCPRQKGFIAASGCEENRSILEKLIKGAKKNKDEIAVVFIDLAKAFDSVGHGHILKGLKRFGISESFIDIVKDLYTDCYTEISVGEDKTEPILIKSGVKQGDPLSPILFNIAMDPLLYKLENEGDGFIVQGRKITSLAFADDIAILSRSYKGMVKNLKILNQFCKNSSLKVNVKKTKGFHIFPSIGTCVINPKDKWGLGDELIDYIQPGESERYLGARIDPWVGVANNSPKETLIDWCESLCKAPLKPAQKLIILKVYILTRVFYELFLIEPPLYMLNELDVLVRNTLKKILHLPQCTTDGLFYARTRDGGLAVTKFSTQIPNMLIRKWRRHIVSKDDWIDFSFLYAGENLVEKILIYSAKTANPKTWRDEEFLKWSNLRCQGIGIKYFKNDCISNSFLKYPCLARSSSLIAALQTRANVFPTREALARGRKMEEGLCRWCGKVKETIPHISGQCIKMKEARIKRHNRIVKALINKVGNKGCKIWIEPYLHNKEGKLRKPDLIIEKEGVVAVVDVTVR

SEQ ID NO: 18022 - protein, 1260 aa, Emydura subglobosa
MEKTEILFHTGLALDRVKNAPATSFDAPASSVKLIRGIIHRAGPMLSPYAIDRVKDGIAGFMDDFNLRVGEKSVVREEQEDFSESQVLDFNLLPMAFTNVLYSDLKIIDSKSSFYDKYLDSFDDPYLIEFNNLNNNTNFNNLQCDSMENRRNILGDNFNTNFMNTASFKESSSFKEGIFYLEYPVDCFNCPICSQILASFGKWAKHINNVHKSTSIRVICKKCGKYSQFHNIACHYPKCRPREVDNSEKKYACTVCGSAFYTRSGRSQHIRHRHPAVRNEERKEARVVGKTSRSRVWTEEEIELLIQLEIKYAGTRNINKCIESELKTKTNKQISNKRRDLARNKVKKDEDSMVLWEEGGMGDILEDIPPREKIKPLKDNILIDRFLTGVRCNGARILEKLDFIEQQLNASATVAEGWGLFEELCKLLMNSPHEDVENLENNKENNIQNDNGKQGGKVGKPPDKYNRNRKYAGRKAKFRFYQTLFEKDKKRLARIIMGEPDKATCKIAVKEIETYYKEILGKEGHGNTRGWPKVKEVVDNEILNWPLSIDEIREALREIDNSSAPGPDGIKVKDLWDIYNLDSRILVRIFNIWFLNRQIPECFKGNRTILIPKVKDPQELKKISSWRPLTIGSIWIRLYTKILAKRLLSTVKLCPRQKGFIAASGCEENISILEKLIKGAKKNKDEIAVVFIDLAKAFDSVGHGHILKGLKRFGISESFIDIVKDLYTDCYTEISVGEDKTEPILIKSGVKQGDPLSPILFNIAMDPLLYKLEDEGDGFIVQGRKITSLAFADDIAILSRSYKGMVKNLKILNQFCKNSSLKVNVKKTKGFHVFPSMGTYVINPKDKWGLGDELIDYIQPGESERYLGARIDPWVGVANNSPKEKLIDWCESLCKAPLKPAQKLIILKVYILTRVFYELLLIEPPLYMLNELDVLVRNTLKKILHLPQCTTDGLFYARTRDGGLAVTKFSTQIPNMLIRKWRRHIVSKDDWIDFSFLYAGENLVEKILIYSAKTANPKTWRDEEFLKWSNLRCQGIGIKYFKNDCISNSFLKYPCLARSSSLIAALQTRANVFPTREALARGRKMEEGLCRWCGKVKETIPHISGQCIKMKEARIKRHNRIVKALIDKVGNKGCKIWIEPYLHNKEGKLRKPDLIIEKEGVVAVVDVTVRWEDNADSVEAAHIEKEAYYSELEEEVLQLTGGKIIHFFGFVVGARGKWSERNDEIFKILGIDKFKSFKESVCRLAMYATTDMLALFSDKQ

SEQ ID NO: 18023 - protein, 1260 aa, Emydura subglobosa
MEKTEILFHTGLALDRVKNAPATSFDAPASSVKLIRGIIHRAGPMLSPYAIDRVKDGIAGFMDDFNLRVGEKSVVREEQEDFSESQVLDFNLLPMAFTNVLYSDLKIIDSKSSFYDKYLDSFDDPYLIEFNNNNNNTNFNNLQRDSMENRRNILGDNFNTNFMNTASFKESSSFKEGIFYLEYPVDCFNCPICSQILASFGKWAKHINNVHKSTSIRVICKKCGKYSQFHNIACHYPKCRPREVDNSEKKYACTVCGSAFYTRSGRSQHIRHRHPAVRNEERKEARVVGKTSRSRVWTEEEIELLIQLEIKYAGTRNINKCIESELKTKTNKQISNKRRDLARNKVKKDEDSMVLWEEGGMGDILEDIPPREKIKPLKDNILIDRFLTGVRCNGARILEKLDFIEQQLNASATVAEGWGLFEELCKLLMNSPHEDVENLENNKENNIQNDNGKQGGKVGKPPDKYNRNRKYAGRKAKFRFYQTLFEKDKKRLARIIMGEPDKATCKIAVKEIETYYKEILGKEGHGNTRGWPKVKEVVDNEILNWPLSIDEIREALREIDNSSAPGPDGIKVKDLWDIYNLDSRILVRIFNIWFLNRQIPECFKGNRTILIPKVKDPQELKKISSWRPLTIGSIWIRLYTKILAKRLSSAVKLCPRQKDFIAASGCEENISILEKLIKGAKKNKDEIAVVFIDLAKAFDSVGHGHILKGLKRFGISESFIDIVKDLYTDCYTEISVGEDKTEPILIKSGVKQGDPLSPILFNIAMDPLLYKLEDEGDGFIVQGRKITSLAFADDIAILSRSYKGMVKNLKILNQFCKNSSLKVNVKKTKGFHVFPSMGTYVINPKDKWGLGDELIDYIQPGESERYLGARIDPWVGVANNSPKEKLIDWCESLCKAPLKPAQKLIILKVYILTRVFYELLLIEPPLYMLNELDVLVRNTLKKILHLPQCTTDGLFYARTRDGGLAVTKFSTQIPNMLIRKWRRHIVSKDDWIDFSFLYAGENLVEKILIYSAKTANPKMWRDEEFSKWSNLRCQGIGIKYFKNDCISNSFLKYPCLARSSSLIAALQTRANVFPTREALARGRKMEEGLCRWCGKVKETIPHISGQCIKMKEARIKRHNRIVKALIDKVGNKGCKIWIEPYLHNKEGKLRKPDLIIEKEGVVAVVDVTVRWEDNADSVEAAHIEKEAYYSELEEEVLQLTGGKIIHFFGFVVGARGKWSERNDEIFKILGIDKFKSFKESVCRLAMYATTDMLALFSDKQ

SEQ ID NO: 18024 - protein, 1261 aa, Emydura subglobosa
MEKTEILFHTGLALDRVKNAPATSFDAPARSVKLIRGIIHRAGPMLSPYAIDRVKDGIAGFMDDFNLRVGEKSVVREEQEDFSESQVLDFNLLPMAFTNVFYSDLKIIDSKSSFYDKYLDSFDDPYLIEFNNLNNNNTNFNNLQRDSMENRRNILGDNFNTNFMNTASFKESSSFKEGIFYLEYPVDCFNCPICSQILASFGKWAKHINNVHKSTSIRVICKKCGKYSQFHNIACHYPKCRPREVDNSEKKYACTVCGSAFYTRSGRSQHIRHRHPAVRNEERKEARVVGKTSRSRVWTEEEIELLIQLEIKYAGTRNINNCIESELKTKTNKQISNKRRDLARNKVKKDEDSMVLWEEGGMGDILEDIPPREKIKPLKDNILIDRFLTGVRCNGARILEKLDSIELQLNASATVAEGWGLFEELCKLLMNSPHEDVENLENNKENNIQNDNGKQGGKVGKPPDKYNRNRKYAGRKAKFRFYQTLFEKDKKRLARIIMGEPDKATCKIAVKEIETYYKEILGKEGHGNTRGWPKVKEVVDNEILNWPLSIDEIREALREIDNSSAPGPDGIKVKDLWDIYNLDSRILVRIFNIWFLNRQIPECFKGNRTILIPKVKDPQELKKISSWRPLTIGSIWIRLYTKILAKRLSSAVKLCPRQKGFIAASGCEENISILEKLIKGAKKNKDEIAVVFIDLAKAFDSVGHGHILKGLKRFGISESFIDIVKDLYTDCYTEISVGEDKTEPILIKSGVKQGDPLSPILFNIAMDPLLYKLEDEGDGFIVQGRKITSLAFADDIAILSRSYKGMVKNLKILNQFCKNSSLKVNVKKTKGFHVFPSMGTYVINPKDKWGLGDELIDYIQPGESERYLGARIDPWVGVANNSPKEKLIDWCESLCKAPLKPAQKLIILKVYILTRVFYELLLIEPPLYMLNELDVLVRNTLKKILHLPQCTTDGLFYARTRDGGLAVTKFSTQIPNMLIRKWRRHIVSKDDWIDFSFLYAGENLVEKILIYSAKTANPKTWRDEEFLKWSNLRCQGIGIKYFKNDCISNSFLKYPCLARSSSLIAALQTRANVFPTREALARGRKMEEGLCRWCGKVKETIPHISGQCIKMKEARIKRHNRIVKALIDKVGNKGCKIWIEPYLHNKEGKLRKPDLIIEKEGVVAVVDVTVRWEDNADSVEAAHTEKEAYYSELEEEVLQLTGGKIIHFFGFVVGARGKWSERNDEIFKILGIDKFKSFKESVCRLAMYATTDMLALFSDKQ

SEQ ID NO: 18025 - protein, 930 aa, Emydura subglobosa
MLTQTYYGTRNINKCIESELKTKTNKQISDKRRDLAKNKVKKDEDSMVLWEEGRMGDILEDIPPREKIKPLKDKILIDRILTGVRCNGARILEKLDLIEQQLNASATVAEGWGLFEELCKLLINSPHEDVENVENNKENNIQNDNGKQGRKVGKHPDKYNRNRKYAGRKAKFRFYQTLFEKDKKRLARIIMGEPDKATCKIAVKEIETYYKEILGREGHGNTRGWPKVKEVVDNEILNWPLSIDEIREALREIDNSSAPGPDGIKVKDLWDIYNLDSRILVRIFNIWFLNRQIPECFKGNRTILIPKVKDPQELKKISSWRPLTIGSIWIRLYTKILAKRLSSAVKLCPRQKGFIAASGCEENISILEKLIKGAKKNKDEIAVVFIDLAKAFDSVSHGHILKGLKRFGISESFIDIVKDLYTDCYTEISVGEDKTEPILIKSGVKQGDPLSPILFNIAMDPLLYKLEDEGDGFIVQGRKITLLAFADDITILSRSYKGMVKNLKILNQFCKNSSLKVNVKKTKGFHIFPSMGTYVINPKDKWGLGDELIDYIQPGECERYLGARIDLWVGVANNSPKEKLVDWCESLYKAPLKPAQKLIILKVYILTRVFYELLLIEPPLYMLNELDVLVRNTLKKILHLPQCTTDGLFYARTRDGGLAVTKFSIQIPNMLIHKWRRHIVSKDDWIDFSFLYAVENLVEKILIYSAKTANPKTWRDEEFLKWSNLRCQGIGIKYFKNDCISNSFLKYPCLARSSSLIAALQTRANVFPTREDLARGWKMEEGLCRWCGKVKETIPHISGQCIKTKEARIKRHNRIVKALIDKVGNKGCKIWIEPYLHNKEGKLRKPDLIIEKEGVVAVVDVTVRWEDNADSVEAAHSEKEAYYSELEEEVLQLTGGKIIHFLGFVVGARGKWSERNDEIFKILDIDKFKF

SEQ ID NO: 18026 - protein, 1167 aa, Emydura subglobosa
MAFTNVFYSDLKISDSKSSFYDKYLDSFDDPYLIEFNNLNNNNTNFNNLQRDSMENRRNILGDNFNTNFMNTASFKESSSFKEGIFYLEYPVDCFNCPICSQILASFGKWAKHINNVHKSTSIRVICKKCGKYSQFHNIACHYPKCRPREVDNSEKKYACTVCGSAFYTRSGRSQHIRHRHPAVRNEERKEARVVGKTSRSRVWTEEEIELLIQLEIKYAGTRNINKCIESELKTKTNKQISNKRRDLARNKVKKDEDSMVLWEEGGMGDILEDIPPREKIKPLKDNILIDRFLTGVRCNGARILEKLDFIEQQLNASATVAEGWGLFEELCKLLMNSPHEDVENLENNKENNIQNDNGKQGGKVGKPPDKYNRNRKYAGRKAKFRFYQTLFEKDKKRLARIIMGEPDKATCKIAVKEIETYYKEILGKEGHGNTRGWPKVKEVVDNEILNWPLSIDEIREALREIDNSSAPGPDGIKVKDLWDIYNLDSRILVRIFNIWFLNRQIPECFKGNRTILIPKVKDPQELKKISSWRPLTIGSIWIRLYTKILAKRLSSAVKLCPRQKGFIAASGCEENISILEKLIKGAKKNKDEIAVVFIDLAKAFDSVGHGHILKGLKRFGISESFIDIVKDLYTDCYTEISVGEDKTEPILIKSGVKQGDPLSPILFNIAMDPLLYKLEDEGDGFIVQGRKITSLAFADDIAILSRSYKGMVKNLKILNQFCKNSSLKVNVKKTKGFHVFPSMGTYVINPKDKWGLGDELIDYIQPGESERYLGARIDPWVGVANNSPKEKLIDWCESLCKAPLKPAQKLIILKVYILTRVFYELLLIEPPLYMLNELDVLVRNTLKKILHLPQCTTDGLFYARTRDGGLAVTKFSTQIPNMLIRKWRRHIVSKDDWIDFSFLYAGENLVEKILIYSAKTANPKTWRDEEFLKWSNLRCQGIGIKYFKNDCISNSFLKYPCLARSSSLIAALQTRANVFPTREALARGRKMEEGLCRWCGKVKETIPHISGQCIKMKEARIKRHNRIVKALIDKVGNKGCKIWIEPYLHNKEGKLRKPDLIIEKEGVVAVVDVTVRWEDNADSVEAAHIEKEAYYSELEEEVLQLTGGKIIHFFGFVVGARGKWSERNDEIFKILGIDKFKSFKESVCRLAMYATTDMLALFSDKQ

SEQ ID NO: 18027 - protein, 1260 aa, Emydura subglobosa
MEKTEILFHTGLALDRVKNAPATSFDAPASSVKLIRGIIHRAGPMLSPYAIDRVKDGIAGFMDDFNLRVGEKSVVQEEQEDFSESQVLDFNLLPMAFTNVLYSDLKIIDSKSSFYDKYLDSFDDPYLIEFNNLNNNTNFNNLQRDSMENRRNILGDNFNTKFMNTASFKESSSFKEGIFYLEYPVDCFNCPICSQILASFGKWAKHINNVHKSTSIRVICKKCGKYSQFHNIACHYPKCRPREVDNSEKKYACTVCGSAFYTRSGRSQHIRHRHPAVRNEERKEARVVGKTSRSRVWTEEEIELLIQLEIKYAGTRNINKCIESELKTKTNKQISNKRRDLARNKVKKDEDSMVLWEEGGMGDILEDIPPREKIKPLKDNILIDRFLTGVRCNGARILEKLDFIEQQLNASATVAEGWGLFEELCKLLMNSPHEDVENLENNKENNIQNDNGKQGGKVGKPPDKYNRNRKYAGRKAKFRFYQTLFEKDKKRLARIIMGEPDKATCKIAVKEIETYYKEILGKEGHGNTRGWPKVKEVVDNEILNWPLSIDEIREALREIDNSSAPGPDGIKVKDLWDIYNLDSRILVRIFNIWFLNRQIPECFKGNRTILIPKVKDPQELKKISSWRPLTIGSIWIRLYTKILAKRLSSAVKLCPRQKGFIAASGCEENISILEKLIKGAKKNKDEIAVVFIDLAKAFDSVGHGHILKGLKRFGISESFIDIVKDLYTDCYTEISVGEDKTEPILIKSGVKQGDPLSPILFNIAMDPLLYKLEDEGDGFIVQGRKITSLAFADDIAILSRSYKGMVKNLKILNQFCKNSSLKVNVKKTKGFHVFPSMGTYVINPKDKWGLGDELIDYIQPGESERYLGARIDPWVGVANNSPKEKLIDWCESLCKAPLKPAQKLIILKVYILTRVFYELLLIEPPLYMLNELDVLVRNTLKKILHLPQCTTDGLFYARTRDGGLAVTKFSTQIPNMLIRKWRRHIVSKDDWIDFSFLYAGENLVEKILIYSAKTANPKTWRDEEFLKWSNLRCQGIGIKYFKNDCISNSFLKYPCLARSSSLIAALQTRANVFPTREALARGRKMEEGLCRWCGKVKETIPHISGQCIKMKEARIKRHNRIVKALIDKVGNKGCKIWIEPYLHNKEGKLRKPDLIIEKEGVVAVVDVTVRWEDNADSVEAAHIEKEAYYSELEEEVLQLTGGKIIHFFGFVVGARGKWSERNDEIFKILGIDKFKSFKESVCRLAMYATTDMLALFSDKQ

SEQ ID NO: 18028 - protein, 904 aa, Emydura subglobosa
MVLWEEGGMGDILEDIPPREKIKPLKDKILIDRFLTGVRCNGARILEKLDFIEQQLNASATVAEGWGLFEELCKLLMNSPHEDVENLENNKENNIQNDNGNQGRKVGKPPDKYNRNRKYAGRKAKFRFYQTLFEKDKKRLARIIMGEPDKATCKIAVKEIETYYKEILGRGGHGNTREWPKVKEVVDNEILNWPLSIDEIREALREIDNSSAPGPDGIKVKDLWDIYNLDSRIIVRIFNIWFLNRQIPECFKGNRTILIPKVKDPQELKKISSWRPLTIGSIWIRLYTKILAKRLSGAVKLCPRQKGFIAASGCEENISILEKLIKGAKKNKDEIAVVFIDLAKAFDSVGHGHILKGLKRFGISESFIDIVKDLYTDCYTEISVGEDKTEPILIKSGVKQGDPLSPILFNLAMDPLLYKLEDEGDDFIVQGRKITSLAFADDIAILSRSYKGMVKNLKILNQFCKNSSLKVNVKKTKGFHIFPSMGTYVINPKDKWGLGDELIDYIQPGESERYLGARIDTWVGVANNSPKEKLIDWCESLCKAPLKPVQKLIILKVYILTRVFYELLLIEPPLYMLNELDVLVRNTLKKILHLPQCTTDGLFYARTRDGGLAVTKFSTQIPNMLIRKWRRHIVSKDDWIDFSFLYAGENLVEKILIYSAKTANPKTWRDEEFLKWSNLRCQGIGIKYFKNDCISNSFLKHPCLARSSSLIVALQTRANVFPTREALARGRKMEEGLCRWCGKVKGISGQCIKMKEARIKRHNRIVKALIDKVGNKGCKIWIEPYLHNKEEKLRKPDLIIEKEGVVAVVDVTVRWEDNADSVEAAHIEKEAYYSELEEEVLQLTDGKIIHFFGFVVGARGKWSERNDEIFKILGIDKFKSFKESVCRLAMYATTDMLALFSDKQ

SEQ ID NO: 18029 - protein, 1260 aa, Emydura subglobosa
MEKTEILFHTGLALDRVKNAPATSFDAPASSVKLIRGIIHRAGPMLSPYAIDRVKDGIAGFMDDFNLRVGEKSVVREEQEDFSESQVLDFNLLPMAFTNVLYSDLKIIDSKSSFYDKYLDSFDDPYLIEFNNLNNNTNFNNLQCDSMENRRNILGDNFNTNFMNTASFKESSSFKEGIFYLEYPVDCFNCPICSQILASFGKWAKHINNVHKSTSIRVICKKCGKYSQFHNIACHYPKCRPREVDNSEKKYACTVCGSAFYTRSGRSQHIRHRHPAVRNEERKEARVVGKTSRSRVWTEEEIELLIQLEIKYAGTRNINKCIESELKTKTNKQISNKRRDLARNKVKKDEDSMVLWEEGGMGDILEDIPPREKIKPLKDNILIDRFLTGVRCNGARILEKLDFIEQQLNASATVAEGWGLFEELCKLLMNSPHEDVENFENNKENNIQNDNGKQGGKVGKPPDKYNRNRKYAGRKAKFRFYQTLFEKDKKRLARIIMGEPDKATCKIAVKEIETYYKEILGKEGHGNTRGWPKVKEVVDNEILNWPLSIDEIREALREIDNSSAPGPDGLKVKDLWDIYNLDSRILVRIFNIWFLNRQIPECFKGNRTILIPKVKDPQELKKISSWRPLTIGSIWIRLYTKILAKRLLSAVKLCPRQKGFIAASGCEENISILEKLIKGAKKNKDEIAVVFIDLAKAFDSVGHGHILKGLKRFGISESFIDIVKDLYTDCYTEISVGEDKTEPILIKSGVKQGDPLSPILFNIAMDPLLYKLEDEGDGFIVQGRKITSLAFADDIAILSRSYKGMVKNLKILNQFCKNSSLKVNVKKTKGFHVFPSMGTYVINPKDKWGLGDELIDYIQPGESERYLGARIDPWVGVANNSPKEKLIDWCESLCKAPLKPAQKLIILKVYILTRVFYELLLIEPPLYMLNELDVLVRNTLKKILHLPQCTTDGLFYARTRDGGLAVTKFSTQIPNMLIRKWRRHIVSKDDWIDFSFLYAGENLVEKILIYSAKTANPKTWRDEEFLKWSNLRCQGIGIKYFKNDCISNSFLKYPCLARSSSLIAALQTRANVFPTREALARGRKMEEGLCRWCGKVKETIPHISGQCIKMKEARIKRHNRIVKALIDKVGNKGCKIWIEPYLHNKEGKLRKPDLIIEKEGVVAVVDVTVRWEDNADSVETAHIEKEAYYSELEEEVLQLTGGKIIHFFGFVVGARGKWSERNDEIFKILGIDKFKSFKESVCRLAMYATTDMLALFSDKQ

SEQ ID NO: 18030 - protein, 1260 aa, Emydura subglobosa
MEKTEILFHTGLALDRVKNAPATSFDAPASSVKLIRGIIHRAGPMLSPYAIDRVKDGIAGFMDDFNLRVGEKSVVREEQEDFSESQVLDFNLLPMAFTNVLYSDLKIIDSKSSFYDKYLDSFDDPYLIEFNNLNNNTNFNNLQLDSMENRRNILGDNFNTNFMNTASFKESSSFKEGIFYLEYPVDCFNCPICSQILASFGKWAKHINNVHKSTSIRVICKKCGKYSQFHNIACHYPKCRPREVDNSEKKYACTVCGSAFYTRSGRSQHIRHRHPAVRNEERKEARVVGKTSRSRVWTEEEIELLIQLEIKYAGTRNINKCIESELKTKTNKQISNKRRDLARNKVKKDEDSMVLWEEGGMGDILEDIPPREKIKPLKDNILIDRFLTGVRCNGARILEKLDFIEQQLNASATVAEGWGLFEELCKLLMNSPHEDVENLENNKENNIQNDNGKQGGKVGKPPDKYNRNRKYAGRKAKFRFYQTLFEKDKKRLARIIMGEPDKATCKIAVKEIETYYKEILGKEGHGNTRGWPKVKEVVDNEILNWPLSIDEIREALREIDDSSAPGPDGIKVKDLWDIYNLDSRILVRIFNIWFLNRQIPECFKGNRTILIPKVKDPQELKKISSWRPLTIGSIWIRLYTKILAKRLSSAVKLCPRQKGFIAASGCEENISILEKLIKGAKKNKDEIAVVFIDLAKAFDSVGHGHILKGLKRFGISESFIDIVKDLYTDCYTEISVGEDKTEPILIKSGVKQGDPLSPILFNIAMDPLLYKLEDEGDGFIVQGRKITSLAFADDIAILSRSYKGMVKNLKILNQFCKNSSLKVNVKKTKGFHVFPSMGTYVINPKDKWGLGDELIDYIQPGESERYLGARIDPWVGVANNSPKEKLIDWCESLCKAPLKPAQKLIILKVYILTRVFYELLLIEPPLYMLNELDVLVRNTLKKILHLPQCTTDGLFYARTRDGGLAVTKFSTQIPNMLIRKWRRHIVSKDDWIDFSFLYAGENLVEKILIYSAKTANPKTWRDEEFLKWSNLRCQGIGIKYFKNDCISNSFLKYPCLARSSSLIAALQTRANVFPTREALARGRKMEEGLCRWCGKVKETIPHISGQCIKMKEARIKRHNRIVKALIDKVGNKGCKIWIEPYLHNKEGKLRKPDLIIEKEGVVAVVDVTVRWEDNADSVEAAHIEKEAYYSELEEEVLQLTGGKIIHFFGFVVGARGKWSERNDEIFKILGIDKFKSFKESVCRLAMYATTDMLALFSDKQ

SEQ ID NO: 18031 - protein, 1260 aa, Emydura subglobosa
MEKTEILFHTGLALDRVKNAPATSFDAPASSVKLIRGIIHRAGPMLSPYAIDRVKDGIAGFMDDFNLRVGEKSVVREEQEDFSESQVLDFNLLPMAFTNVLYSDLKIIDSKSSFYDKYLDSFDDPYLIEFNNLNNNTNFNNLQRDSMENRRNILGDNFNTNFMNTASFKESSSFKEGIFYLEYPVDCFNCPICSQILASFGKWAKHINNVHKSTSIRVICKKCGKYSQFHNIACHYPKCRPREVDNSEKKYACTVCGSAFYTRSGRSQHIRHRHPAVRNEERKEARVVGKTSRSRVWTEEEIELLIQLEIKYAGTRNINKCIESELKTKTNKQISNKRRDLARNKVKKDEDSMVLWEEGGMGDILEDIPPREKIKPLKDNILIDRFLTGVRCNGARILEKLDFIEQQLNASATVAEAWGLFEELCKLLMNSPHEDVENLENNKENNIQNDNGKQGGKVGKPPDKYNRNRKYAGRKAKFRFYQTLFEKDKKRLARIIMGEPDKATCKIAVKEIETYYKEILGKEGHGNTRGWPKVKEVVDNEILNWPLSIDEIREALREIDNSSAPGPDGIKVKDLWDIYNLDSRILVRIFNIWFLNRQIPECLKGNRTILIPKVKDPQELKKISSWRPLTIGSIWIRLYTKILAKRLSSAVKLCPRQKGFIAASGCEENISILEKLIKGAKKNKDEIAVVFIDLAKAFDSVGHGHILKGLKRFGISESFTDIVKDLYTDCYTEISVGEDKTEPILIKSGVKQGDPLSPILFNIAMDPLLYKLEDEGDGFIVQGRKITSLAFADDIAILSRSYKGMVKNLKILNQFCKNSSLKVNVKKTKGFHVFPSMGTYVINPKDKWGLGDELIDYIQPGESERYLGARIDPWVGVANNSPKEKLIDWCESLCKAPLKPAQKLIILKVYILTRVFYELLLIEPPLYMLNELDVLVRNTLKKILHLPQCTTDGLFYARTRDGGLAVTKFSTQIPNMLIRKWRRHIVSKDDWIDFSFLYAGENLVEKILIYSAKTANPKTWRDEEFLKWSNLRCQGIGIKYFKNDCISNSFLKYPCLARSSSLIAALQTRANVFPTREALARGRKMEEGLCRWCGKVKETIPHISGQCIKMKEARIKRHNRIVKALIDKVGNKGCKIWIEPYLHNKEGKLRKPDLIIEKEGVVAVVDVTVRWEDNADSVEAAHIEKEAYYSELEEEVLQLTGGKIIHFFGFVVGARGKWSERNDEIFKILGIDKFKSFKESVCRLAMYATTDMLALFSDKQ

SEQ ID NO: 18032 - protein, 1261 aa, Emydura subglobosa
MEQTEILFHTGLALDRVKNAPATSFDALASSVKLIRGIIHRAGPMLSPYAIDRVKDGIAGFMDDFNLRVGEKSVVREEQEDFSESQVLDFNLLPMAFTNVLYSDLKIIDSKSSFYDKYLDSFDDPYLIEFNNLNNNNTNFNNLQHDSMENRRNILEDNFNTNFMNTASFKESSSFKEGIFYLEYPVDCFNCPICSQILASFGKWAKHINNVHKSTSIRVICKKCGKYSQFHNIACHYPKCRPKEVDNSEKKYACTVCGSAFYTRSGRSQHIRHRHPAVRNEERKEARVVGKTSRSRVWTEEEIELLIQLEIKYAGIRNINKCIESELKTKTNKQISDKRRDLAKNKVKKDEDSMVLWEEGGMGDILEDIPPREKIKPLKDKILIDRFLTGVRCNGARILEKLDSIEQQLNASATVAEGWGLFEELCKLLMNSPHKDVENLENNKENNIQNDNGKQGRKVGKPPDKYNRNRKYAGRKAKFRFYQTLFEKDKKRLARIIMGEPDKATCKIAVKEIETYYKEILGREGHGNTRGWPKVKEVVDNEILNWPLSIDEIREALREIDNSSAPGPDGMKVKDLWDFYNLDSRILVRIFNIWFLKRQIPECFKSNRTILIPKVKDPQELKKISSWRPLTIGSIWIRLYTKILAKRLSNAVKLCPRQKGFIAASGCEENISILEKLIKGAKKNKDEIAVVFIDLAKAFDSVGHGHILKGLKRFGISESFIDIVKDLYTDCYTEISVGEDKTEPILIKSGVKQGDPLSPILFNIAMDPLLYKLEDEGDGFIVQGRKITSLALADDIAILSRSYKGMVKNLKILNQFCKNSSLKVNVKKTKGFHIFPSMGTYVINPKDKWGLGDELIDYIQPGESERYLGARIDPWVGVANNSPKEKLIDWCESLFKALLKPAQKLIILKVYILTRVFYELLLIEPPLYMLNELDVLVRKTLKKILHLPQCTTDGLFYARTRDGGLAVTKFSTQIPNMLIRKWRRHIVSKDDWIDFSFLYAGENLVEKILIYSAKTANPKTWRDEEFLKWSNLRCQGIGIKYFKNDGISNSFLKYPCLAKSSSLIAALQTRANVFPTREALARGRKMEEGLCRWCGKVKETIPHISGQCIKMKEARIKRHNRIVKALIYKVGNKGCKIWIEPYLHNKEGKLRKPDLIIEKEGVVAVVDVTVRWEDNADSVEAAHIEKEAYYSELEEEVLQLTGGKIIHFFGFVVGVRGKWSERNDEIFKILGIDKFKSFKESVCRLAMYAMTDMLALFSDKQ

SEQ ID NO: 18033 - protein, 906 aa, Emydura subglobosa
MVLWEEGGMGDILEDIPPLEKIKPLKDKILIDRFLIGVKCNGARILEKLDFIEQQLNASATVAEGWGLFEELCKLLMNSPHEDVENLENNKENNIQNDNGKQGRKVSKPPDKYNRNRKYAGRKAKFRFYQTLFEKDKKRLARIIMGEPDKATCKIAVKEIETYYKEILGREGNTRGWPKVKEVVDNEILNWPLSIDEIREVLREIDNSSAPGPDGIKVKDLWDIYNLDSRILVRIFNIWFLNRQIPECFKGNRTILIPKVKDPQELKKISSWRPLTIGSIWIRLYTKILAKRLSSAVKLCPRQKGFIAASGCEENISILEKLIKGAKKNKDEIAVVFIDLAKAFDSVGYGHILKGLKRCGISESFIDIVKDLYTDCYTEISVGEDKTEPILIKSGVKQGDPLSPILFNIAIYPLLYKLEDEGDGFIVQGRKITSLAFADDIAILSRSYKGMVKNLKILNQFCKNSSLKVNVKKTMGFHIFPSMGTYVINPKDKWGLGDELIDYIQPGESERYLGARIDPWVGVANNSPKEKIIDWCESLCKAPLKPAQKLIILKVYILTRVFYELLLIEPPLYMLNELDVLVRNTLKKILHLPQCTTDGLFYARTRDGGLAVTKFSTQIPNMLIRKWRRHIVSKDDWIDFSFLYAGENLVEKILIYSAKTANPKTWRDEEFLKWSNLRCQGIGIKYFKNDYISNSFLKYPCLARSSSLIAALQMRVNVFPTRKALARGRKMEEGLCRWCGKVKETIPHISGQYIKMKEARVKRHNRIVKALIDKVGNKGCKIWIEPYLHNKEGKLRKPDLIIEKEGVVAVVDVTVRWEDNADSVEAAHIEKEAYYSELEEEVLQLTGGKIIHFFGFVVGARGKWSERNDEIFKILGIDKFKSFKESVCRLAMYAMTDMLALFSDKQ

SEQ ID NO: 18034 - protein, 1260 aa, Emydura subglobosa
MEKTEILFHTGLALDRVKNAPATSFDAPASSVKLIRGIIHRAGPMLSPYAIDRVKDGIAGFMDDFNLRVGEKSVVREEQEDFSESQVLDFNLLPMAFTNVLYSDLKIIDSKSSFYDKYLDSFDDPYLIEFNNLNNNTNFNNLQRDSMENRRKILGDNFNTNFMNTASFKESSSFKEGIFYLEYPVDCFNCPICSQILASFGKWAKHINNVHKSTSVRVICKKCGKYSQFHNIACHYPKCRPREVDNSEKKYACTVCGSAFYTRSGRSQHIRHRHPAVRNEERKEARVVGKTSRSRVWTEEEIELLIQLEIKYAGTRNINKCIESELKTKTNKQISNKRRDLARNKVKKDEDSMVLWEEGGMGDILEDIPPREKIKPLKDNILIDRFLTGVRCNGARILEKLDFIEQQLNASATVAEGWGLFEELCKLLMNSPHEDVENLENNKENNIQNDNGKQGGKVGKPPDKYNRNRKYAGRKAKFRFYQTLFEKDKKRLARIIMGEPDKATCKIAVKEIETYYKEILGKEGHGNTRGWPKVKEVVDNEILNWPLSIDEIREALREIDNSSAPGPDGIKVKDLWDIYNLDSRILVRIFNIWFLNRQIPECFKGNRTILIPKVKDPQELKKISSWRPLTIGSIWIRLYTKILAKRLSSAVKLCPRQKGFIAASGCEENISILEKLIKGAKKNKDEIAVVFIDLAKAFDSVGHGHILKGLKRFGISESFIDIVKDLYTDCYTEISVGEDKTEPILIKSGVKQGDPLSPILFNIAMDPLLYKLEDEGDGFIVQGRKITSLAFADDIAILSRSYKGMVKNLKILNQFCKNSSLKVNVKKTKGFHVFPSMGTYVINPKDKWGLGDELIDYIQPGESERYLGARIDPWVGVANNSPKEKLIDWCESLCKAPLKPAQKLIILKVYILTRVFYELLLIEPPLYMLNELDVLVRNTLKKILHLPQCTTDGLFYARTRDGGLAVTKFSTQIPNMLIRKWRRHIVSKDDWIDFSFLYAGENLVEKILIYSAKTANPKTWRDEEFLKWSNLRCQGIGIKYFKNDCISNSFLKYPCLARSSSLIAALQTRANVFPTREALARGRKMEEGLCRWCGKVKETIPHISGQCIKMKEARIKRHNRIVKALIDKVGNKGCKIWIEPYLHNKEGKLRKPDLIIEKEGVVAVVDVTVRWEDNADSVEAAHIEKEAYYSELEEEVLQLTGGKIIHFFGFVVGARGKWSERNDEIFKILGIDKFKSFKESVCRLAMYATTDMLALFSDKQ

SEQ ID NO: 18035 - protein, 1217 aa, Emydura subglobosa
MLSPYAIDRVKDGIAGFMDDFNLRVGEKSVVREEQEDFSESQVLDFNLLPMAFTNVFYSDLKISDSKSSFYDKYLDSFDDPYLIEFNNLNNNNTNFNNLQRDSMENRRNILGDNFNTNFMNTASFKESSSFKEGIFYLEYPVDCFNCPICSQILASFGKWAKHINNVHKSTSIRVICKKCGKYSQFHNIACHYPKCRPREVDNSEKKYACTVCGSAFYTRSGRSQHIRHRHPAVRNEERKEARVVGKTSRSRVWTEEEIELLIQLEIKYAGTRNINKCIESELKTKTNKQISNKRRDLARNKVKKDEDSMVLWEEGGMGDILEDIPPREKIKPLKDNILIDRFLTGVRCNGARILEKLDFIEQQLNASATVAEGWGLFEELCKLLMNSPHEDVENLENNKENNIQNDNGKQGGKVGKPPDKYNINRKYAGRKAKFRFYQTLFEKDKKRLARIIMGEPDKATCKIAVKEIETYYKEILGKEGHGNTRGWPKVKEVVDNEILNWPLSIDEIREALREIDNSSAPGPDGIKVKDLWDIYNLDSRILVRIFNIWFLNRQIPECFKGNRTILIPKVKDPQELKKISSWRPLTIGSIWIRLYTKILAKRLSSAVKLCPRQKGFIAASGCEENISILEKLIKGAKKNKDEIAVVFIDLAKAFDSVGHGHILKGLKRFGISESFIDIVKDLYTDCYTEISVGEDKTEPILIKSGVKQGDPLSPILFNIAMDPLLYKLEDEGDGFIVQGRKITSLAFADDIAILSRSYKGMVKNLKILNQFCKNSSLKVNVKKTKGFHVFPSMGTYVINPKDKWGLGDELIDYIQPGESERYLGARIDPWVGVANNSPKEKLIDWCESLCKAPLKPAQKLIILKVYILTRVFYELLLIEPPLYMLNELDVLVRNTLKKILHLPQCTTDGLFYARTRDGGLAVTKFSTQIPNMLIRKWRRHIVSKDDWIDFSFLYAGENLVEKILIYSAKTANPKTWRDEEFLKWSNLRCQGIGIKYFKNDCISNSFLKYPCLARSSSLIAALQTRANVFPTREALARGRKMEEGLCRWCGKVKETIPHISGQCIKMKEARIKRHNRIVKALIDKVGNKGCKIWIEPYLHNKEGKLRKPDLIIEKEGVVAVVDVTVRWEDNADSVEAAHIEKEAYYSELEEEVLQLTGGKIIHFFGFVVGARGKWSERNDEIFKILGIDKFKSFKESVCRLAMYATTDMLALFSDKQ

SEQ ID NO: 18036 - protein, 1260 aa, Emydura subglobosa
MEKTEILFHTGLALDRVKNAPATSFDAPASSVKLIRGIIHRAGPMLSPYAIDRVKDGIAGFMDDFNLRVGEKSVVREEQEDFSESQVLDFNLLPMAFTNVLYSDLKIIDSKSSFYDKYLDSFDDPYLIEFNNLNNNTNFNNLQCDSMENRRNILGDNFNTNFMNTASFKESSSFKEGIFYLEYPVDCFNCPICSQILASFGKWAKHINNVHKSTSIRVICKKCGKYSQFHNIACHYPKCRPREVDNSEKKYACTVCGSAFYTRSGRSQHIRHRHPAVRNEERKEARVVGKTSCSRVWTEEEIELLIQLEIKYAGTRNINKCIESELKTKTNKQISNKRRDLARNKVKKDEDSMVLWEEGGMGDILEDIPPREKIKPLKDNILIDRFLTGVRCNGARILEKLDFIEQQLNASATVAEGWGLFEELCKLLMNSPHEDVENLENNKENNIQNDNGKQGGKVGKPPDKYNRNRKYAGRKAKFRFYQTLFEKDKKRLARIIMGEPDKATCKIAVKEIETYYKEILGKEGHGNTRGWPKVKEVVDNEILNWPLSIDEIREALREIDNSSAPGPDGIKVKDLWDIYNLDSRILVRIFNIWFLNRQIPECFKGNRTILIPKVKDPQELKKISSWRPLTIGSIWIRLYTKILAKRLLSAVKLCPRQKGFIATSGCEENISILEKLIKGAKKNKDEIAVVFIDLAKAFDSVGHGHILKGLKRFGISESFIDIVKDLYTDCYTEISVGEDKTEPILIKSGVKQGDPLSPILFNIAMDPLLYKLEDEGDGFIVQGRKITSLAFADDIAILSRSYKGMVKNLKILNQFCKNSSLKVNVKKTKGFHVFPSMGTYVINPKDKWGLGDELIDYIQPGESERYLGARIDPWVGVANNSPKEKLIDWCESLCKAPLKPAQKLIILKVYILTRVFYELLLIEPPLYMLNELDVLVRNTLKKILHLPQCTTDGLFYARTRDGGLAVTKFSTQIPNMLIRKWRRHIVSKDDWIDFSFLYAGENLVEKILIYSAKTANPKTWRDEEFLKWSNLRCQGIGIKYFKNDCISNSFLKYPCLARSSSLIAALQMRANVFPTREALARGRKMEEGLCRWCGKVKETIPHISGQCIKMKEARIKRHNRIVKALIDKVGNKGCKIWIEPYLHNKEGKLRKPDLIIEKEGVVAVVDVTVRWEDNADSVEAAHIEKEAYYSELEEEVLQLTGGKIIHFFGFVVGARGKWSERNDEIFKILGIDKFKSFKESVCRLAMYATTDMLALFSDKQ

SEQ ID NO: 18037 - protein, 1264 aa, Emydura subglobosa
MEKTEILFHTGLALDRVKNAPATSFDAPASSVKLIRGIIHRAGPMLSPYAIDRVKDGIAGFMDDFNLRVGEKSVVREEQEDFSESQVLDFNLLPMAFTNVLYSDLKIIDSKSSFYDKYLDSFDDPYLIEFNNLNNNTNFNNLQRDSMENRRNILGDNFNTNFMNTASFKESSSFKEGIFYLEYPVDCFNCPICSQILASFGKWAKHINNVHKSTSIRVICKKCGKYSQFHNIACHYPKCRPREVDNSEKKYACTVCGSAFYTRSGRSQHIRHRHPAVRNEERKEARVVGKTSRSRVWTEEEIELLIQLEIKYAGTRNINKCIESELKTKTNKQISNKRRDLARNKVKKDEDSMVLWEEGGMGDILEDIPPREKVKPLKDNILIDRFLTGVRCNGARILEKLDFIEQQLNASATVAEGWGLFEELCKLLMNSPHEDVENLENNKENNIQNDNGKQGGKVGKPPDKYNRNRKYAGRKAKFRFYQTLFEKDKKRLARIIMGEPDKATCKIAVKEIETYYKEILGKEGHGNTRGWPKVKEVVDNEILNWPLSIDEIREALREIDNSSAPGPDGIKVKDLWDIYNLDSRILVRIFNIWFLNRQIPECFKGNRTILIPKVKDPQELKKISSWILTIGQLTIGSIWIRLYTKILAKRLSSAVKLCPRQKGFIAASGCEENISILEKLIKGAKKNKDEIAVVFIDLAKAFDSVGHGHILKGLKRFGISESFIDIVKDLYTDCYTEISVGEDKTEPILIKSGVKQGDPLSPILFNIAMDPLLYKLEDEGDGFIVQGRKITSLAFADDIAILSRSYKGMVKNLKILNQFCKNSSLKVNVKKTKGFHVFPSMGTYVINPKDKWGLGDELIDYIQPGESERYLGARIDPWVGVANNSPKEKLIDWCESLCKAPLKPAQKLIILKVYILTRVFYELLLIEPPLYMLNELDVLVRNTLKKILHLPQCTTDGLFYARTRDGGLAVTKFSTQIPNMLIRKWRRHIVSKDDWIDFSFLYAGENLVEKILIYSAKTANPKTWRDEEFLKWSNLRCQGIGIKYFKNDCISNSFLKYPYLARSSSLIAALQTRANVFPTREALARGRKMEEGLCRWCGKVKETIPHISGQCIKMKEARIKRHNRIVKALIDKVGNKGCKIWIEPYLHNKEGKLRKPDLIIEKEGVVAVVDVTVRWEDNADSVEAAHIEKEAYYSELEEEVLQLTGGKIIHFFGFVVGARGKWSERNDEIFKILGIDKFKSFKESVCRLAMYATTDMLALFSDKQ

SEQ ID NO: 18038 - protein, 1260 aa, Emydura subglobosa
MEKTEILFHTGLALDRVKNAPATSFDAPASSGKLIRGIIHRAGPMLSPYAIDRVKDGIAGFMDDFNLRVGEKSVVREEQEDFSESQVLDFNLLPMAFTNVLYSDLKIIDSKSSFYDKYLDSFDDPYLIEFNNLNNNTNFNNLQRDSMENRRNILGDNFNTNFMNTASFKESSSFKEGIFYLEYPVDCFNCPICSQILASFGKWAKHINNVHKSTSIRVICKKCGKYSQFHNIACHYPKCRPREVDNSEKKYACTVCGSAFYTRSGRSQHIRHRHPAVRNEERKEARVVGKTSRSRVWTEEEIELLIQLEIKYAGTRNINKCIESELKTKTNKQISNKRRDLARNKVKKDEDSMVLWEEGGMGDILEDIPPREKIKPLKDNILIDRFLTGVRCNGARILEKLDFIEQQLNASATVAEGWGLFEELCKLLMNSPHEDVENLENNKENNIQNDNGKQGGKVGKPPDKYNRNRKYAGRKAKFRFYQTLFEKDKKRLARIIMGEPDKATCKIAVKEIETYYKEILGKEGHGNTRGWPKVKEVVDNEILNWPLSIDEIREALREIDNSSAPGPDGIKVKDLWDIYNLDSRILVRIFNIWFLNRQIPECFKGNRTILIPKVKDPQELKKISSWRPLTIGSIWIRLYTKILAKRLSSAVKLCPRQKGFIAASGCEENISILEKLIKGAKKNKDEIAVVFIDLAKAFDSVGHGHILKGLKRFGISESFIDIVKDLYTDCYTEISVGEDKTEPILIKSGVKQGDPLSPILFNIAMDPLLYKLEDEGDGFIVQGRKITSLAFADDIAILSRSYKGMVKNLKILNQFCKNSSLKVNVKKTKGFHVFPSMGTYVINPKDKWGLGDELIDYIQPGESERYLGARIDPWVGVANNSPKEKLIDWCESLCKAPLKPAQKLIILKVYILTRVFYELLLIEPPLYMLNELDVLVRNTLKKILHLPQCTTDGLFYARTRDGGLAVTKFSTQIPNMLIRKWRRHIVSKDDWIDFSFLYAGENLVEKILIYSAKTANPKTWRDEEFLKWSNLRCQGIGIKYFKNDCISNSFLKYPCLARSSSLIAALQTRANVFPTREALARGRKMEEGLCRWCGKVKETIPHISGQCIKMKEARIKRHNRIVKALIDKVGNKGCKIWIEPYLHNKEGKLRKPDLIIEKEGVVAVVDVTVRWEDNADSVEAAHIEKEAYYSELEEEVLQLTGGKIIHFFGFVVGARGKWSERNDEIFKILGIDKFKSFKESVCRLAMYATTDMLALFSDKQ

SEQ ID NO: 18039 - protein, 908 aa, Emydura subglobosa
MVLWEEGGMGDILEDIPPREKIKPLKDNILIDRFLTGVRCNGARILEKLDFIEQQLNASATVAEGWGLFEELCKLLMNSPHKDVENLENNKENNIQKDNGKQGGKVGKPPDKYNRNRKYAGRKAKFRFYQTLFEKDKKRLARIIMGEPDKATCKIAVKEIETYYKEILGKEGHGNTRGWPKVKEVVDNEILNWPLSIDEIREALREIDNSSAPGPDGIKVKDLWDIYNLDSRILVRIFNIWFLNRQIPECFKGNRTILIPKVKDPQELKKISSWRPLTIGSIWIRLYTKILAKRLSSAVKLCPRQKGFIAASGCEENISILEKLIKGAKKNKDEIAVVFIDLAKAFDSVGHGHILKGLKRFGISESFIDIVKDLYTDCYTEISVGEDKTEPILIKSGVKQGDPLSPILFNIAMDPLLYKLEDEGDGFIVQGRKITSLAFADDIAILSRSYKGMVKNLKILNQFCKNSSLKVNVKKTKGFHVFPSMGTYVINPKDKWGLGDELIDYIQPGESERYLGARIDPWVGVANNSPKEKLIDWCESLCKAPLKPAQKLIILKVYILTRVFYELILIEPPLYMLNELDVLVRNTLKKILHLPQCTTDGLFYARTRDGGLAVTKFSTQIPNMLIRKWRRHIVSKDDWIDFSFLYAGENLVEKILIYSAKTANPKTWRDEEFLKLSNLRCQGIGIKYFKNDCISNSFLKYPCLARSSSLIAALQTRANVFPTREALARGRKMEEGLCRWCGKVKETIPHISGQCIKMKEARIKRHNRIVKALIDKVGNKGCKIWIEPYLHNKEGKLRKPDLIIEKEGVVAVVDVTVRWEDNADSVEAAHIEKEAYYSELEEEVLQLTGGKIIHFFGFVVGARGKWSERNDEILKILGIDKFKSFKESVCRLAMYATTDMLALFSDKQ

SEQ ID NO: 18040 - protein, 1114 aa, Emydura subglobosa
MENRRNILGDNFNTNFMNTASFKESSSFKEGIFYLEYPVDCFNCPICSQILASFGKWAKHINNVHKSTSIRVICKKCGKYSQFHNIACHYPKCRPREVDNSEKKYACTVCGSAFYTRSGRSQHIRHRHPAVRNEERKEARVVGKTSRSRVWTEEEIELLIQLEIKYAGTRNINKCIESELKTKTNKQISNKRRDLARNKVKKDEDSMVLWEEGGMGDILEDIPPREKIKPLKDNILIDRFLTGVRCNGARILEKLDFIEQQLNASATVAEGWGLFEELCKLLMNSPHEDVENLENNKENNIQNDNGKQGGKVGKPPDKYNRNRKYAGRKAKFRFYQTLFEKDKKRLARIIMGEPDKATCKIAVKEIETYYKEILGKEGHGNTRGWPKVKEVVDNEILNWPLSIDEIREALREIDNSSAPGPDGIKVKDLWDIYNLDSRILVRIFNIWFLNRQIPECFKGNRTILIPKVKDPQELKKISSWRPLTIGSIWIRLYTKILAKRLSSAVKLCPRQKGFIAASGCEENISILEKLIKGAKKNKDEIAVVFIDLAKAFDSVGHGHILKGLKRFGISESFIDIVKDLYTDCYTEISVGEDKTEPILIKSGVKQGDPLSPILFNIAMDPLLYKLEDEGDGFIVQGRKITSLAFADDIAILSRSYKGMVKNLKILNQFCKNSSLKVNVKKTKDFHVFPSMGTYVINPKDKWGLGNELIDYIQPGESERYLGARIDPWVGVANNSPKEKLIDWCESLCKAPLKPAQKLIILKVYILTRVFYELLLIELPLYMLNELDVLVRNTLKKILHLPQCTTDGLFYARTRDGGLAVTKFSTQIPNMLIRKWRRHIVSKDDWIDFSFLYAGENLVEKILIYSAKTANPKTWRDEEFLKWSNLRCQGIGIKYFKNDCISNSFLKYPCLARSSSLIAALQTRANVFPTREALARGRKMEEGLCRWCGKVKETIPHISGQCIKMKEARIKRYNRIVKALIDKVGNKGCKIWIEPYLHNKEGKLRKPDLIIEKEGVVAVVDVTVRWEDNADSVEAAHIEKEAYYSELEEEVLQLTGGKIIHFFGFVVGARGKWSERNDEIFKILGIDKFKSFKESVCRLAMYATTDMLALFSDKQ

SEQ ID NO: 18041 - protein, 908 aa, Emydura subglobosa
MVLWEEGGMGDILEDIPPREKIKPLKDNILIDRFLTGVRCNGARILEKLDFIEQQLNASATVAEGWGLFEELCKLLMNSPHEDVENLENNKENNIQNDNGKQGGKVGKPPDKYNRNRKYAGRKAKFRFYQTLFEKDKKRLARIIMGEPDKATCKIAVKEIETYYKEILGKEGHGNTRGWPKVKEVVDNEILNWPLSIDEIREALREIDNSSAPGPDGIKVKDLWDIYNLDSRILVRIFNIWFLNRQIPECFQGNRTILIPKVKDPQELKKISSWRPLTIGSIWIRLYTKILAKRLSSAVKLCPRQKGFIAASGCEENISILEKLIKGAKKNKDEIAVVFIDLAKAFDSVGHGHILKGLKRFGISESFIDIVKDLYTDCYTEISVGEDKTEPILIKSGVKQGDPLSPILFNIAMDPLLYKLEDEGDGFIVQGRKITSLAFADDIAILSRSYKGMVTNLKILNQFCKNSSLKVNVKKTKGFHVFPSMGTYVINPKDKWGLGDELIDYIQPGESERYLGARIDPWVGVANNSPKEKLIDWCESLCKAPLKPAQKLIILKVYILMRVFYELLLIEPPLYMLNELDVLVRNTLKKILHLPQCTTDGLFYARTRDGGLAVTKFSTQIPNMLIRKWRRHIVSKDDWIDFSFLYAGENLVEKILIYSAKTANPKTWRDEEFSKWSNLRCQGIGIKYFKNDCISNSFLKYPCLARSSSLIAALQTRANVFPTREALARGRKMEEGLCRWCGKVKETIPHISGQCIKMKEARIKRHNRIVKALIDKVGNKGCKIWIEPYLHNKEGKLRKLDLIIEKEGVVAIVDVTVRWEDNADSVEAAHIEKEAYYSELEEEVLQLTGGKIIHFFGFVVGARGKWSERNDEIFKILGIDKFKSFKESVCRLAMYATTDMLALFSDKQ

SEQ ID NO: 18042 - protein, 1167 aa, Emydura subglobosa
MAFTNVLYSDLKIIDSKSSFYDKYLDSFDDPYLIEFNNLNNNNTNFNNLQRDSMENRRNILGDNFNTNFMNTASFKESSSFKEGIFYLEYPVDCFNCPICSQILASFGKWAKHINNVHKSTSIRVICKKCGKYSQFHNIACHYPKCRPREVDNSEKKYACTVCGSAFYTRSGRSQHIRHRHPAVRNEERKEARVVGKTSRSRVWTEEEIELLIQLEIKYAGTRNINKCIESELKTKTNKQISNKRRDLARNKVKKDEDSMVLWEEGGMGDILEDIPPREKIKPLKDNILIDRFLTGVRCNGARILEKLDFIEQQLNASATVAEGWGLFEELCKLLMNSPHEDVENLENNKENNIQNDNGKQGGKVGKPPDKYNRNRKYAGRKAKFRFYQTLFEKDKKRLARIIMGEPDKATCKIAVKEIETYYKEILGKEGHGNTRGWPKVKEVVDNEILNWPLSIDEIREALREIDNSSAPGPDGIKVKDLWDIYNLDSRILVRIFNIWFLNRQIPECFKGNRTILIPKVKDPQELKKISSWRPLTIGSIWIRLYTKILAKRLSSAVKLCPRQKGFIAASGCEENISILEKLIKGAKKNKDEIAVVFIDLAKAFDSVGHGHILKGLKRFGISESFIDIVKDLYTDCYTEISVGEDKTEPILIKSGVKQGDPLSPILFNIAMDPLLYKLEDEGDGFIVQGRKITSLAFADDIAILSRSYKGMVKNLKILNQFCKNSSLKVNVKKTKGFHVFPSMGTYVINPKDKWGLGDELIDYIQPGESERYLGARIDPWVGVANNSPKEKLIDWCESLCKAPLKPAQKLIILKVYILTRVFYELLLIEPPLYMLNELDVLVRNTLKKILHLPQCTTDGLFYARTRDGGLAVTKFSTQIPNMLIRKWRRHIVSKDDWIDFSFLYAGENLVEKILIYSAKTANPKTWRDEEFLKWSNLRCQGIGIKYFKNDCISNSFLKYPCLARSSSLIAALQTRANVFPTREALARGRKMEEGLCRWCGKVKETIPHISGQCIKMKEARIKRHNRIVKALIDKVGNKGCKIWIEPYLHNKEGKLRKPDLIIEKEGVVAVVDVTVRWEDNADSVEAAHIEKEAYYSELEEEVLQLTGGKIIHFFGFVVGARGKWSERNDEIFKILGIDKFKSFKESVCRLAMYATTDMLALFSDKQ

SEQ ID NO: 18043 - protein, 1246 aa, Mesoclemmys tuberculata
MENNDNFIYTGLALDRVKNAPATGFDAPASSVKYVRGIIHRAGPLLSPLPMEKMKEELAGFMNARNLQKGDKIDVPVEQDNFSENQVFEFLPVVFTNNLYSDGEIDHLRSSFCDKYLNSFKDPYLIDFNTSVILHEELTDILREDVDLNLKEITRSQNSEYKEGVFYLEYPVDSFNCPICPQILANFGKWAKHINVVHKSTAIRVVCKKCGKQSHYHNISCHYPKCISREVDNSDRKYVCTVCGAGFHTRSGLSQHIRHRHPIVRNEQRKEASEVDKKNRCRIWTEEEILKLIQLEVKYMGKRNINKCIEIELRTKNNKQIAEKRRELAKKKLKRGNNVGILEGEGGIESVLENVLEEIPPKEKIKPLRDQDLIDKVILACGGRNGRQILENLDLIEKQLANVGTEASGWGMLEELCKVLMIPRVKENEVENCGEGKVNKKKVNNRNRQPSAPIRKYASKKARYRFYQTLFEKDKKRLARIIMGEPDKAQCNIAVQEIELYYKEILEKVGHGSNRGWPMVEEKADNERLNSLITTDEIREALREIKTTSAPGPDKAKVSDLWDVFNIDTRILTRIFNIWFLNKQIPEGFKENRTILIPKVQDPEELKKISSWRPLTIGSVWVRLYTKILAKRLSSAVKICPRQKGFISAPGCEENISILEKLMKGAKRNGDEIAIVFVDLAKAFDSVGHGHILYALKRFGVSGNFIDIVRDLYTDCFTKINIGEDSTEGILIKSGVKQGDPLSPILFNIAMDPLLTKLEKDGCGFFVQGRKITSLAFADDVAILSSSYEGMVKNLKILNQFCKNTGLKVNVKKTKGFHILPKKDTYVINPKGKWGLGDDFIEYIQPGETERYLGARIDPWVGVANVSPKHKLSIWCENLCKAPLKPAQKVIILKTYILTRVFYDLLLIEPPFYLLNDLDVLVRRVLKNILHLPQCVADGVFYSRIRDGGLAMTKFSVQIPNMLIRKWRRHIVSTDDWIDLSFLYAGENLVDKVLLYSAKTANPRKWRDEEFDRWSALRCQGIGIKYFKNDSISNSFLKFPCLAKSSSLITAIQMRANVFPTRETLARGRNMDGAMCRWCGKAKETIPHISGQCVKTKDARIKRHNRIVTALVDKVGKCGCRIWVEPHFRNKDGYLRKPDLVIEKDGVVTVVDVTVRWEDNADSMESAHIEKAEYYAELEEEVRKITGGKTIHFLGFVVGARGKWSVGNDEIFKFLGIDRIKNFKESICRLAMYATADMLALFSDKQ

SEQ ID NO: 18044 - protein, 1216 aa, Emydura subglobosa
MLSPYAIDRVKDGIAGFMDDFNLRGGEKSVVREEQEDFSESQVLDFNLLPMAFTNVLYSDLKIIDSKSSFYDKYLDSFDDPYLIEFNNLNNNTNFNNLQRDSMENRRNILGDNFNTNFMNTASFKESSSFKEGIFYLEYPVDCFNCPICSQILASFGKWAKHINNVHKSTSIRVICKKCGKYSQFHNIACHYPKCRPREVDNSEKKYACTVCGSAFYTRSGRSQHIRHRHPAVRNEERKEARVVGKTSPSRVWTEEEIELLIQLEIKYAGTRNINKCIESELKTKTNKQISNKRRDLARNKVKKDEDSMVLWEEGGMGDILEDIPPREKIKPLKDNILIDRFLTGVRCNGARILEKLDFIEQQLNASATVAEGWGLFEELCKLLMNSPHENVENLENNKENNIQNDNGKQGGKVGKPPDKYNRNRKYAGRKAKFRFYQTLFEKDKKRLARIIMGEPDKATCKIAVKEIETYYKEILGKEGHGNTRGWPKVKEVADNEILNWPLSIDEIREALREIDNSSAPGPDGIKVKDLWDIYNLDSRILVRIFNIWFLNRQIPECFKGNRTILIPKVKDPQELKKISSWRPLTIGSIWIRLYTKILAKRLSSAVKLCPRQKGFIAASGCEENISILEKLIKGAKKNKDEIAVVFIDLAKAFDSVGHGHILKGLKRFGISESFIDIVKDLYTDCYTEISVGEDKTEPILIKSGVKQGDPLSPILFNIAMDPLLYKLEDEGDGFIVQGRKITSLAFADDIAILSRSYKGMVKNLKILNQFCKNSSLKVNVKKTKGFHVFPSMGTYVINPKDKWGLGDELIDYIQPGESERYLGARIDPWVGVANNSPKEKLIDWCESLCKAPLKPAQKLIILKVYILTRVFYELLLIEPPLYMLNELDVLVRNTLKKILHLPQCTTDGLFYARTRDGGLAVTKFSTQIPNMLIRKWRRHIVSKDDWIDFSFLYAGENLVEKILIYSAKTANPKTWRDEEFLKWSNLRCQGIGIKYFKNDCISNSFLKYPCLARSSSLIAALQTRANVFPTREALARGRKMEEGLCRWCGKVKETIPHISGQCIKMKEARIKRHNRIVKALIDKVGNKGCKIWIEPYLHNKEGKLRKPDLIIEKEGVVAVVDVTVRWEDNADSVEAAHIEKEAYYSELEEEVLQLTGGKIIHFFGFVVGARGKWSERNDEIFKILGIDKFKNFKESVCRLAMYATTDMLALFSDKQ

SEQ ID NO: 18045 - protein, 1261 aa, Emydura subglobosa
MEKTEILFHTGLALDRVKNAPATSFDAPASSVKLIRGIIHRAGPMLSPYAIDRVKDGIAGFMDDFNLRVGEKSVVREEQEDFSESQVLDFNLLPMAFTNVLYSDLKIIDSKSSFYDKYLDSFDDPYLIEFNNLNNNNTNFNNLQRDFMENRRNILGDNFNTNFMNTASFKESSSFKEGIFYLEYPVDCFNCPICSQILASFGKWAKHINNVHKSTSIRVICKKCGKYSQFNNIACHYPKCRPKEVDNSEKKYACTVCGSAFYTRSGRSQHIRHRHPVVRNEERKEARVVGKTSRSRVWTEEEIELLIQLEIKYAGTRNINKCIESELKTKTNKQISNKRRDLARNKVKKDEDSMVLWEEGGMGDILEDIPPREKIKPLKDNILIDRFLTGVRCNGARILEKLDFIEQQLNASATVAEGWGLFEELCKLLMNSPHEDVENLENNKENNIQHDNGKQGGKVGKPPDKYNRNRKYAGRKAKFRFYQTLFEKDKKRLARIIMGEPDKATCKIAVKEIETYYKEILGKEGHGNTRGWPKVKEVVDNEILNWPLSIDEIREALREIDNSSAPGPDGIKVKDLWDIYNLDSRILVRIFNIWFLNRQIPECFKGNRTILIPKVKDPQELKKISSWRPLTIGSIWIRLYTKILAKRLSSAVKLCPRQKGFIAASGCEENISILEKLIKGAKKNKDEIAVVFIDLAKAFDSVGHGHILKGLKRFGISESFIDIVKDLYTDCYTEISVGEDKTEPILIKSGVKQGDPLSPILFNIAMAPLLYKLEDEGDGFIVQGRKITSLAFADDIAILSRSYKGMVKNLKILNQFCKNSSLKVNVKKTKGFHVFPSMGTYVINPKDKWGIGDELIDYIQPGESERYLGARIDPWVGVANNSPKEKLIDWCESLCKAPLKPAQKLIILKVYILTRVFYELLLIEPPLYMLNELDVLVRNTLKKILHLPQCTTDGLFYARTRDGGLAVTKFSTQIPNMLIRKWRRHIVSKDDWIDFSFLYAGENLVEKILIYSAKTANPKTWRDEEFLKWSNLRCQGIGIKYFKNDCISNSFLKYPCLARSSSLIAALQTRANVFPTREALARGRKMEEGLCRWCGKVKETIPHISGHCIKMKEARIKRHNRIVKALIDKVGNKGCKIWIEPYLHNKEGKLRKPDLIIEKEGVVAVVDVTVRWEDNADSVEAAHIEKEAYYSELEEEVLQLTGGKIIHFFGFVVGARGKWSERNDEIFKILGIDKFKSFKESVCRLAMYATTDMLALFSDKQ

SEQ ID NO: 18046 - protein, 1196 aa, Mesoclemmys tuberculata
MEKMKEELAGFMNARNLQKGDKIDVPVEQDNFSENQVFEFLPMVFTNNLYSDGEIDHLRSSFCDKYLNSFKDPYLIDFNTSVILHEELTDILREDVDLNLEEITRSQNSEYKEGVFYLEYPVDSFNCPICPQILANFGKWAKHINVVHKSTAIRVVCKKCGKQSHYHNISCHYPKCISREVDNSDRKYVCTVCGAGFHTRSGLSQHIRHRHPIVRNEQRKEASEVDKKNRCRIWTEEEILKLIQLEVKYMGKRNINKCIEIELRTKNNKQIAEKRRELAKKKLKRGNNVGILEGEGGIESVLENVLEEIPPKEKIKPLRDQDLIDKVILACGGRNGRQILENLDLIEKQLANVGTEASGWGMLEELCKVLMIPRVKENEVENCGEGKVNKKKGNNRNRQPSAPIRKYASKKAKYRFYQTLFEKDKKRLARIIMGEPDKAQCNIAVQEIELYYKEILEKVGHGSNRGWPMVEEKADNERLNSLITTDEIREALREIKTTSAPGPDKAKVSDLWDVFNIDTRILTRIFNIWFLNKQIPEGFKENRTILIPKVQDPEELKKISSWRPLTIGSVWVRLYTKILAKRLSSAVKICPRQKGFISAPGCEENISILEKLMKGAKRNGDEIAIVFVDLAKAFDSVGHGHILYALKRFGVSGNFIDIVRDLYTDCFTKINIGEDSTEGILIKSGVKQGDPLSPILFNIAMDPLLTKLEKDGCGFFVQGRKITSLAFADDVAILSSSYEGMVKNLKILNQFCKNTGLKVNVKKTKGFHILPKKDTYVINPKGKWGLGDDFIEYIQPGETERYLGARIDPWVGVANVSPKHKLSIWCENLCKAPLKPAQKVIILKTYILTRVFYDLLLIEPPFYLLNDLDVLVRRVLKNILHLPQCVADGVFYSRIRDGGLAMTKFSVQIPNMLIRKWRRHIVSTDDWIDLSFLYAGENLVDKVLLYSAKTANPRKWRDEEFDRWSALRCQGIGIKYFKNDSISNSFLKCPCLAKSSSLITAIQMRANVFPTRETLARGRNMDGAMCRWCGKAKETIPHISGQCVKTKDARIKRHNRIVTALVDKVGKCGCRIWVEPHFRNKDGYLRKPDLVIEKDGVVTVVDVTVRWEDNADSMESAHIEKAEYYAELEEEVRKITGGKTIHFLGFVVGARGKWSVGNDEIFKFLGIDRIKNFKESICRLAMYATADMLALFSDKQ

SEQ ID NO: 18047 - protein, 1260 aa, Emydura subglobosa
MEKTEILFHTGLALDRVKNAPATSFDAPASSVKLIRGIIHRAGPMLSPYAIDRVKDEIAGFMDDFNLRVGEKSVVREEQEDFSESQVLDFNLLPMAFTNVLYSDLKIIDSKSSFYDKYLDSFDDPYLIEFNNLNNNTNFNNLQRDSMENRRNILGDNFNTNFMNTASFKESSSFKEGIFYLEYPVDCFNCPICSQILASFGKWAKHINNVHKSTSIRVICKKCGKYSQFHNIACHYPKCRPREVDNSEKKYACTVCGSAFYTRSGRSQHIRHRHPAVRNEERKEARVVGKTSRSRVWTEEEIELLIQLEIKYAGTRNINKCIESELKTKTNKQISNKRRDLARNKVKKDEDSMVLWEEGGMGDILEDIPPREKIKPLKDNILIDRFLTGVRCNGARILEKLDFIEQQLNASATVAEGWGLFEELCKLLMNSPHEDVENLENNKENNIQNDNGKQGGKVGKPPDKYNRNRKYAGRKAKFRFYQTLFEKDKKRLARIIMGEPDKATCKIAVKEIETYYKEILGKEGHGNTRGWPKVKEVVDNEILNWPLSIDEIREALREIDNSSAPGPDGIKVKDLWDIYNLDSRILVRIFNIWFLNRQIPECFKGNRTILIPKVKDPQELKKISSWRPLTIGSIWIRLYTKILAKRLSSAVKLCPRQKGFIAASGCEENISILEKLIKGAKKNKDEIAVVFIDLAKAFDSVGHGHILKGLKRFGISESFIDIVKDLYTDCYTEISVGEDKTEPILIKSGVKQGDPLSPILFNIAMDPLLYKLEDEGDGFIVQGRKITSLAFADDIAILSRSYKGMVKNLKILNQFCKNSSLKVNVKKTKGFHVFPSMGTYVINPKDKWGLGDELIDYIQPGESERYLGARIDPWVGVANNSPKEKLIDWCESLCKAPLKPAQKLIILKVYILTRVFYELLLIEPPLYMLNELDVLVRNTLKKILHLPQCTTDGLFYARTRDGGLAVTKFSTQIPNMLIRKWRRHIVSKDDWIDFSFLYAGENLVEKILIYSAKTANPKTWRDEEFLKWSNLRCQGIGIKYFKNDCISNSFLKYPCLARSSSLIAALQTRANVFPTREALARGRKMEEGLCRWCGKVKETIPHISGQCIKMKEARIKRHNRIVKALIDKVGNKGCKIWIEPYLHNKEGKLRKPDLIIEKEGVVAVVDVTVRWEDNADSVEAAHIEKEAYYSELEEEVLQLTGGKIIHFFGFVVGARGKWSERNDEIFKILGIDKFKSFKESVCRLAMYATTDMLALFSDKQ

SEQ ID NO: 18048 - protein, 1260 aa, Emydura subglobosa
MEKTEILFHTGLALDRVKNAPATSFDAPASSVKLIRGIIHRAGPMLSPYAIDRVKDGIAGFMDDFNLRVGEKSVVREEQDDFSESQVLDFNLLPMAFTNVLYSDLKIIDSKSSFYDKYLDSFDDPYLIEFNNLNNNTNFNNLQRDSMENRRNILGDNFNTNFMNTASFKESSSFKEGIFYLEYPVDCFNCPICSQILASFGKWAKHINNVHKSTSIRVICKKCGKYSQFHNIACHYPKCRPREVDNSEKKYACTVCGSAFYTRSGRSQHIRHRHPAVRNEERKEARVVGKTSRSRVWTEEEIELLIQLEIKYAGTRNINKCIESELKTKTNKQISNKRRDLARNKVKKDEDSMVLWEEGGMGDILEDIPPREKIKPLKDNILIDRFLTGVRCNGARILEKLDFIEQQLNASATVAEGWGLFEELCKLLMNSPHEDVENLENNKENNIQNENGKQGGKVGKPPDKYNRNRKYAGRKAKFRFYQTLFEKDKKRLARIIMGEPDKATCKIAVKEIETYYKEILGKEGHGNTRGWPKVKEVVDNEILNWPLSIDEIREALREIDNSSAPGPDGIKVKDLWDIYNLDSRILVRIFNIWFLNRQIPECFKGNRTILIPKVKDPQELKKISSWRPLTIGSIWIRLYTKILAKRLSSAVKLCPRQKGFIAASGCEENISILEKLIKGAKKNKDEIAVVFIDLAKAFDSVGHGHILKGLKRFGISESFIDIVKDLYTDCYTEISVGEDKTEPILIKSGVKQGDPLSPILFNIAMDPLLYKLEDEGDGFIVQGRKITSLAFADDIAILSRSYKGMVKNLKILNQFCKNSSLKVNVKKTKGFHVFPSMGTYVINPKDKWGLGDELIDYIQPGESERYLGARIDPWVGVANNSPKEKLIDWCESLCKAPLKPAQKLIILKVYILTRVFYELLLIEPPLYMLNELDVLVRNTLKKILHLPQCTTDGLFYARTRDGGLAVTKFSTQIPNMLIRKWRRHIVSKDDWIDFSFLYAGENLVEKILIYSAKTANPKTWRDEEFLKWSNLRCQGIGIKYFKNDCISNSFLKYPCLARSSSLIAALQTRANVFPTREALARGRKMEEGLCRWCGKVKETIPHISGQCIKMKEARIKRHNRIVKALIDKVGNKGCKIWIEPYLHNKEGKLRKPDLIIEKEGVVAVVDVTVRWEDNADSVEAAHIEKEAYYSELEEEVLQLTGGKIIHFFGFVVGARGKWSERNDEIFKILGIDKFKSFKESVCRLAMYATTDMLALFSDKQ

SEQ ID NO: 18049 - protein, 908 aa, Emydura subglobosa
MVLWEEGGMGDILEDIPPREKIKPLKDKILIDRILTGVRCNGARILEKLDFIEQQLNASATVAEGWGLFEELCKLLMNSPHEDVENLENNKENNIQNDNGKQGRRVGKPPDKYNRNRKYAGRKAKFRFYQILFQKDKKRLARIIMGELDKATCKIAVKEIETYYKEILGREGHGNTRGWPKVKEVVDNEILNWPLSIDEIREALREIDNSSAPGPDGIKVKDLWDIYNLDSRILVRIFNIWFLNRQIPECFKGNRTILIPKVKDPQELKKISSWRPLTIGSIWIRLYTKILAKRLSSAVKLCPRQKGFIAASGCEENISILEKLIKGAKKNKDEIAIVFIDLDKAFDWVGYGHILKGLKRFGISESFIDIVKDLYTDCYTEISVGEDKTEPILIKSGVKQGDPLSPILFNIAMDSLLYKLEDEGDGFIVQGRKIISLAFADDIAILSRSYKGMVKNLKILNQFCKNSSLKVNVKKTKGFHIFPSMGTYVINPKDKWGLGDELIDHIQPRESERYQGARIDPWVGVTNNSPKEKLIDWCESLCKAPLKPVQKLIILKVYILTRVFYELLLIEPPLYMLNELDVLVRNTLKKILHLPQCTTDGLFYARTRDGGLAITKFSTQIPNMLIRKWRRHIVSKDDWIHFSFLYAGENLVEKILIYSAKTANPKTWRDEEFLKWSNLRCQGIGIKYFNNDCISNSFLKYPCLARSSPLIAALQTRANVFPTREALERGRKMEEGLCRWCGKVKETIPHISGQCIKMKEARIKRHNRIVKALIDKVGNKGCKIWIEPYLHNKEGKLRKPDLIIEKEGVVAVVDVTVRWEDNADSVEAAHIEKEAYYSELEEEVLQLTGGKIIHFFGFVVGARGKWSERNDEIFKILDIDKFKSFKESVCRFAMYATTDMLALFSDKQ

SEQ ID NO: 18050 - protein, 1261 aa, Emydura subglobosa
MEKTEILFHTGLALDRVKNAPATSFDAPASSVKLIRGIIHRAGPMLSPYAIDRVKDGIAGFMDDFNLRVGEKSVVREEQEDFSESQVLDFNLLPMAFTNVLYSDLKIIDSKSSFYDKYLDSFDDPYLIEFNNLNNNNTNFNNLQRDFMENRRNILGDNFNTNFMNTASFKESSSFKEGIFYLEYPVDCFNCPICSQILASFGKWAKHINNVHKSTSIRVICKKCGKYSQFHNIACHYPKCRPREVDNSEKKYACTVCGSAFYTRSGRSQHIRHRHPAVRNEERKEARVVGKTSRSRVWTEEEIELLIQLEIKYAGTRNINKCIESELKTKTNKQISNKRRDLARNKVKKDEDSMVLWEEGGMGDILEDIPPREKIKPLKDNILIDRFLTGVRCNGARILEKLDFIEQQLNASATVAEGWGLFEELCKLLMNSPHKDVENLENNKENNIQKDNGKQGGKVGKPPDKYNRNRKYAGRKAKFRFYQTLFEKDKKRLARIIMGEPDKATCKIAVKEIETYYKEILGKEGHGNTRGWPKVKEVVDNEILNWPLSIDEIREALREIDNSSAPGPDGIKVKDLWDIYNLDSRILVRIFNIWFLNRQIPECFKGNRTILIPKVKDPQELKKISSWRPLTIGSIWIRLYTKILAKRLSSAVKLCPRQKGFIAASGCEENISILEKLIKGAKKNKDEIAVVFIDLAKAFDSVGHGHILKGLKRFGISESFIDIVKDLYTDCYTEISVGEDKTEPILIKSGVKQGDPLSPILFNIAMDPLLYKLEDEGDGFIVQGRKITSLAFADDIAILSRSYKGMVKNLKILNQFCKNSSLKVNVKKTKGFHVFPSMGTYVINPKDKWGLGDELIDYIQPGESERYLGARIDPWVGVANNSPKEKLIDWCESLCKAPLKPAQKLIILKVYILTRVFYELLLIEPPLYMLNELDVLVRNTLKKILHLPQCTTDGLFYARTRDGGLAVTKFSTQIPNMLIRKWRRHIVSKDDWIDFSFLYAGENLVEKILIYSAKTANPKTWRDEEFLKWSNLRCQGIGIKYFKNDCISNSFLKYPCLARSSSLIAALQTRANVFPTREALARGRKMEEGLCRWCGKVKETIPHISGQCIKMKEARIKRHNRIVKALIDKVGNKGCKIWIEPYLHNKEGKLRKPDLIIEKEGVVAVVDVTVRWEDNADSVEAAHIEKEAYYSELEEEVLQLTGGKIIHFFGFVVGARGKWSERNDEIFKILGIDKFKSFKESVCRLAMYATTDMLALFSDKQ

SEQ ID NO: 18051 - protein, 1216 aa, Emydura subglobosa
MLSPYAIDRVKDGIAGFMDDFNLRVGEKSVVREEQEDFSESQVLDFNLLPMAFTNVLYSDLKIIDSKSSFYDKYLDSFDDPYLIEFNNLNNNTNFNNLQCDSMENRRNILGDNFNTNFMNTASFKESSSFKEGIFYLEYPVDCFNCPICSQILASFGKWAKHINNVHKSTSIRVICKKCGKYSQFHNIACHYPKCRPREVDNSEKKYACTVCGSAFYTRSGRSQHIRHRHPAVRNEERKEARVVGKTSRSRVWTEEEIELLIQLEIKYAGTRNINKCIESELKTKTNKQISNKRRDLARNKVKKDEDSMVLWEEGGMGDILEDIPPREKIKPLKDNILIDRFLTGVRCNGARILEKLDFIEQQLNASATVAEGWGLFEELCKLLMNSPHEDVENLENNKENNIQNDNGKQGGKVGKPPDKYNRNRKYAGRKAKFRFYQTLFEKDKKRLARIIMGEPDKATCKIAVKEIETYYKEILGKEGHGNTRGWPKVKEVVDNEILNWPLSIDEIREALREIDNSSAPGPDGIKVKDLWDIYNLDSRILVRIFNIWFLNRQIPECFKGNRTILIPKVKDPQELKKISSWRPLTIGSIWIRLYTKILAKRLLSAVKLCPRQKGFIAASGCEENISILEKLIKGAKKNKDEIAVVFIDLAKAFDSVGHGHILKGLKRFGISESFIDIVKDLYTDCYTEISVGEDKTEPILIKSGVKQGDPLSPILFNIAMDPLLYKLEDEGDGFIVQGRKITSLAFADDIAILSRSYKGMVKNLKILNQFCKNSSLKVNVKKTKGFHVFPSMGTYVINPKDKWGLGDELIDYIQPGESERYLGARIDPWVGVANNSPKEKLIDWCESLCKAPLKPAQKLIILKVYILTRVFYELLLIEPPLYMLNELDVLVRNTLKKILHLPQCTTDGLFYARTRDGGLAVTKFSTQIPNMLIRKWRRHIVSKDDWIDFSFLYAGENLVEKILIYSAKTANPKTWRDEEFLKWSNLRCQGIGIKYFKNDCISNSFLKYPCLARSSSLIAALQTRANVFPTREALARGRKMEEGLCRWCGKVKETIPHISGQCIKMKEARIKRHNRIVKALIDKVGNKGCKIWIEPYLHNKEGKLRKPDLIIEKEGVVAVVDVTVRWEDNADSVEAAHIEKEAYYSELEEEVLQLTGGKIIHFFGFVVGARGKWSERNDEIFKILGIDKFKSFKESVCRLAMYATTDMLALFSDKQ

SEQ ID NO: 18052 - protein, 1166 aa, Emydura subglobosa
MAFTNVLYSDLKIIDSKSSFYDKYLDSFDDPYLIEFNNLKNNTNFNNLQCDSMENRRNILGDNFNTNFMNTASFKESSSFKEGIFYLEYPVDCFNCPICSQILASFGKWAKHINNVHKSTSIRVICKKCGKYSQFHNIACHYPKCRPREVDNSEKKYACTVCGSAFYTRSGRSQHIRHRHPAVRNEERKEARVVGKTSRSRVWTEEEIELLIQLEIKYAGTRNINKCIESELKTKTNKQISNKRRDLARNKVKKDEDSMVLWEEGGMGDILEDIPPREKIKPLKENILIDRFLTGVRCNGARILEKLDFIEQQLNASATVAEGWGLFEELCKLLMNSPHEDVENLENNKENNIQNDNGKQGGKVGKPPDKYNRNRKYAGRKAKFRFYQTLFEKDKKRLARIIMGEPDKATCKIAVKEIETYYKEILGKEGHGNTRGWPKVKEVVDNEILNWPLSIDEIREALREIDNSSAPGPDGIKVKDLWDIYNLDSRILVRIFNIWFLNRQIPECFKGNRTILIPKVKDPQELKKISSWRPLTIGSIWIRLYTKILAKRLLSAVKLCPRQKGFIAASGCEENISILEKLIKGAKKNKDEIAVVFIDLAKAFDSVGHGHILKGLKRFGISESFIDIVKDLYTDCYTEISVGEDKTEPILIKSGVKQGDPLSPILFNIAMDPLLYKLEDEGDGFIVQGRKITSLAFADDIAILSRSYKGMVKNLKILNQFCKNSSLKVNVKKTKGFHVFPSMGTYVINPKDKWGLGDELIDYIQPGESERYLGARIDPWVGVANNSPKEKLIDWCESLCKAPLKPAQKLIILKVYILTRVFYELLLIEPPLYMLNELDVLVRNTLKKILHLPQCTTDGLFYARTRDGGLAVTKFSTQIPNMLIRKWRRHIVSKDDWIDFSFLYAGENLVEKILIYSAKTANPKTWRDEEFLKWSNLRCQGIGIKYFKNDCISNSFLKYPCLARSSSLIAALQTRANVFPTREALARGRKMEEGLCRWCGKVKETIPHISGQCIKMKEARIKRHNRIVKALIDKVGNKGCKIWIEPYLHNKEGKLRKPDLIIEKEGVVAVVDVTVRWEDNADSVEAAHIEKEAYYSELEEEVLQLTGGKIIHFFGFVVGARGKWSERNDEIFKILGIDKFKSFKESVCRLAMYATTDMLALFSDKQ

SEQ ID NO: 18053 - protein, 1259 aa, Emydura subglobosa
MEKTEILFHTGLALDRVKHAPATSFDAPASSVKLIRGIIHRAGPMLSPYAIDRVKDGIAGFMDDFNLRVGEKSVVREEQEDFSESQVLDFNLLPMAFTNVLYSDLKIIDSKSSFYDKYLDSFDDPYLIECNNLNNNNTNFNNLQHDSMENRRNILGDNFNTNFMNTASFKESSSFKEGIFYLEYPVDCFNCPICSQILASFGKWAKHINNVHKSTSIRVICKKCGKYSQFHNIACHYPKCRPKEVDNSEKKYACTVCGSAFYTRSGRSQHIRHRHPAVRNEERKEARVVGKTSRSRTEEEIELLIQLEIKYAGIRNINKCIESELKTKTNKQISDKRRDLAKNKVKKDEDSMVLWEEGGMGDILEDIPPREKIKPLKDKILIDRFLTGVRCNGVRILEKLDFIEQQLNASATVAEGWGLFEELCKLLMNSPHEDVENLENNKENNIQNDNGKQGRKVGKPPDKYNRNRKYAGRKAKFRFYQTLFEKDKKRLARIIMGEPDKATCKIAVKEIETYYKEILGREGHGNTRGWPKVKEVVDNEILNWPLSIDEIRDALREIDNSSAPGPDGIKVKDLWDIYNLDSRILVRIFNIWFLNRQIPECFKGNRTILIPKVKDPQELKKISSWRPLTIGSIWIRLYTKILAKRLSSAVKLCPRQKGFIAASGCEENISILEKLIKGAKKNKDEIAVVFIDLAKAFDSVGHGHILKGLKRFGISESFIDIVKDLYTDCYTEISVGEDKTEPILIKSGVKQGDPLSPILFNIVMDPLLYKLEDEGDGFIVQGRKITSLAFADDIAILSRSYKGMVKNLKILNQFCKNSSLKVNVKKTKGFHIFPSMGTYVINPKDKWGLGDELIDYIQLGESERYLGARIDQWVGVANNSPKEKLIDWCESLCKAPLKPAQKLIILKVYILTRIFYELLLIEPPLYMLNELEVLVRNTLKKILHLPQCTTDGLFYARTRDGGLAVTKFSTQIPNMLIRKWRRHIVSKDDWIDFSFLYAGENLVEKILIYSAKTANPKTWRDEEFLKWSNLRCQGIGIKYFKNDCISNSFLKYPYLARSSSLIVALQTRANVFPTREALARGRKMEEGLCRWCGKVKETIPHISGQCIKMKEARIKRHNRIVKALIDKVGNKGCKIWIEPYLHNKEGKLRKPDLIIEKEGVVAIVDVTVRWEDNADSVEAAHIEKEAYYSELEEEVLQLTGGKIIHFFGFVVGARGKWSERNDEIFKILGIDKFKSFKESVCRLAMYAMTDMLALFSDKQ

SEQ ID NO: 18054 - protein, 1261 aa, Emydura subglobosa
MEKTEILFHTGLALDRVKNAPATSFDAPASSVKLIRGIIHRAGPMLSPYAIDRVKDGIAGFMDDFNLRVGEKSVVREEQEDFSESQVLDFNLLPMAFTNVLYSDLKIIDSKSSFYDKYLDSFDDPYLIEFNNLNNNNTNFNNLQRDSMENRRNILGDNFNTNFMNTASFKESSSFKEGIFYLEYPVDCFNCPICSQILASFGKWAKHINNVHKSTSIRVICKKCGKYSQFHNIACHYPKCRPREVVNSEKKYACTVCGSAFYTRSGRSQHIRHRHPAVRNEERKEARVVGKTSRSRVWTEEEIELLIQLEIKYAGTRNINKCIESELKTKTNKQISNKRRDLARNKVKKDEDSMVLWEEGGMGDILEDIPPREKIKPLKDNILIDRFLTGVRCNGARILEKMDFIEQQLNASATVAEGWGLFEELCKLLMNSPHEDVENLENNKENNIQNDNGKQGGKVGKPPDKYNRNRKYAGRKAKFRFYQTLFEKDKKRLARIIMGEPDKATCKIAVKEIETYYKEILGKEGHGNTRGWPKVKEVVDNEILNWPLSIDEIREALREIDNSSAPGPDGIKVKDLWDIYNLDSRILVRIFNIWFLNRQIPECFKGNRTILIPKVKDPQELKKISSWRPLTIGSIWIRLYTKILAKRLSSAVKLCPRQKGFIAASGCEENISILEKLIKGAKKNKDEIAVVFIDLAKAFDSVGHGHILKGLKRFGISESFIDIVKDLYTDCYTEISVGEDKTEPILIKSGVKQGDPLSPILFNIAMDPLLYKLEDEGDGFIVQGRKITSLAFADDIAILSRSYKGMVKNLKILNQFCKNSSLKVNVKKTKGFHVFPSMGTYVINPKDKWGLGDELIDYIQPGESERYLGARIDPWVGVANNSPKEKLIDWCESLCKAPLKPAQKLIILKVYILTRVFYELLLIEPPLYMLNELDVLVRNTLKKILHLPQCTTDGLFYARTRDGGLAVTKFSTQIPNMLIRKWRRHIVSKDDWIDFSFLYAGENLVEKILIYSAKTANPKTWRDEEFLKWSNLRCQGIGIKYFKNDCISNSFLKYPCLARSSSLIAALQMRANVFPTREALARGRKMEEGLCRWCGKVKETIPHISGQCIKMKEARIKRHNRIVKALIDKVGNKGCKIWIEPHLHNKEGKLRKPDLIIEKEGVVAVVDVTVRWEDNADSVEAAHIEKEAYYSELEEEVLQLTGGKIIHFFGFVVGARGKWSERNDEIFKILGIDKFKSFKESVCRLAMYATTDMLALFSDKQ

SEQ ID NO: 18055 - protein, 908 aa, Emydura subglobosa
MFLWEEGGMGDILEDIPPREKIKLLKDTILIDRFLTGVRCNEAHILEKLDFIEQQLNASATVAEGCGLFEELCKLLMNSPHEDVENLENNKENNIQNDNGKQGRKVGKPPDKYNRNRKYAGRKAKFRFYQTLFEKDKKRLARIIMGEPDKATCKIAVKEIETYYKEILGREGHGNTRGWPKVKEVVDNEILNWPLSIDEIREALKEIDNSSAPGPDGIKVKDLWDIYNLDSRILVRIFNIWFLNRQISECFKGNRTILIPKIKDPQELKKISSWRPLTIGSIWIRLYTKILAKRLSSAVKLCPRQKGFIAASGCEENISILEKLIKGAKKNKDEIAVVFIDLAKAFDSVGHGHILKGLKRFGISESFIDIVKDLYTDCYTEISVGEDKTEPILIKSGVKQGDPLSPILFNIAMDPLLYKLEDEGDGFIVQGRKITSLAFADDITILSRSYKGMVKNLKILNQFCKNSSLKVNVKKTKGFHIFPRMGTYVINPKDNWGLGDELIDYIQPGESERYLSARIDPWVGVANNSPKEKLIYWCESLCKALLKPVQKLIILKVYILTRVFYELLLIEPPLYMLNELDVLVRNTLKKILHLPQCTTDGLFYARTRDGGLAVTKFSTQIPNMLIRKWRRHIVSKDDWIDFSFLYAGENLVEKILIYSAKTANPKTWRDEEFLKWSNLRCQGIGIKYFKNDGISNSFLKYPCLAKSSSLIAALQTRANVFPTGEALARGRKMEEGLCRWCGKVKETIPHISGQCIKMKEARIKRHNRIVKALIDKVGNKGCKIWIEPYLHNKEGKLRKPDLIIEKEGVVAIVDVTIRWEDNADSVEAAHIEKEAYYSELEEEVLQLTGGKIIHFFGFVVGARGKWSERNDEIFKILGIDKFKSFKESVCRLAMYATMDMLALFSDKQ

SEQ ID NO: 18056 - protein, 1045 aa, Emydura subglobosa
MTQACKRYQCPVLRSSIAGHYPKCRPKEVDNSEKKYACTVCGSAFYTHSRRSQHIRHRHPAVRNEERKEARVVGKTSRSRVWTEEEIELLIQLEIKYAGIRNINKCIESELKTKTNKQISDKRRDLAKNKVKKDEDSMVLWEEGGMGDILEDIPPREKIKPLKDNILIDRFLTGVRCNGARILEKLDFIEQQLNASATVAEGWGLFEELCKLLMNSPHEDAENLENNKENNIQNDNGKHGRKVGKPPDKYNRNRKYAGRKAKFRFYQTLFEKDKKRLARIIMGELDKATCKIVVKEIETYYKEILGREGHGNTRGWPKVKDVVDNEILNWPLSIDEIREALREIDNSSAPGPDGIKVKDLWDIYNLDSRILVRIFNIWFLNRQIPECFKGNRTILIPKVKDPQELKKISSWRPLTIGSIWIRLYTKILAKRLSSAIKLCPRQKGFIAASGCEENISILEKLIKGAKKNKDEIAVVFIDLTKAFDSVGHGHILKGLKRFGISESFIDIVKDLYTDCYTEISVGEDKTEPILIKSGVKQDDPLSPILFNIAMDPLLYKLEDEGDGFIVQGRKITSLAFANDIAILSRSYKGMVKNLKILNQFCKNSSLKVNVKKTKGFHIFPSMGTYVINPKDKWGLGDELIDYIQPGESERYLSARIDPWVGVANNSPKEKLIDWCEILCKAPLKPAQKLIILKVYILMRVFYELLLIEPPLYMLNELDVLVRNTLKKILHLPQCTTDGLFYARTRDGGLAVTKFSTQLPNMLIRKWRRHIVSKDDWIDFSFLYAGENLVEKILIYSAKTANPKMWRDEEFLKWSNLRCQGIGIKYFKNDGISNSFLKHPCLAKSSSLIAALQMRANVFPTREALARGRKMEEGLCRWCGKVKETIPHISGQCIKMKEARIKRHNRIVKALIDKVGNKGCKIWIEPYLHNKEGKLRKPDLIIEREGVVAVVDVTIRWEDNADSVEAAHIEKEAYYSELEEEVLQLTGGKIIHFFGFVVGARGKWSERNDEIFKILGIDKFKSFKESVCRLAMYATTDMLALFSDKQ

SEQ ID NO: 18057 - protein, 1260 aa, Emydura subglobosa
MEKTEILFHTGLALDRVKNAPATSFDAPASSVKLIRGIIHRAGPMLSPYAIDRVKDGIAGFMDDFNLRVGEKSVVREEQEDFSESQVLDFNLLPMAFTNVLYSDLKIIDSKSSFYDKYLNSFDDPYLIEFNNLNNNTNFNNLQRDSMENRRNILGDNFNTNFMNTASFKESSSFKEGIFYLEYPVDCFNCPICSQILASFGKWAKHINNVHKSTSIRVICKKCGKYSQFHNIACHYPKCRPREVDNSEKKYACTVCGSAFYTRSGRSQHIRHRHPAVRNEERKEARVVGKTSRSRVWTEEEIELLIQLEIKYAGTRNINKCIESELKTKTNKQISNKRRDLARNKVKKDEDSMVLWEEGGMGDILEDIPPREKIKPLKDNILIDRFLTGVRCNGARILEKLDFIEQQLNASATVAEGWGLFEELCKLLMNSPHEDVENLENNKENNIQNDNGKQGGKVGKPPDKYNRNRKYAGRKAKFRFYQTLFEKDKKRLARIIMGEPDKATCKIAVKEIETYYKEILGKEGHGNTRGWPKVKEVVDNEILNWPLSIDEIREALREIDNSSAPGPDGIKVKDLWDIYNLDSRILVRIFNIWFLNRQIPECFKGNRTILIPKVKDPQELKKISSWRPLTIGSIWIRLYTKILAKRLSSAVKLCPRQKGFIAASGCEENISILEKLIKGAKKNKDEIAVVFIDLAKAFDSVGHGHILKGLKRFGISESFIDIVKDLYTDCYTEISVGEDKTEPILIKSGVKQGDPLSPILFNIAMDPLLYKLEDEGDGFIVQGRKITSLAFADDIAILSRSYKGMVKNLKILNQFCKNSSLKVNVKKTKGFHVFPSMGTYVINPKDKWGLGDELIDYIQPGESERYLGARIDPWVGVANNSPKEKLIDWCESLCKAPLKPAQKLIILKVYILTRVFYELLLIEPPLYMLNELDVLVRNTLKKILHLPQCTTDGLFYARTRDGGLAVTKFSTQIPNMLIRKWRRHIVSKDDWIDFSFLYAGENLVEKILIYSAKTANPKTWRDEEFLKWSNLRCQGIGIKYFKNDCISNSFLKYPCLARSSSLIAALQMRANVFPTREALARGRKMEEGLCRWCGKVKETIPHISGQCIKMKEARIKRHNRIVKALIDKVGNKGCKIWIEPYLHNKEGKLRKPDLIIEKEGVVAVVDVTVRWEDNADSVEAAHIEKEAYYSELEEEVLQLTGGKIIHFFGFVVGARGKWSERNDEIFKILGIDKFKSFKESVCRLAMYATTDMLALFSDKQ

SEQ ID NO: 18058 - protein, 1260 aa, Emydura subglobosa
MEKTEILFHTGLALDRVKNAPATSFDAPASSVKLIRGIIHRAGPMLSPYAIDRVKDGIAGFMDDFNLRVGEKSVVREEQEDFSESQVLDFNLLPMAFTNVLYSDLKIIDSKSSFYDKYLDSFDDPYLIEFNNLNNNTNFNNLQCDSMENRRNILGDNFNTNFMNTASFKESSSFKEGIFYLEYPVDCFNCPICSQILASFGKWAKHINNVHKSTSIRVICKKCGKYSQFHNIACHYPKCRPREVDNSEKKYACTVCGSAFYTRSGRSQHIRHRHPAVRNEERKEARVVGKTSRSRVWTEEEIELLIQLEIKYAGTRNINKCIESELKTKTNKQISNKRRDLARNKVKKDEDSMVLWEEGGMGDILEDIPPREKIKPLKDNILIDRFLTGVRCNGARILEKLDFIEQQLNASATVAEGWGLFEELCKLLMNSPHEDVENLENNKENNIQNDNGKQGGKVGKPPDKYNRNRKYAGRKAKFRFYQTLFEKDKKRLARIIMGEPDKATCKIAVKEIETYYKEILGKEGHGNTRGWPKVKEVVDNEILNWPLSIDEIREALREIDNSSAPGPDGIKVKDLWDIYNLDSRILVRIFNIWFLNRQIPECFKGNRTILIPKVKDPQELKKISSWRPLTIGSIWIRLYTKILAKRLLSAVKLCPRQKGFIAASGCEENISILEKLIKGAKKNKDEIAVVFIDLAKAFDSVGHGHILKGLKRFGISESFIDIVKDLYTDCYTEISVGEDKTEPILIKSGVKQGDPLSPILFNIAMDPLLYKLEDEGDGFIVQGRKITSLAFADDIAILRRSYKGMVKNLKILNQFCKNSSLKVNVKKTKGFHVFPSMGTYVINPKDKWGLGDELIDYIQPGESERYLGARIDPWVGVANNSPKEKLIDWCESLCKAPLKPAQKLIILKVYILTRVFYELLLIEPPLYMLNELDVLVRNTLKKILHLPQCTTDGLFYARTRDGGLAVTKFSTQIPNMLIRKWRRHIVSKDDWIDFSFLYAGENLVEKILIYSAKTANPKTWRDEEFLKWSNLRCQGIGIKYFKNDCISNSFLKYPCLARSSSLIAALQTRANVFPTREALARGRKMEEGLCRWCGKVKETIPHISGQCIKMKEARIKRHNRIVKALIDKVGNKGCKIWIEPYLHNKEGKLRKPDLIIEKEGVVAVVDVTVRWEDNADSVEAAHIEKEAYYSELEEEVLQLTGGKIIHFFGFVVGARGKWSERNDEIFKILGIDKFKSFKESVCRLAMYATTDMLALFSDKQ

SEQ ID NO: 18059 - protein, 1261 aa, Emydura subglobosa
MEKTEILFHTGLALDRVKNAPATSFDAPASSVKLIRGIIHRAGPMLSPYAIDRVKDGIAGFMDDFNLRVGEKSVVREEQEDFSESQVLDFNLLPMAFTNVLYSDLKIIDSKSSFYDKYLDSFDDPYLIEFNNLNNNNTNFNNLQRDSMENRRNILGDNFNTNFMNTASFKESSSFKEGIFYLEYPVDCFNCPICSQILASFSKWAKHINNVHKSTSIRVICKKCGKYSQFHNIACHYPKCRPREVDNSEKKYACTVCGSAFYTRSGRSQHIRHRHPAVRNEERKEARVVGKTSRSRVWTEEEIELLIQLEIKYAGTRNINKCIESELKTKTNKQISNKRRDLARNKVKKDEDSMVLWEEGGMGDILEDIPPREKIKPLKDNILIDRFLTGVRCNGARILEKLDFIEQQLNASATVAEGWGLFEELCKLLMNSPHEDVENLENNKENNIQNDNGKQGGKVGKPPDKYNRNRKYAGRKAKFRFYQTLFEKDKKRLARIIMGEPDKATCKIAVKEIETYYKEILGKEGHGNTRGWPKVKEVVDNEILNWPLSIDEIREALREIDNSSAPGPDGIKVKDLWDIYNLDSRILVRIFNIWFLNRQIPECFKGNRTILIPKVKDPQELKKISSWRPLTISSIWIRLYTKILAKRLSSAVKLCPRQKGFIAASGCEENISILEKLIKGAKKNKDEIAVVFIDLAKAFDSVGHGHILKGLKRFGISESFIDIVKDLYTDCYTEISVGEDKTEPILIKSGVKQGDPLSPILFNIAMDPLLYKLEDEGDGFIVQGRKITSLAFADDIAILSRSYKGMVKNLKILNQFCKNSSLKVNVKKTKGFHVFPSMGTYVINPKDKWGLGDELIDYIQPGESERYLGARIDPWVGVANNSPKEKLIDWCESLCKAPLKPAQKLIILKVYILTRVFYELLLIEPPLYMLNELDVLVRNTLKKILHLPQCTTDGLFYARTRDGGLAVTKFSTQIPNMLIRKWRRHIVSKDDWIDFSFLYAGENLVEKILIYSAKTANPKTWRDEEFLKWSNLRCQGIGIKYFKNDCISNSFLKYPCLARSSSLIAALQTRANVFPTREALARGRKMEEGLCRWCGKVKETIPHISGQCIKMKEARIKRHNRIVKALIDKVGNKGCKIWIEPYLHNKEGKLRKPDLIIEKEGVVAVVDVTVRWEDNADSVEAAHIEKEAYYSELEEEVLQLTGGKIIHFFGFVVGARGKWSERNDEIFKILGIDKFKSFKESVCRLAMYATMDMLALFSDKQ

SEQ ID NO: 18060 - protein, 1260 aa, Emydura subglobosa
MEKTEILFHTGLALDRVKNAPATSFDAPASSVKLIRGIIHRAGPMLSPYAIDRVKDGIAGFMDDFNLRGGEKSVVREEQEDFSESQVLDFNLLPMAFTNVLYSDLKIIDSKSSFYDKYLDSFDDPYLIEFNNLNNNTNFNNLQRDSMENRRNILGDNFNTNFMNTASFKESSSFKEGIFYLEYPVDCFNCPICSQILASFGKWAKHINNVHKSTSIRVICKKCGKYSQFHNIACHYPKCRPREVDNSEKKYACTVCGSAFYTRSGRSQHIRHRHPAVRNEERKEARVVGKTSRSRVWTEEEIELLIQLEIKYAGTRNINKCIESELKTKTNKQISNKRRDLARNKVKKDEDSMVLWEEGGMGDILEDIPPREKIKPLKDNILIDRFLTGVRCNGARILEKLDFIEQQLNASATVAEGWGLFEELCKLLMNSPHEDVENLENNKENNIQNDNGKQGGKVGKPPDKYNRNRKYAGRKAKFRFYQTLFEKDKKRLARIIMGEPDKATCKIAVKEIETYYKEILGKEGHGNTRGWPKVKEVVDNEILNWPLSIDEIREALREIDNSSAPGPDGIKVKDLWDIYNLDSRILVRIFNIWFLNRQIPECFKGNRTILIPKVKDPQELKKISSWRPLTIGSIWIRLYTKILAKRLSSAVKLCPRQKGFIAASGCEENISILEKLIKGAKKNKDEIAVVFIDLAKAFDSVGHGHILKGLKRFGISESFIDIVKDLYTDCYTEISVGEDKTEPILIKSGVKQGDPLSPILFNIAMDPLLYKLEDEGDGFIVQGRKITSLAFADDIAILSRSYKGMVKNLKILNQFCKNSSLKVNVKKTKGFHVFPSMGTYVINPKDKWGLGDELIDYIQPGESERYLGARIDPWVGVANNSPKEKLIDWCESLCKAPLKPAQKLIILKVYILTRVFYELLLIEPPLYMLNELDVLVRNTLKKILHLPQCTTDGLFYARTRDGGLAVTKFSTQIPNMLIRKWRRHIVSKDDWIDFSFLYAGENLVEKILIYSAKTANPKTWRDEEFLKWSNLRCQGIGIKYFKNDCISNSFLKYPCLARSSSLIAALQTRANVFPTREALARGRKMEEGLCRWCGKVKETIPHISGQCIKMKEARIKRHNRIVKALIDKVGNKGCKIWIEPYLHNKEGKLRKPDLIIEKEGVVAVVDVTVRWEDNADSVEAAHIEKEAYYSELEEEVLQLTGGKIIHFFGFVVGARGKWSERNDEIFKILGIDKFKSFKESVCRLAMYATTDMLALFSDKQ

SEQ ID NO: 18061 - protein, 1260 aa, Emydura subglobosa
MEKTEISFHTGLALDQVKNAPATSFDTPASSVKLIRGIIHRAGPMLSPYAIDRVKDGIAGFMDDFNLRVGEKSVVREEQEDFSESQVLDFNLLPKAFTNVLYSDLKIIDSKSSFYDKYLDSFDDPYLIEFNNLNNNNTNFNHLQHDSMENRRNILGDNFNTNFINTASFKESSSFKEGIFYLEYPVDCFNCPIYSQILASFSKWAKHINNVHKSTSIRVICKKCGKYSQFHNIACHYPKCRPKEVDNSKKKYACTVCESAFYTRSGRSQHIRHRHPVVRNEERKEASVVGKTSRSRVWTEEEIELLIQLEIKYAGIRNINKCIESELKTKTNKQISDKRRDLAKNKVKKDEDSMVLWEEGGMGDILEDIPPGEKIKPLKDKILIDRFLTGVRCNGARILEKLDFIEQQLNASATVAEGWGLFEELCKLLMNSPHEDVENLENNKENNIQNDNGKQGRKVGKPPDKYNRNRKYAGRKAKFRFYQTLFEKDKKRLARIIMEEPDKATCKIAVKEIETYYKEILGREGHGNTRGWPKVKVVDNEILNWPLSIDEIREALREIDNSSAPGPDGIKVKHLWDIYNLDSRILVRIFNIWFLNRQIPECFKGNRTILIPKVKDPQELKKISSWRPLTIGLIWTRLYTKILAKRLLSAVKLCPRQKGFIAASGCEENISILEKLIKGAKKNKDEIAVVFIDLAKAFDSVGHGHILKGLKRFGISESFIDIVKDLYTDCYTEISVGEDKTEPILIKSGVKQGDPLSPILFNIAMDPLLYKLEDEGDGFIVQGRKITSLAFADDIAILSRSYKGMVKNLKILNQFCKNSSLKVNVKKTKGFHIFPSMGTYVINPKDKWGLGDKLIDYIQPGESERYLGARIDPWVGVANNSPKEKLIDWCESLCKAPLKPAQKLIILKVYILTRVFYELLLIEPPLYMLNELDVLVRNTLKKILHLPQCTTDGLFYARTRDGGLAVTKFSTQIPNMLIHKWRRHIVSKDDWIDFSFLYAGENLVEKILIYSAKTANPKTWRDEEFLKWSNLRCQGIDIKYFKNDCISNSFLKYPCLARSSSLIAALQTRANVFPTREALARGRKMEEGLCRWCGKVKETIPHISGQCIKMKEARIKRHNRIVKALIDKVGNKGCKIWIELYLHNKEGKLRKPDLIIEKEGVVAVVDVTVRWEDNADSVEAAHIEKEAYYSELEEEVLQLTGGKIIHFFGFVVGARGKWSERNDEIFKILGIDKFKSFKESVCRLAMYTTTDMLALFSDKQ

SEQ ID NO: 18062 - protein, 1260 aa, Emydura subglobosa
MEKTEILFHTGLALDRVKNAPATSFDAPASSVKLIRGIIHRAGPMLSPYAIDRVKDGIAGFMDDFNLRVGEKSVVREEQEDFSESQVLDFNLLPMAFTNVLYSDLKIIDSKSSFYDKYLDSFDDPYLIEFNNLNNNTNFNNLQRDSMENRRNILGDNFNTNFMNTASFKESSSFKEGIFYLEYPVDCFNCPICSQILASFGKWAKHINNVHKSTSIRVICKKCGKYSQFHNIACHYPKCRPREVDNSEKKYACTVCGSAFYTRLGRSQHIRHRHPAVRNEERKEARVVGKTSRSRVWTEEEIELLIQLEIKYAGTRNINKCIESELKTKTNKQISNKRRDLARNKVKKDEDSMVLWEEGGMGDILEDIPPREKIKPLKDNILIDRFLTGVRCNGARILEKLDFIEQQLNASATVAEGWGLFEELCKLLMNSPHEDVENLENNKENNIQNDNGKQGGKVGKPPDKYNRNRKYAGRKAKFRFYQTLFEKDKKRLARIIMGEPDKATCKIAVKEIETYYKEILGKEGHGNTRGWPKVKEVVDNEILNWPLSIDEIREALREIDNSSAPGPDGIKVKDLWDIYNLDSRILVRIFNIWFLNRQIPECFKGNRTILIPKVKDPQELKKISSWRPLTIGSIWIRLYTKILAKRLSSAVKLCPRQKGFIAASGCEENISILEKLIKGAKKNKDEIAVVFIDLAKAFDSVGHGHILKGLKRFGISESFIDIVKDLYTDCYTEISVGEDKTEPILIKSGVKQGDPLSPILFNIAMDPLLYKLEDEGDGFIVQGRKITSLAFADDIAILSRSYKGMVKNLKILNQFCKNSSLKVNVKKTKGFHVFPSMGTYVINPKDKWGLGDELIDYIQPGESERYLGARIDPWVGVANNSPKEKLIDWCESLCKAPLKPAQKLIILKVYILTRVFYELLLIEPPLYMLNELDVLVRNTLKKILHLPQCTTDGLFYARTRDGGLAVTKFSTQIPNMLIRKWRRHIVSKDDWIDFSFLYAGENLVEKILIYSAKTANPKTWRDEEFLKWSNLRCQGIGIKYFKNDCISNSFLKYPCLARSSSLIAALQTRANVFPTREALARGRKMEEGLCRWCGKVKETIPHISGQCIKMKEARIKRHNRIVKALIDKVGNKGCKIWIEPYLHNKEGKLRKPDLIIEKEGVVAVVDVTVRWEDNADSVEAAHIEKEAYYSELEEEVLQLTGGKIIHFFGFVVGARGKWSERNDEIFKILGIDKFKSFKESVCRLAMYATMDMLALFSDKQ

SEQ ID NO: 18063 - protein, 1261 aa, Emydura subglobosa
MEKTEILFHTGLALDRVKNAPATSFDAPASSVKLIRGIIHRAGPMLSPYAIDRVKDGIAGFMDDFNLRVGEKSVVREEQEDFSESQVLDFNLLPMAFTNVLYSDLKIIDSKSSFYDKYLDSFDDPYLIEFNNLNNNNTNFNNLQCDSMENRRNILGDNFNTNFMNTASFKESSSFKEGIFYLEYPVDCFNCPICSQILASFGKWAKHINNVHKSTSIRVICKKCGKYSQFHNIACHYPKCRPREVDNSEKKYACTVCGSAFYTRSGRSQHIRHRHPAVRNEERKEARVVGKTSRSRVWTEEEIELLIQLEIKYAGTRNINKCIESELKTKTNKQISNKRRDLARNKVKKDEDSMVLWEEGGMGDILEDIPPREKIKPLKDNILIDRFLTGVRCNGARILEKLDFIEQQLNASATVAEGWGLFEELCKLLMNSPHEDVENLENNKENNIQNDNGKQGGKVGKPPDKYNRNRKYAGRKAKFRFYQTLFEKDKKRLARIIMGEPDKATCKIAVKEIETYYKEILGKEGHGNTRGWPKVKEVVDNEILNWPLSIDEIREALREIDNSSAPGPDGIKVKDLWDIYNLDSRILVRIFNIWFLNRQIPECFKGNRTILIPKVKDPQELKKISSWRPLTIGSIWIRLYTKILAKRLSSAVKLCPRQKGFIAASGCEENISILEKLIKGAKKNKDEIAVVFIDLAKAFDSVGHGHILKGLKRFGISESFIDIVKDLYTDCYTEISVGEDKTEPILIKSGVKQGDPLSPILFNIAMDPLLYKLEDEGDGFIVQGRKITSLAFADDIAILSRSYKGMVKNLKILNQFCKNSSLKVNVKKTKGFHVFPSMGTYVINPKDKWGLGDELIDYIQPGESERYLGARIDPWVGVANNSPKEKLIDWCESLCKAPLKPAQKLIILKVYILTRVFYELLLIEPPLYMLNELDVLVRNTLKKILHLPQCTTDGLFYARTRDGGLAVTKFSTQIPNMLIRKWRRHIVSKDDWIDFSFLYAGENLVEKILIYSAKTANPKTWRDEEFSKWSNLRCQGIGIKYFKNDCISNSFLKYPCLARSSSLIAALQTRANVFPTREALARGRKMEEGLCRWCGKVKETIPHISGQCIKMKEARIKRHNRIVKALIDKVGNKGCKIWIEPYLHNKEGKLRKPDLIIEKEGVVAVVDVTVRWEDNADSVEAAHIEKEAYYSELEEEVLQLTGGKIIHFFGFVVGARGKWSERNDEIFKILGIDKFKSFKESVCRLAMYATTDMLALFSDKQ

SEQ ID NO: 18064 - protein, 1261 aa, Emydura subglobosa
MEKTEILFHTGLALDRVKNAPATSFDAPASSVKLIRGIIHRAGPMLSPYAIDRVKDGIAGFMDDFNLRVGEKSVVREEQEDFSESQVLDFNLLPMAFTNVLYSDLKIIDSKSSFYDKYLDSFDDPYLIEFNNLNNNNTNFNNLQRDFMENRRNILGDNFNTNFMNTASFKESSSFKEGIFYLEYPVDCFNCPICSQILASFGKWAKHINNVHKSTSIRVICKKCGKYSQFHNIACHYPKCRPREVDNSEKKYACTVCGSAFYTRSGRSQHIRHRHPAVRNEERKEARVVGKTSRSRVWTEEEIELLIQLEIKYAGTRNINKCIESELKTKTNKQISNKRRDLARNKVKKDEDSMVLWEEGGMGDILEDIPPREKIKPLKDNILIDRFLTGVRCNGARILEKLDFIEQQLNASATVAEGWGLFEELCKLLMNSPHKDVENLENNKENNIQKDNGKQGGKVGKPPDKYNRNRKYAGRKAKFRFYQTLFEKDKKRLARIIMGEPDKATCKIAVKEIETYYKEILGKEGHGNTRGWPKVKEVVDNEILNWPLSIDEIREALREIDNSSAPGPDGIKVKDLWDIYNLDSRILVRIFNIWFLNRQIPECFKGNRTILIPKVKDPQELKKISSWRPLTIGSIWIRLYTKILAKRLSSAVKLCPRQKGFIAASGCEENISILEKLIKGAKKNKDEIAVVFIDLAKAFDSVGHGHILKGLKRFGISESFIDIVKDLYTDCYTEISVGEDKTEPILIKSGVKQGAPLSPILFNIAMDPLLYKLEDEGDGFIVQGRKITSLAFADDIAILSRSYKGMVKNLKILNQFCKNSSLKVNVKKTKGFHVFPSMGTYVINPKDKWGLGDELIDYIQPGESERYLGARIDPWVGVANNSPKEKLIDWCESLCKAPLKPAQKLIILKVYILTRVFYELILIEPPLYMLNELDVLVRNTLKKILHLPQCTTDGLFYARTRDGGLAVTKFSTQIPNMLIRKWRRHIVSKDDWIDFSFLYAGENLVEKILIYSAKTANPKTWRDEEFLKWSNLRCQGIGIKYFKNDCISNSFLKYPCLARSSSLIAALQTRANVFPTREALARGRKMEEGLCRWCGKVKETIPHISGQCIKMKEARIKRHNRIVKALIDKVGNKGCKIWIEPYLHNKEGKLRKPDLIIEKEGVVAVVDVTVRWEDNADSVEAAHIEKEAYYSELEEEVLQLTGGKIIHFFGFVVGARGKWSERNDEIFKILGIDKFKSFKESVCRLAMYATTDMLALFSDKQ

SEQ ID NO: 18065 - protein, 1260 aa, Emydura subglobosa
MEKTEILFHTGLALDRVKNAPATSFDAPASSVKLIRGIIHRAGPMLSPYAIDRVKDGIAGFMDDFNLRVGEKSVVREEQEDFSESQVLDFNLLPMAFTNVLYSDLKIIDSKSSFYDKYLDSFDDPYLIEFNNLNNNTNFNNLQRDSMENRRNILGDNFNTNFMNTASFKESSSFKEGIFYLEYPVDCFNCPICSQILASFGKWAKHINNVHKSTSIRVICKKCGKYSQFHNIACHYPKCRPREVDNSEKKYACTVCGSAFYTRSGRSQHIRHRHPAVRNEERKEARVVGKTSRSRVWTEEEIELLIQLEIKYAGTRNINKCIESELKTKTNKQISNKRRDLARNKVKKDEDSMVLWEEGGMGDILEDIPPREKIKPLKDNILIDRFLTGVRCNGARILEKLDFIEQQLNASATVAEGWGLFEELCKLLMNSPHEDVENLENNKENNIQNDNGKQGGKVGKPPDKYNRNRKYAGRKAKFRFYQTLFEKDKKRLARIIMGEPDKATCKIAVKEIETYYKEILGKEGHGNTRGWPKVKEVVDNEILNWPLSIDEIREALREIDNSSAPGPDGIKVKDLWDIYNLDSRILVRIFNIWFLNRQIPECFKGNRTILIPKVKDPQELKKISSWRPLTIGSIWIRLYTKILAKRLSSAVKLCPRQKGFIAASGCEENISILEKLIKGAKKNKDEIAVVFIDLAKAFDSVGHGHILKGLKRFGISESFIDIVKDLYTDCYTEISVGEDKTEPILIKSGVKQGDPLSPILFNIAMDPLLYKLEDEGDGFIVQGRKITSLAFADDIAILSRSYKGMVKNLKILNQFCKNSSLKVNVKKTKGFHVFPSMGTYVINPKDKWGLGDELIDYIQPGESERYLGARIDPWVGVANNSPKEKLIDWCESLCKAPLKPAQKLIILKVYILTRVFYELLLIEPPLYMLNELDVLVRNTLKKILHLPQYTTDGLFYARTRDGGLAVTKFSTQIPNMLIRKWRRHIVSKDDWIDFSFLYAGENLVEKILIYSAKTANPKTWRDEEFLKWSNLRCQGIGIKYFKNDCISNSFLKYPCLARSSSLIAALQTRANVFPTREALARGRKMEEGLCRWCGKVKETIPHISGQCIKMKEARIKRHNRIVKALIDKVGNKGCKIWIEPYLHNKEGKLRKPDLIIEKEGVVAVVDVTVRWEDNADSVEAAHIEKEAYYSELEEEVLQLTGGKIIHFFGFVVGARGKWSERNDEIFKILGIDKFKSFKESVCRLAMYATTDMLALFSDKQ

SEQ ID NO: 18066 - protein, 1261 aa, Emydura subglobosa
MEKTEILFHTGLALDRVKNAPATSFDAPASSVKLIRGIIHRAGPMLSPYAIDRVKDGIAGFMDDFNLRVGEKSVVREEQEDFSESQVLDFNLLPMAFTNVLYSDLKIIDSKSSFYDKYLDSFDDPYLIEFNNLNNNNTNFNNLQRDFMENRRNILGDNFNTNFMNTASFKESSSFKEGIFYLEYPVDCFNCPICSQILASFGKWAKHINNVHKSTSIRVICKKCGKYSQFHNIACHYPKCRPREVDNSEKKYACTVCGSAFYTRSGRSQHIRHRHPAVRNEERKEARVVGKTSRSRVWTEEEIELLIQLEIKYAGTRNINKCIESELKTKTNKQISNKRRDLARNKVKKDEDSMVLWEEGGMGDILEDIPPREKIKPLKDNILIDRFLTGVRCNGARILEKLDFIEQQLNASATVAEGWGLFEELCKLLMNSPHKDVENLENNKENNIQKDNGKQGGKVGKPPDKYNRNRKYAGRKAKFRFYQTLFEKDKKRLARIIMGEPDKATCKIAVKEIETYYKEILGKEGHGNTRGWPKVKEVVDNEILNWPLSIDEIREALREIDNSSAPGPDGIKVKDLWDIYNLDSRILVRIFNIWFLNRQIPECFKGNRTILIPKVKDPQELKKISSWRPLTIGSIWIRLYTKILAKRLSSAVKLCPRQKGFIAASGCEENISILEKLIKGAKKNKDEIAVVFIDLAKAFDSVGHGHILKGLKRFGISESFIDIVKDLYTDCYTEISVGEDKTEPILIKSGVKQGDPLSPILFNIAMDPLLYKLEDEGDGFIVQGRKITSLAFADDIAILSRSYKGMVKNLKILNQFCKNSSLKVNVKKTKGFHVFPSMGTYVINPKDKWGLGDELIDYIQPGESERYLGARIDPWVGVANNSPKEKLIDWCESLCKAPLKPAQKLIILKVYILTRVFYELILIEPPLYMLNELDVLVRNTLKKILHLPQCTTDGLFYARTRDGGLAVTKFSTQIPNMLIRKWRRHIVSKDDWIDFSFLYAGENLVEKILIYSAKTANPKTWRDEEFLKWSNLRCQGIGIKYFKNDCISNSFLKYPCLARSSSLIAALQTRANVFPTREALARGRKMEEGLCRWCGKVKETIPHISGQCIKMKEARIKRHNRIVKALIDKVGNKGCKIWIEPYFHNKEGKLRKPDLIIEKEGVVAVVDVTVRWEDNADSVEAAHIEKEAYYSELEEEVLQLTGGKIIHFFGFVVGARGKWSERNDEIFKILGIDKFKSFKESVCRLAMYATTDMLALFSDKQ

SEQ ID NO: 18067 - protein, 1260 aa, Emydura subglobosa
MEKTEILFHTGLALDRVKNAPATSFDAPASSVKLIRGIIHRAGPMLSPYAIDRVKDGIAGFMDDFNLRVGEKSVVREEQEDFSESQVLDFNLLPMAFTNVLYSDLKIIDSKSSFYDKYLDSFDDPYLIEFNNLNNNTNFNNLQRDSMENRRNILGDNFNTNFMNTASFKESSSFKEGIFYLEYPVDCFNCPICSQILASFGKWAKHINNVHKSTSIRVICKKCGKYSQFHNIACHYPKCRPREVDNSEKKYACTVCGSAFYTRSGRSQHIRHRHPAVRNEERKEARVVGKTSRSRVWTEEEIELLIQLEIKYAGTRNINKCIESELKTKTNKQISNKRRDLARNKVKKDEDSMVLWEEGGMGDILEDIPPREKIKLLKDNILIDRFLTGVRCNGARILEKLDFIEQQLNASATVAEGWGLFEELCKLLMNSPHKDVENLENNKENNIQKDNGKQGGKVGKPPDKYNRNRKYAGRKAKFRFYQTLFEKDKKRLARIIMGEPDKATCKIAVKEIETYYKEILGKEGHGNTRGWPKVKEVVDNEILNWPLSIDEIREALREIDNSSAPGPDGIKVKDLWDIYNLDSRILVRIFNIWFLNRQIPECFKGNRTILIPKVKDPQELKKISSWRPLTIGSIWIRLYTKILAKRLSSAVKLCPRQKGFIAASGCEENISILEKLIKGAKKNKDEIAVVFIDLAKAFDSVGHGHILKGLKRFGISESFIDIVKDLYTDCYTEISVGEDKTEPILIKSGVKQGDPLSPILFNIAMDPLLYKLEDEGDGFIVQGRKITSLAFADDIAILSRSYKGMVKNLKILNQFCKNSSLKVNVKKTKGFHVFPSMGTYVINPKDKWGLGDELIDYIQPGESERYLGARIDPWVGVANNSPKEKLIDWCESLCKAPLKPAQKLIILKVYILTRVFYELILIEPPLYMLNELDVLVRNTLKKILHLPQCTTDGLFYARTRDGGLAVTKFSTQIPNMLIRKWRRHIVSKDDWIDFSFLYAGENLVEKILIYSAKTANPKTWRDEEFLKWSNLRCQGIGIKYFKNDCISNSFLKYPCLARSSSLIAALQTRANVFPTREALARGRKMEEGLCRWCGKVKETIPHISGQCIKMKEARIKRHNRIVKALIDKVGNKGCKIWIEPYLHNKEGKLRKPDLIIEKEGVVAVVDVTVRWEDNADSVEAAHIEKEAYYSELEEEVLQLTGGKIIHFFGFVVGARGKWSERNDEIFKILGIDKFKSFKESVCRLAMYATTDMLALFSDKQ

SEQ ID NO: 18068 - protein, 1261 aa, Emydura subglobosa
MEKTEILFHTGLALDRVKNAPATSFDAPASSVKLIRGIIHRAGLMPSPYAIDRVKDRIAGFMDDFNLRVGEKSVVREEQEDFSESQILDFNLLPMAFTNVLYSDLKIIDSKSSFYDKYLDSFDDPYLIEFNNLNNNKTNFNNLKHDSMENRRNILGDNFNTNFMNTASFKESSSFKEGIFYLEYPVDCFNCLICSQILASFGKWAKHINNVHKSTSIRVICKKYGKYSQFHNIACHYPKCRPKEVDNSEKKYACMVCGSAFYTRSGRSQHIRHRHPAVRNEERKEARVVGKTSRSRVWTEEEIELLIQLEIKYAGIRNINKCIESELKTKTNKQISDKRRDLAKNKVKKDEDSMVLWEEGGMGDILEDIPPREKIKPLKDKILIDRFLAGVRCNGARILEKLDFIEQQLNASATVAEGWGLFEELCKLLMNSPHEDVENLENNKENNIQNDNGKQGRKVGKPPDKYNRNRKYAGRKAKFRFYQTLFEKDKKRLARIIMGEPDKATCKIAVKEIETYYKEILGREGHGNTRGWPKVKEVVDNEILNWPLSIDEIREALREIDNSSAPGPDGIKVKDLWDIYNLDSRILVRIFNIWFLNRQIPECFKGNRTILIPKVKDPQELKKISSWRPLTIGSIWIRLYTKILAKRLSSAVKLCPRQKGFIAASGCEENISILEKLIKGAKKNKDEIAVVFIDLAKAFDTVGHGHILKGLKRFGISESFIDIVKDLYTDCYTEISVGEDKTEPILIKSGVKQGDPLSSILFNIAMDPLLYKLEDEGDGFIVQGRKITSLAFANNIAILSRSYKGMVKNLKILNQFCKNSSLKVNVKKTKGFHIFPSMGTYVINPKDKWGLGDELIDYIQPGESERYLGARIDPWVGVANNSPKEKLIDWCESLCKAPLKPAQNLIILKVYILTRVFYELLLIEPPLYMLNELDVLVRNTLKKILHLPQCTTDGLFYARTRDGGLAVTKFSTQIPNMLIRKWRRHIVSKDDWIDFSFLYAGENLVEKILIYSAKTANPKTWRDEEFLKWSNLRCQGIGIKYFKNDGISNSFLKYPCLAKSSSLIAALQTRTNVFPTREALARGRKMEEGLCRWCGKVKETIPHISGQCIKMKEARIKRHNRIVKALIDKVGNKGCKIWIEPYLHNKEGKLRKPDLIIEKEGVVAVVDVTVRWEDNADSVEAAHIEKEAYYSELEEEVLQLTGGKIIHFFGFVVGARGKWSERNDEIFKILGIDKFKSFKESVCRLAMYATTDMLALFSDKQ

SEQ ID NO: 18069 - protein, 1261 aa, Emydura subglobosa
MEKTEILFHTGLALDRVKNAPATSFDAPASSVKLIRGIIHRAGPMLSPYAIDRVKDGIAGFMDDFNLRVGEKSVVREEQEDFSESQVLDFNLLPMAFTNVLYSDLKIIDSKSSFYDKYLDSFDDPYLIEFNNLNNNNTNFNNLQRDSMENRRNILGDNFNTNFMNTASFKESSSFKEGIFYLEYPVDCFNCPICSQILASFGKWAKHINNVHKSTSIRVICKKCGKYSQFHNIACHYPKCRPREVDNSEKKYACTVCGSAFYTRSGRSQHIRHRHPAVRNEERKEARVVGKTSRSRVWTEEEIELLIQLEIKYAGTRNINKCIESELKTKTNKQISNKRRDLARNKVKKDEDSMVLWEEGGMGDILEDIPPREKIKPLKDNILIDRFLTGVRCNGARILEKLDFIEQQLNASATVAEGWGLFEELCKLLMNSPHEDVENLENNKENNIQNDNGKQGGKVGKPPDKYNRNRKYAGRKAKFRFYQTLFEKDKKRLARIIMGEPDKATCKIAVKEIETYYKEILGKEGHGNTRGWPKVKEVVDNEILNWPLSIDEIREALREIDNSSAPGPDGIKVKDLWDIYNLDSRILVRIFNIWFLNRQIPECFKGNRTILIPKVKDPQELKKIPSWRPLTIGSIWIRLYTKILAKRLSSAVKLCPRQKGFIAASGCEENISILEKLIKGAKKNKDEIAVVFIDLAKAFDSVGHGHILKGLKRFGISESFIDIVKDLYTDCYTEISVGEDKTEPILIKSGVKQGDPLSPILFNIAMDPLLYKLEDEGDGFIVQGRKITSLAFADDIAILSRSYKGMVKNLKILNQFCKNSSLKVNVKKTKGFHVFPSMGTYVINPKDKWGLGDELIDYIQPGESERYLGARIDPWVGVANNSPKEKLIDWCESLCKAPLKPAQKLIILKVYILTRVFYELLLIEPPLYMLNELDVLVRNTLKKILHLPQCTTDGLFYARTRDGGLAVTKFSTQIPNMLIRKWRRHIVSKDDWIDFSFLYAGENLVEKILIYSAKTANPKTWRDEEFLKWSNLRCQGIGIKYFKNDCISNSFLKYPCLARSSSLIAALQTRANVFPTREALARGRKMEEGLCRWCGKVKETIPHISGQCIKMKEARIKRHNRIVKALIDKVGNKGCKIWIEPYLHNKEGKLRKPDLIIEKEGVVAVVDVTVRWEDNADSVEAAHIEKEAYYSELEEEVLQLTGGKIIHFFGFVVGARGKWSERNDEIFKILGIDKFKSFKESVCRLAMYATTDMLALFSDKQ

SEQ ID NO: 18070 - protein, 1260 aa, Emydura subglobosa
MEKTEILFHTGLALDRVKNAPATSFDAPASSVKLIRGIIHRAGPMLSPYAINRVKDGIAGFMDDFNLRVGEKSVVREEQEDFSESQVLDFNLLPMAFTNVLYSDLKIIDSKSSFYDKYLDSFDDPYLIEFNNLNNNTNFNNLQCDSMENRRNILGDNFNTNFMNTASFKESSSFKEGIFYLEYPVDCFNCPICSQILASFGKWAKHINNVHKSTSIRVICKKCGKYSQFHNIACHYPKCRPREVDNSEKKYACTVCGSAFYTRSGRSQHIRHRHPAVRNEERKEARMVGKTSRSRVWTEEEIELLIQLEIKYAGTRNINKCIESELKTKTNKQISNKRRDLARNKVKKDEDSMVLWEEGGMGDILEDIPPREKIKPLKDNILIDRFLTGVRCNGARILEKLDFIEQQLNASATVAEGWGLFEELCKLLMNSPHEDVENLENNKENNIQNDNGKQGGKVGKPPDKYNRNRKYARRKAKFRFYQTLFEKDKKRLARIIMGEPDKATCKIAVKEIETYYKEILGKEGHGNTRGWPKVKEVVDNEILNWPLSIDEIREALREIDNSSAPGPDGIKVKELWDIYNLDSRILVRIFNIWFLNRQIPECFKGNRTILIPKVKDPQELKKISSWRPLTIGSIWIRLYTKILAKRLLSAVKLCPRQKGFIAASGCEENISILEKLIKGAKKNKDEIAVVFIDLAKAFDSVGHGHILKGLKRFGISESFIDIVKDLYTDCYTEISVGEDKTEPILIKSGVKQGDPLSPILFNIAMDPLLYKLEDEGDGFIVQGRKITSLAFADDIAILSRSYKGMVTNLKILNQFCKNSSLKVNVKKTKGFHVFPSMGTYVINPKDKWGLGDELIDYIQPGESERYLGARIDPWVGVANNSPKEKLIDWCESLCKAPLKPAQKLIILKVYILTRVFYELLLIEPPLYMLNELDVLVRNTLKKILHLPQCTTDGLFYARTRDGGLAVTKFSTQIPNMLIRKWRRHIVSKDDWIDFSFLYAGENLVEKILIYSAKTANPKTWRDEEFLKWSNLRCQGIGIKYFKNDCISNSFLKYPCLARSSSLIAALQTRANVFPTREALARGRKMEEGLCRWCGKVKETIPHISGQCIKMKEARIKRHNRIVKALIDKVGNKGCKIWIEPYLHNKEGKLRKPDLIIEKEGVVAVVDVTVRWEDNADSVEAAHIEKEAYYSELEEEVLQLTGGKIIHFFGFVVGARGKWSERNDEIFKILGIDKFKSFKESVCRLAMYATTDMLALFSDKQ

SEQ ID NO: 18071 - protein, 973 aa, Bradysia coprophila
MNTDSNTTLDSDSDDEANICPICSRGFSSMAGVRIHWRIHSADQIQTAINEKLATQNLTSATRENATLNTVATTAAEPEDFRCFECGVDAVNEQNYIAHLRSHLQSNNDTVPQLSSSNREFIEYISQLKQSYRLVKRIPKGARSVVADLSLVQIIKRNATETAELLPTLENNRVSSKKQCTLTSRIEAKLADFDIRGAVRLISSTDTMARECDETFTELENKHPEPSRPQNFPSDPDDSIQPLQVDSNMVHSAIMSFANGSSAGSDGLRPQHLKDIISMSAGESGNRALQSITKLNNFFLAGKLNDEVCELMYGASLCALRKKDGDLRPIAIGTTLRRLTSKIACFSVKSDMINYLRPRQIGFGVKFGCEAAVHAIRSYVRNPRNGCKLILKVDVKNAFNSVERDVMLAEIKDKIPQLYHYFSQCYLRPTFLAYGNKIILSRVGAQQGDPAGPLIFSLAIHPLVMSLQAEFNVWYLDDGTLGDTPAKVLADLSTIKDTVKSIGLELNSAKCEIYFCNGPANDNVVSQFELLAPGIKVVTDDELEILGSPILESAMEPFTRRKFQKIDVLIGRLSSLQTHYALFILKNCMAIPKLVYLLRCSPLWNFTASLQDLDMQLKSALEHIINVQLTETQWIQSTLPVNFGGLGIRSFTDISLPAFLSSVYGVQDIVSTLTFIQDYESKMPYMMEALIEWNEVNNELKPEILKSQFAWDRINVNRLMSQLTFTSEVEQYRFDLLQNKMSGAWLNVIPSPNIGTFLNNDVMRICIGLRLGSKICHPFECVCGKAVDELGGHALHCKKNPGKYFRHAELNRILHQSLGTINMPSLLEPTGLYRDDRKKRPDGITYTAWERGKSLVWDATCSDSLAVSNMSGRIKTPGMASERAVARKHSKYSLIKANYHFVAVGVETFGPWSKEAINLLNKIGSHMIRLTGEAKARLYLFQRFSLAIQRGNAMSVNACIPKGAALDEIYHLH

SEQ ID NO: 18072 - protein, 804 aa, Bradysia odoriphaga
MSSTDTLATNCNETYEELLKKHPKPSRSLTFPSAPDDSIQPLQVDSSTVQVSICSFANGSSAGTDGLRPQHLKDIISLSAGEAGRRALNAVTKLTNFMLAGKLNDEICELIYGASLCALTKKDGHIRPIAIGTTFRRLTSKIACYSVKSDMINYLLPHQIGFGVKYGAEGAVHAIRAYIRNPRNAAKLCLKLDVRNAFNSVERDVMLAEIKLKVPQIYHYLRQCYLKPTFPAFGDKIISSTVGAQQGDPAGPLIFSLAIHPLVSQLDTELNIWYLDDGTLADKPEKVLFNLTVVKEKAKSLGLELNCEKCELYFCNGSGDTDIVNEFKAIAPGIRVVTDDELELLGSPLHESGMESFTSRKFEKIFVFIDRLPSLQSHYAYFIMKNCLAIPKLVYLLRCTPLWRFQNLLHEMDLQMKTALESIVNVQMNTDQWIQSSLPVNFGGLGIRSLLEISLPAYLASVNGVKDIVSTLINIQDYESEIPFYTEALLSWNNFNNGILPEKATSQFAWDQINIKRVVSELNFPNEIERFRFQLLQNKWSGAWLNVIPSPNIGTFMNNDVIRTCIGLRLGTKICRPFECVCGTSVDALGRHGLHCKQNTGKFFRHAELNRIIHQILSSIHISSLLEPTGLFRDDGKKRPDGITYTAWEKGRALVWDATCADSLAASNMAGRTKTPGMAFERAAIRKHTKYSKIKQNYHFVAFAVESFGPWSKEAVALINKIGSNLIRITGEPKSKRYLIERISLAIQYGNALSVMTRHLKHSKKRAYGRNLLVLSVQRSFFCLFFLLLFFFYLVTMNVICRMN

SEQ ID NO: 18073 - protein, 1254 aa, Diachasma alloeum
MYDLETEYASDGTDDMDSASPVRELASQTVSRINGNDPIHEVESDKEVIIEVPFRIMEVNGVAQRAHVCCICESAGSTLIFIKEQTLVTHITETHNEYGIKLVCQCGREPETLRHWNAHKGRCKGPVTDREQEVLPFTCTQCSFKCKTKIGLGQHERHRHPLLRNEKRKVQHENKGTANKGGRRNYVWSEEATTALQRLSEKYEDDETPIDKIVSELDSMNIKMTKRQVQDKLRRLSLAEARIREEEQRTRRMLSVQEVSFRNRTVSTNSDGSDDVFFDTVETSQEIEAVIHNVEEPEIYVLMEEQLEESVGTPSALGEGLLDRGPIVLEELDLYQDEQVPQLALEEPQVMSDKEEWIRSMKTHIESRSLQLNNKYEHCANELRSQWSTKRHNADDLKNFVSDYLTNVIVPLLRNMDNETNQSIEPNGMHMNRRDKNRNCRGRGGNMGKRNPRPLNHRQRSKYAYARCQDLFRNCPKKLAEYTVKGDFSFAETRQDLPSKEGIEEVYGGLWGKSGPAEVDILDQDVEQTDLCSTFKPITIKDIKNRIRNTKSDSAAGVDGVKKVHIARAGAGELLEVLFNIVLLEGIYPNSWKVNRTTLIPKAGKDLSDIKNWRPITVGSMIARIYSALIDGKLRQFVKQSDRQKGFTSEDGCRQNIIILEQVIDEMKLGCGGVTSVLDVSKAFDTVPHSIIRPALKRKGVPDHIIRIIGDMYEDCKTVIKSSNGTVDITLQRGVKQGDPLSPLLFNLAIEPLLDKLCRETRGGQIGQEEVAVLAFADDLVLISRDCTDAQKQLDIVNEYLNNLGMCLAASKCQAFQIVSLRNSWYMDNPKLTVTGIAIPNVVADEVVVYLGGKLSPWISLTRGQEVSTIMKVMENVKRLKLKPQQKLELLKGFILPRFVYRLTVNCPGGVVLRQFDSAIRQGIKAILHLPLSIAKGFFYTPTGRGGLGIMKFERVIQMAALKTGVKIRESKDPVMREISKKAKLEKHFDKCAERLRITRPQNLEECEETKSTLKRRDVDEWNKLRMQGDGVQTFRNDKIGNKWISNPTLISGPSFLTAMRLRTNTFGTKVVLAQINKGAEVACRRCGGQAETLGHILGMCTHTKPARIRRHNEIRDFIADKVSKKYPILVESSQEVNGELKKPDLIILKPEGAIVADVTVVYEKGNYIKNAARRKEEKYQLLAEKLTKDSNEMKKARVLAIVVGSRGAIPNKTMKNLKELGLNKADQLTISMIALRTSIKIATGFIDYNHEII

SEQ ID NO: 18074 - protein, 1114 aa, Eucidaris tribuloides
MSVEQVDSNACRLSYPHDTTVWQCNGCNKTLSGHPNIRKHLISHNYVLSYSCSLCNKVYTSLNRVACHFPKCNARDGDALPRPEGLPCSFCPRRFSTYPGLRLHVKRAHPVEFTQEDTVLTNTTSKAPWSSEDIAVLANMEINLAPDTRFVNQALHALLPGRSIDSIKYQRKKATYRELVRTLRAQRVGVAGGAGVQHADDPLVTNDGFDEINDNFNGNDGFNNHGVPRDYNDDLIGDFNNYDTLIDAIRKDLNNYQKDQDRGLHADLIQLLKAHERGLPPDYSYVLTTLGRRKARLRRRRPFPIPEVRLEDSNRRKKRLLYKVHQHFYNTNRRKLAVHLLDGQPLDEVAPDTGAAYTYYTKVFGKDPQRDDDPFIPKHNNLEEERSRLLAPIGEEEVSAALKRIKKNGAAGPDRIKFADVAKIHPRLLATLFNFWLLSGHIPDELKINNTILIPKGQADPADISRWRPITIGSFLIRIYSKILNVRLTHATEVNPRQKAFVPVDGCLENTTLLDHLVREYRSRGKSYYIMLLDLSKAFDSVHHSTIIRALSRQGIPARFRQIIENLYDNVSTRIVSSAGTSDPIPMRCGVKQGCPLSPRLFNLVMDELVDSCPEYIGLEVEGIKHPILAFADDLVLTAESKAGMSALLDHCLSFFQKRHMRINALKSASFGASMVHRVGGRHISRLIPMTEPEWRVEGTAIPCVPIDETTKYLGQKFGIIGRQKSDLLVPLTKWLENISSAFLKPFQKLSLLKQYVVPRLLYHFGASTYPMNALKAFQRALDKTVRRVLHLPASSSLVSMHLPTQLGGLGIPDLTVVGNKLRHGALIRLAKSGDPVIRAIYASPTFQRQLAGLARILRLPIRDADKSLVESTIQGNIVRELETFSRSKQGQGFRAFNHVAATQWVTRPTILKGNLYVQAAALRTNVLPCRSIMSYTGGPTICRHCGSAIETTSHILQRCPKVLGARMGRHNHVCRLIGSFLKRKYGPDCLVTEPLIHTPRGNFRPDLVVFDRQRRHAYVADVSVPYETTQDTLAESERSKIAKYQFRDISQAIRDKFRVDSVSYEGFPVGARGAIHTGKVRYCGVALSTNQLSTLAQVAIKGSIFTFNAFMKA

SEQ ID NO: 18075 - protein, 1041 aa, Salpa thompsoni
MVRVTRSSTSAAPPRKVTGVAMDSGYNTRVKARTSIPEGGSGQGEDWKCPQCAQGFRTKRGMAQHFRLGHPQERNQSVLDGVARKKRRGWTTEERLAVAEYERELCTEGVPKNPNGSSGVIAALCRMFPQRSKDSLQGVRGHPEYRAFMETGLHENEIGDNETTRQPASVAVQKDWRKELEMSLAKGLTEAGLCKTPSRINKGFRKWAGKIETRKRYLKVLPPLPVIEGNRTARRKILRAAWLSAYEKRPRTTSRRICEGKGLNDRESYPEGMFEFWNRVYDTESRPEGPIEQVEWRNEYEGLLRPITGEEVKSHLKGMKSGAAGVDGVTLNHVRSLKPKELAEWFNCFLLVGIIPKRLKRFRTIFLRKTENASAPTDFRPITIGSYFRRLFDGILAKRLQTVQTHFSQRGFKSLEGCSINQEILRAVVSGHIEKRKALSYVFLDVSKAFDSVSHVRVETAFRKAGVPKGLASLLMDTMRGNCTTFGADERIVRIRRGVLQGDPLSPIIFNLVMDMAVRSLDSRIGGSLGNTKVSQLLFADDAVLFGSSLEGLQLNVNRFSKSLLYFGLSMNPTKCAAVHIRADGRLKKWYIDPRAELRVGAATVRNLGVGESYKYLGLRMSLGDCTTDIREQLREMLWNISASVVKPQHKLKILQSVAIPKLEYVLANGRYSLGVLRDCDRMVRGSARNWLHLPKDTPDAMYYTARSDGGLGVPCFRTKIPRLQRRKRTKIDEVEEPDAHLAALRDSEYWRKQEGPKAPVALGTEREVVDDEELSSYLIGRNGEREYWRERLYSTTDGKGLMNHQGGYTSRFFDEKFMRLSGKEFVRAIHLRCGSLRTPSRANRGRVFGKGPRCPSCPDRIASLTHLLQNCPRTKRARTYRHDFIAKMLVNKLRKVGFEVQEEPHIPYRNSFLKPDIVAYRSRDRVVAILDPTVVNCGGSLDALAERKRIKYVKAEVFSWLVGKYGEAGSEENAMVEGLAINFRGAISQRSSEALRALGLRPGFLELLSFKVLKLGGFIYNSLRERSDWNCGSARDGVST

SEQ ID NO: 18076 - protein, 803 aa, Sphaeromyxa zaharoni
MFQFSPSRWYNKICNPEGPSPLSDNLISDYADFINNSKSSAVPEKIKILKTFAKSNDPNSSPFPNIRFTPELLSEALRKQRNWSSPGPDGIPFFYIKKSTVFQTTLCSFFKKFYKHPSLIPPCLFQGRTVLIPKSTEPSSINDLRPITCLNSSCKLLSTVILNHISEPLYQRFIPKEQRALRPKRNGCLDAQLLSAAITDLYRSSKRTVLYSTYIDLKKAFDTVDHNILNYILKNTLGKCRTSNFILHKLDLASSYVKLSDGSFIPLNFKLGVPQGDPLSPILFNLAIAPISAWIRKFVELKSIKSLKAPCNHILYMDDLKIFSTTPPTKFTTKLTKKLISLGFTINPSKCAIIPSRTSHNLSQEKSPFPILLTTPYKYLGLKEHQAKSVLLTREEIDKKIYLSAEKVLTSSLPFKNKIKAFNMFVMSSLPYFLPLLVYSPSAVNALKKKIGLIFQSSSGWLNSQNKDRLFLPSSNLGLNIINPSYQLFNALSNANITLTNDSDNLLTCANKIFEALKNNRIFKTTFKSELNKYLHLIPEQVLSSNNLKLSLKEHFNNELLSSTREKNLHKHLYNITDTGINLPFSLNHLPLPTLTKFMALQDLTAPLNAYLFYINKSDSSTCRLCKNHPEWPSHILGACNALKSSHQERHDRILSIIYRDLFKKTFPNESKITNALHADTTILMKDTAIPNLHDVPHNKPDIYLETKKEITLIELAITGDSLIDDVTRKKEDTYTRLIEALKHEKKKKVILLTIILGHFGSCSDAQTNLRKLKLDDNTLKSCLTSLINSNVKVYKKVTGLST

SEQ ID NO: 18077 - protein, 1136 aa, Nomada fabriciana
MDSDSEASDAAAPGPGAAVADTSATDRRAHDDEQGMIMDNERIQYVDLPLDGQIKCEACASRSVDRRFLQESQFAEHAKGQHPEWEVRWRCAVCTRHFEKLHGCRCHIPKCKGAMQLTAVAGEFRCGSCGENYDTRRGLSMHERHRHPQVRNMGRILAGTRQGRNEPGSRALVWTKEEVDLLIELNERYKHLSQPNVAIREFLPNKTLKQISDKRRILPVPREEVEVAADPGDSSADEQSGESVYESAAEENDDAVRPEEWKEPFLQAIGSHHLDEDNEFREIERKIESVARGGTQEFEAGQVDDILNQFVERVKRGTPEHEGTEVSVRRRRNRRNGRRPRGTCANRRRRYGYAMYQELYKKCPRKLLDMAIAGKTLESKESIEPPPRNEVKTIYQGLWGAAGPPITTISHPNRCNPIPMEEIWKPVSTGEMTNKFRKVKANTAAGLDGVKKVHLRKSGALPVFVKLCNLLLMSRHYPAQWKANRTTLIPKPGKSVAEADNWRPITIGSLLGRLFSAMIDSRLREKVSPHIRQKGFTSEDGCKYNVAILDSALAEMKEKGGGIVTIIDVSKAFDTVPHGVLCDSLTAKGIPTEIGNYVQEMYRGCTTRIACRNQETLEIGLARGVKQGDPLSPLLFNMVIDPIVEKVNERSEGVTVGDEKVAVLAFADDLVFLARNRKDAQEQITMVYQSLCKLHMRISANKCSAFQVNSKSKTWTLSDPALSMGEQAIPYAEPQSTSQYLGATINPWKGFIRIAAKEIVDAVKCVQRMGLKPHQKINLIRTYLLPRYVHRMVASPPPLGTLDQIDKEVRQVVKEILHLHPSTADGVIYTSKSHGGLGVQRVANIVKLAKLRNATKMIESADPAVQEAYKGQEVLIRKYAASIAVPWPASIPQIDEARKTLKRKDTEKWRTLISQGQGIKEFFGDKIGNQWLYNPELLKPSRYLDAIKLRTNTFGTRVALRRADKTREYKCRRCGVQAETLGHILGNCIHTKPARIRRHNEICKLIMDNLPRHCTVFEEPRVSVRGELKKPDMVIKDHERVLVLDVTVRYEDKENLRDAYREKERKYKETAEYIMAKIGGTEAEVIPVVVGCRGAMPKSTLDNLKLLGLGRKHQLTASLIALRSSIEMANQFLDDV

SEQ ID NO: 18078 - protein, 1136 aa, Nomada fabriciana
MDSDSEASDAAAPGPGAAVADTSATDRRAHDDEQGMIMDNERIQYVDLPLDGQIKCEACASGSVDRRFLQESQFAEHAKGQHPEWEVRWRCAVCTRHFEKLHGCRCHIPKCKGAMQLTAVAGEFRCGSCGENYDTRRGLSMHERHRHPQVRNMGRILAGTRQGRNEPGSRALVWTKEEVDLLIELNERYKHLSQPNVAIREFLPNKTLKQISDKRRILPVPREEVEVAADPGDSSADEQSGESVYESAAEENDDAVRPEEWKEPFLQAIGSHHLDEDNEFREIERRIESVARGGTQEFEAGQVDDILNQFVERVKRGTPEHEGTEVSVRRRRNRRNGRRPRGTCANRRRRYGYAMYQELYKKCPRKLLDMAIAGKTLESKESIEPPPRNEVKTIYQGLWGAAGPPITTISHPNRCNPIPMEEIWKPVSTGEMTNKFRKVKANTAAGLDGVKKVHLRKSGALPVFVKLCNLLLMSRHYPAQWKANRTTLIPKPGKSVAEADNWRPITIGSLLGRLFSAMIDSRLREKVSPHIRQKGFTSEDGCKYNVAILDSALAEMKEKGGGIVTIIDVSKAFDTIPHGVLCDSLTAKGIPTEIGNYVQEMYRGCTTRIACRNQETLEIGLARGVKQGDPLSPLLFNMVIDPIVEKVNERSEGVTVGDEKVAVLAFADDLVFLARNRKDAQEQITMVYQSLCKLHMRISANKCSAFQVNSKSKTWTLSDPALSMGEQAIPYAEPQSTSQYLGATINPWKGFIRIAAKEIVDAVKCVQRMGLKPHQKINLIRTYLLPRYVHRMVASPPPLGTLDQIDKEVRQVVKEILHLHPSTADGVIYTSKSHGGLGVQRVANIVKLAKLRNATKMIESADPAVQEAYKGQEVLIRKYAASIAVPWPASITQIDEARKTLKRKDTEKWRMLISQGQGIKEFFGDKIGNQWLYNPELLKPSRYLDAIKLRTNTFGTRVALRRADKTREYKCRRCGVQAETLGHILGNCIHTKPARIRRHNEICKLIMDNLPRHCTVFEEPRVSVRGELKKPDMVIKDHERVLVLDVTIRYEDKENLRDAYREKERKYKETAEYIMAKIGGTEAEVIPVVVGCRGAMPKSTVDNLKLLGLGRKHQLTASLIALRSSIEMANQFLDDV

SEQ ID NO: 18079 - protein, 1033 aa, Sminthurides aquaticus
MVFVEAEYEIRNENPEKEWAIKTLAKELKRKLNSKRPVEGIRKRIVEGDYRGKYEAFEKEKREEAKGERDIETLSRDTERNVPDRCKKLLRRALKGVLTLDLRGHKAEEPMKSLIREYLLDETKLETSIEQLILSVFASSSASLDKPILRKTNDPAPKMGTKRVGASLKAATRDRPAERAGKSRSSHQARPNRPKSKLFKGGVVIPGKSPEKRKCKRTHKQRKRMEYALYQQLYREDRSKLATLMFAKEPFSIDRMHTKTSHPAGVAKEWGRVFSEVPSGTRTDNMRFRPSETDWSGAWVPIKDGELKKSLIKFTKAKSPGPDRIPPSLIRATPYPILRTILNMILLHGQLPNFLKQSRTTLIPKVDEPQGFSDYRPISVSSAIVRLLHAILAKRFTRAVKHSMKQRGFIAVDGCAENVMVVDQLIKGAYRHNKSVYLMSLDIKNAFGSVTHDAIIKALRLTGAPGHITNYVRQLYTGFRTEIALGGQKQLVEVKNGSLQGCGLSPFLFNLIIDQLLAKIPPYVGVKVGNREEGVEVNALAFADDTVLATKSREGMQRILQVLEDNVPAWGIIFNPKKCKYLALEASGKDKKIKVSTDIAFSLHGGQIPGLNIGEELKYLGAYYDPTGLLSCRRDMEYYLKRLRKARLKPQQKLYLLRVHIIPRMIHALVMGKMDVGELKGLDKLTRRHLVGSEGILKLPKSVPLGYFYAPARAGGLGLMSFRASIPSMIVERFGEMTNSDSPYTRAAAADFANQQRVLRARKYLLKTTEGEEVLGRLEIRKYWTNQLYASIDGRPLREAEKAPFVHSWVSDGTTMMSGEAYIKAHKVRINALPTRARTNRGMPGERRCRAGCGVPETNAHVLQVCPRTHLARIARHDAIVKRLDGHIRQKGLKTFVEPILSTSDGIFKPDLIVIDDNKLGTIIDVQIVGSYKPLNEINNDKVAKYSAESIRGVVKEKYNLETVFVSALTITFQGIMASDSVKDLVPMFASKKILKQLVVSTLEGSIYTYNIFRKTTRNCRGWRSGIRAGGTG

SEQ ID NO: 18080 - protein, 1082 aa, Cristatella mucedo
MASNNEPVALEVSEWPPRNLACPCCEWRVEYAAGLSNHARDVHDTRAIFVCSLCGRTELDAPAMGDHFRVAHPPPGSAPPARAPSWRMPGRAVSPQADEPPGPAERPATQTRRPTRSADSAAPPADARRAADVEAAPDELEAMFQPFGLPARNQGPSEAAEAFVERWLQKIADRRRDGDFRGFQSDVATMSAEWLTLARGELNEKARQVRRARCANQVRLPTDTLPRTRASDGWNPKEASRLQKLYGVNRPRAMREILQPPPTRYSGDLTACHAHWAREAIAAEVDPAAVDELLDRSFGEYDSTPGARITQAFESKDIVARLRRASNTAPGADKLEYRHLRAVDPGCGLLTAVFNACLAFGAIPESWLEGHTVLIYKRGDPSEPGNFRPITLLPTMYKLMSGALAARLAEDLRGRGILSPQQKGFVPGMEGCLEQSFLVESVFETSRDHRSGRKPVFASFLDLQNAFGSIPHEVLLRALRRAGVDPSFCDLVGALYATSTTSIWLGDDALAPFPCSAGVRQGDPLSPILFDVAMEPVIRAAARAERRGFAIGEVRVAVCALADDLALFAERGRDLSALVRKCGRAAATLGLVFRPDKCVVVARNAQGDRLTPNVVLRGQSLPVAAEGESVRYLGAPQGGSHPREEADKACDVLVRDIRRLESSMLAPWQKLDALKTFLLSRLDYLGRAAEIMQKSTRKIRKAIDRFARSTCNLSHRSATDFPYAPREYGGLGITDPGVNARIMRATQACRMLTSADPTVKSVAEYLLGRSVLLMRGNPSSLDHRSRYLSGERFHDGRQEGMRCLWSQGRKALRALGASVQVSEEDVKIKITHPSGTVDEVKPARMITALRANARRRSGDALAARYDQGKVARCLRTDRFGNHSHFVHTGLGIAHRSWRFIHRARLNLIPVRAVRRFSAPTESLSCRHCGYERETLAHAICHCPRYLVDVRKRHDAILERLRKAVGEKWRRHVHVDSRHPLNPIANQRPDIIIDDGRSTAIIADVTVTFDNDETALDLAAKEKVSKYQGLADAFTRQGYETVKLVPFVLGALGAWWPANESCLSALGVAQGYRGLLRKLCVSE

SEQ ID NO: 18081 - protein, 896 aa, Carcharodon carcharias
MTVTGDPETRALAIGLVESITDTMLNEGKTEQTCKRSRNRVARPKDGSKNTKAMKKWAAKKAQFKSTQLAYKTDRRKVARQIMGAPSTQLCPLSKAELQESFTRKLSTPNNKANLQKFAPYTGTRGYDSLEDPIDKKEVKEALQGMDKNTAAGPDGMKWENVDDIQREFEDRIPRLFTLWLKSGSIPRMLKKSRTVLIPKSDDTEKLKNIDNWRPITIGPILLRLYTKIIAKRLSEAVKIDLRQKGFLVATPGCNENITILSNIMKGAKCNRRELAVVFVDLAKAFDSVGHKMLIKALQRVGLPKSFINMITDLYTGTDTYLESKDGKTEPINVMRGVKQGDPLSPILFNIAMDPLICTLQEAELGVHLPCRGTKICCSALAFADDIALLSDSYAGMAKNLEIVQDFCQKTGLEMNAGKTKGFHFTHKRKTFLYNTKPNWQLKGGPISYIPPGETEKYLGARIDPWAGVTEEQWGSRIDSWIENLKKAALRPIQRIEILKTHMIPRIYFHLILAEVSQNTLVKLDQSIKNGTKEILHLPPHTTDGLLYSSNRNGGLGMPRLEVQIPSAIIRKLEALESSPDVVIEASFEFSGIDNKKTIESLRNLKVLREIEEALKDSGGPRGADAGIEADEIGIAMGWTDITQTSRPKPINRYAAWREVEYRKWTKLQCQGIGIEYYGNDYASNSWTRTCFNIKQSRLINSFLLRCNLYPTRCTLNRGRVHHNKSCRRCEAPFESLAHISGNCPFVKNARIKRHNKILDRLQQFVAKYGWTSHLEPRLFGKDGSLWKPDLVLVKDEVVAVVDVTVRFEDNNKSLEKAWAEKERKYKHLEEEILKLTGGKSVRYFGFVMGARGKWLDLNNSLMRFLKIDKYKSFAQLASRLTISLTLELLQIFGDQ

SEQ ID NO: 18082 - protein, 1245 aa, Aleochara bilineata
MDRENSQDKNRGGTGTPPSDMAGTQNDDNQARSTAIHKGKPTAKGPSSSLSTQVLRLGAGPSTSRSTGVIVGKSATISSRKGATNQASSLPVSRPNVDDTYSCPKCKKNYSSQATLNRHLKECGVRDRDRCLFCSYRAENYASVRQHEARVHPVEYARDLESKLPAPESTLLAQLANIEARCRKGAPFLKTMVNATGLSEHQVRHRREKPIYKRYLAEARENVKREATNRFKGPALETLPSTSKTGSNANKVSYATVASVTTIRPSPKQVTEGSSASPVTPILQPIPPGKRGRQSSSETARPPARKARQETDPASLTTPAVSAKPKPKAKLFIKSTQHTNNTTHTPDKQDNNPKQTQPQLPIPKPSCSHAQYLPLIPTCNLPDSSVPKSLPNPLKRPRISDPLTGIEVIVEEPVTKPAPKKHKPPARPTLDTTPERPLNSATSCVFTNAILAYRDHCDNAMKSLIDATFQDSEELVLSKLEEAIKTKFRVRTKVIPQARPEVSNPPIQTNNKKIRQENYKKAQDLYLKNRTALADLILSGKPLNSPSIMPAVKVVENFYSKILESASPQDTNHISEYKDSGTTYCPITEEDLVTAMTNWKAAAPGPDSITVAQVKKCNVSWLCCLFNIILFKKLVPSSWAAMRTVLLPKDGDQSNPSNWRPITIGSALQRLLHRLLAIRLRGSVSLHPAQRGFIEADGTIANNILLHTYLRSRKDQGKSYNLLSLDIRKAFDTLSHHSILRALDRFRIDNGIREYLEKVLISSTTRIKVGANTTKPIKICRGVRQGDPLSPLLFNLVLDEVFYQLDQLGTGGSMGGGALCSALAFADDIVILQDHDVNVQPALKVINDFFKTKGMSLNPEKTVCISAATFKGKSVVRSRACFSLEGRMIPNLKVLDSFKYLGLKFTASGALKPTLHNTQIWLERLLKAPLKPLQKWTLLRTNLIPRLFYGFQSPSITGETLRGADRLIKQAAKKILHMSAKTADCLLYAKSKHGGFGLTHLRSAVPKILTRRIEGIVQLDIYTRSVSGSPAFASLTERLNKLTRSALEDWQWRERLALSPFHKGLIAADEDIASRSWVLNPPSWLKSGDYIKAIQLRSGNLPTRGAIYNSPNCRNCRGGCNKIESLSHVLQACPVTHWERISRHNEVVHKIRNHARRANMRVEEEPHVRHSEGRLYKPDLAIHISNEEVIITDIQVSWEGDRSLQSSWDNKRLVYDNPHFRAAGSKRWPGKILTFLPIIVGARGI

SEQ ID NO: 18083 - protein, 922 aa, Ctenocephalides felis
MMAKEEALLIRQGVGQINKALLAVTPGRTLEAIKGQRRSPKYKGQVAEFFAMPVNQNTNNACPPATEDTSKHELANALKAAAGHDAEKFNSSLLVSICHRAVEMSPEEIERNVTEYLKDTFPIKRKVKPQLNKRGNAPIISKRQLRRIAYKNTQKYWAKNPSKFISYLLDSKTTTVMPPSDIMVQYRQNLLTCSSSETPGTDEARTDDLSHLWSPITSQEVKDSLPARNSAPGPDGISVNLLRSMPINLLVNLFNVILYMGRVSDTMTESYTSLIPKKDNAENPGDYRPITVSSVLTRTLNEVLARRLLSGVKIDERQKAFQAVDGCAYNIFALDRLLRYHRQNKKPLYLASIDVAKAFDSISHRALTDTLKYYNLPQPFINYVSDLYRRGWTRLRFGRFTSDPISPRCGVKQGDPLSPVLFNMIMNRMIERTPPEIGVNVDGCFYNILAFADELVLVASSVGGLQKLLDHASQYMSNCGLIINNNKSFTVTIKNVPHVKKSIIDKTTTFSCNGQTLPALTRVDSWSYLGVQFNPEGANLGNVRLKLLTIIDKLTKAPLKPQQRLFALRTVGIPRILHQLVLGHAKIGYLKTLDGLISKAIRSWLRLPNDVTLAYFYAHCREGGLSIPSLRWLVPLRRKNRIQNLISTDSSFHKLEIAKCEKMLHDNNTVISSQKELDEKWARTLHKSVDENPLKHSAKTPSQHRWITEGNKLLTGRDFVTCVKFRINAMPTRSRKTRGKMEDRYCRAGCNALETLDHVLQTCHRSHRQRIERHNAVTNYVKRALEKSHSQVDLEPSFKTTEGTRKPDLIATQDGKVIVLDTQIVGSSADLAASHKRKIDYYKPLVDMIRTRYNATEVNFNTITLHIRGVWYEKSAEFITSNKILGKDELKIVSTRVIIGGLNGFAKWSKTTTVKKKRQGIG

SEQ ID NO: 18084 - protein, 906 aa, Ctenocephalides felis
MMAKEEALLIRQGVGQINKALLAVTPGRTLEAIKGQRRSPKYKGQVAEFLAMPVNQNTNNACPPATEDTSKHELANALKAAAGQDADKFNSSLLVSICHRAVEMSTEEIEKNVTEYLNATFPIKRKVKPQLNKRSNAPIISKRQLRRIAYKNTQKYWAKNPSKCISYLLDSKTTTVMPPSDIMVQYWQNLLTCSSSETPGPDEARNDEKLKIHFQRGIRPLGPMAYQLTYINLLVNLFNVILYMGRVPDTMTESYTSLIPKKDNAENPGDYRPITVSSVLTRTLNKVLARRLLSGVKIDERQKAFQAVDGCAYNIFALDQLLRYHRQNKKPFYLASIDVAKALDSISHRALTDTLKYYNLPQPFINYVSDLYRRGWTRLRFGRFTSDPISPRCGVKQGDPLSPVLFNMIMNRMIERTPPEIGVNVDGCFYNILAFADDLVLVASSVGGLQKLLDHAGQYMANCGLIINNNKSFTVTVKNVPHVKKSIIDRTTTFSCNGQTLPALTRVDSWSYLGVQFNPEGANLGNMRLKLLTIIDKLTKAPLKPQQKLFVLRTVGIPRILHQLVLGHAKIGHLKTLDELIRKAIRSWLRLPNDVTLAYFYAHCREGGLSIPSLRWLVPLRRTNRIQNLNSTESSFHKLEIAKCEKMLHDNNTVISSQKELDEKWARTLHKSVDGNPLKHSAKTPSQHRWITGGNKLLTGRDFVNCVKFRINAMPTRSRTTRGRMEDRYCRAGCNALETLDHVLQTCHRSHRQRFERHNTVTNYVKRALEKSHSQVDLEPSFKTTEGTRKPDLIAAQDGKVIVLDTQIVGSSADFAASHKRKIDYYKPLVDMIRTRYNAAEVNFNTITLNIRGVWYGKSAEFLTSNKILGKDKLKIFPTRVIIGGLNGFAKWSKTTTVKKKKQGIG

SEQ ID NO: 18085 - protein, 907 aa, Ctenocephalides felis
MMAKEEALLIRQGVGQIDKALLAVTPGRTLEAIKGQRRSPKYKGQVAEFLAMPVNQNTNNACPPATEDTSKHELANALKAAAGQDADKFNSSLLVSICHRAVEMSPGEIERNVTEYLNATFPIKRKVKPQLNKRSNAPIISKRQLRRIAYKNTQKYWAKNPSKCISYLLDSRTTTVMPPSDIMVQYWQNLLTCSSSETPGTDEARNDDLSHLWSPITSQEVKDPARNSAPGPDGISVNLLRSMPINLLVNLFNVILYMGRVPDTMTESYTSLIPKKDNAKNPGDYRPITVSSVLTRTLNKVLARRLLSGVKIDERQKAFQAVDGCAYNIFALDQLLRYHRQNKKPLYLASIDVAKAFDLISHRALTDTLEYYNLPQPFINYVSDLYRRGWTRLRFGRFTSDPISPRCAVKQGDPLSPVLFNMIMNKMIKRTPPEIGVNVDGCFYNILAFADDLVLVASSVGGLQKLLDHAGQYMSNCGLIINNNKSFTVTVKNVPHVKKSIIDRTTTFSCNGQTLPALTRVDSWSYLGVQFNPESANLGNMRLKLLTIIDKLTKAPLKPQQRLFALRTVGIPRILHQLVLGHAKIGYLKTLDGMIRKAIKSWLRLPNDVTLAYFYAHCREGGLSIPSLRWLVPFRRQKRIQNLNSTDSSFHKLEIAKCEKMLHDNNTVISSQKELDEKWARTLHKSVDGNPLKHSAKTPSQHRWITEGNKLLTGSDFVNCVKFRINAMPTRSRTTRGRMEDRYCRADCNALETLDHVLQTCHRIHRQRIERHNAVTNYVKRALEKSHSQVDLEPSFKTTEGTRKPDLIAAQDGKVIVLDTQIVGSSADLAASHKRKIDYYKPLVDMIRTRYNATEVNFNTITLNIRGVWYGKSAEFLTSNKILGKDELKIVSTRTEWVRKMVKNNDS

SEQ ID NO: 18086 - protein, 952 aa, Dermanyssus gallinae
MLNGQSDIRHWLTSSVQSQATAHTDATSTHSSNRFSDTNAHSQAIPPGNSFPTYVSKVAAIKSKVKMISCIPRSLREHFAVELSRTINEVCSVASQHSWERLIEFPTMVFSIPVKKEKGRTLTSVLRENLHRFRRGARLEENPHVTRGQPSRATSTDDASRRARIVQTKLAQGDVSSAARTLLSTDQTAPIDANTRASLLKKHPAHPTDPAYPEAPTPAPPAFEIDVTTEEIRIAIRSFPSSSSGGPDGLRPRHLKDLIGCRQDDSNPLLQALRQFVILAVNGRLPEFTLSTFYGATLIALRKKDGGIRPIAVGLTLRRLVGKILMKKSMTAILELVAPMQLGCGIKGGAEAAVHAAAAFIKSNRGQGKALVKLDFQNAFNMLRRDHLLNAVKRSIPAIYPAVYQMYRLPANLLWQGETLKSMCGVQQGDPCGPALFCIAIAELQAKLRSEFRPWYLDDATLAGDLATIQADIKTVQEFQACSGLTLNANKCELFLLSEDYRDEPISSLRGILPDIRLAAEDNIELLGAPLTDAALEGVLRRKLVEVSRWCSRLQTLDAHPALYLLRQSLSTPRLTYLLRCSPSFKRTDLLDRFDDILRTGLERLLNVHLGSASWAQASLPVSAGGLGIRRARDLSLSCYLGSLTTFKDLILSIGVEDTPVQLARASEEALEEFRVCWGEPRERKTQGALDNLVVKKRQDALLAQTLDLKGKARLKACFDPMSGKWLQALPSPQLGTMLDNNTLRIVSGLRLGEAVCAEHVCNLCRSKVTATAEHALSCRFSAGRHSRHFAINDVVHRALQSAQIPSMKEPLGMCANSLLRPDGKTLAPWERGRLLVWDATVSCTLANSYIARTSREAGASARLAESRKLSKYSELSPQYIIQPIAVETLGPMGEATVKFLKELGKRVTAVTKDARAGEYLVQRISIEVQRGNAVAIVGSLPSTGEGLPEMP

SEQ ID NO: 18087 - protein, 988 aa, Dermanyssus gallinae
MLYSTRVRQRRCFRRSPVRGLEFRLESLRGQARKHHHVKWSIRYKALAYFISQPQATAQTDATSTHPLNRFSVINAHSQANPPRNSFPTYVSKAAAIKSKVKMISCIPRSLREHYAVELSKTINEVCSVASQHSWERLIEFPTMMFSIPVKKEKGRTLTSVLRENLLRFRRGARLEDNPHVTSGRPSRATSTDDASRRAKIVQSKLSKGDVSSAARTLLSTDQTAPIDANTRASLLKKHPAHPTNPAYPEAPTPVPPASEIDVTTEEIRIAIRSFPSSSSGGPDGLRPRHLKDLIGCRQDDSNPLLQALRHFVILAANGRLPEFTLSTFYGATLIALRKKDGGIRPIAVGLTLRRLVEKILMKKAMTAILELVAPMQLGCGIKGGAEAAVHAAAAFIKSNRGLGKALVKLDFQNAFNMLRRDHLLNAVKRSIPAIYPAVYQMYRLPTNLLWQGETLKSMCGVQQGDPCGPALFCIAIAELQAKLRSEFRPWYLDDATLAGDLATIQADIKTVQEFQACSGLTLNAKKCELFLLSEEHRDEPISSLRGILPDIRLAADDSIELLGAPLTDAALEGALRRKLVEVSRWCSRLQTLDAHPALYLLRQSLSTPRLTYLLRCSPSFKRTDLLDNFDDILRTELERLLNVHLGSASWAQASLPVSAGGLGIRRARDLSLSCYLGSLTTFKDLILSIGVEDTSVQLARASDEALEEFRVCWGEPRERKTQGALDHLVVKKRQDALLAQTLDLKGKARLKACFDPMSGKWLQALPSPQLGTMLDNNTLRIVSGLRLGEAVCAEHVCNLCRSTVTATAEHALSCRFSAGRHSRHFAINDVVHRALQSAQIPSMKEPLGMFTNSLLRPDGKTLAPWERGRLLVWGSTVSCTLANSYIARTSREAGASARLTESRKLSKYRELSPQYINQPIAVETLGPMGEATIKFLKELGKRVTAVTRDARAGEYLVQRISIKVQRGNAVAVVGSLPSPGEGLPEMP

SEQ ID NO: 18088 - protein, 952 aa, Dermanyssus gallinae
MLNGQSDIRRRLTSSGQPQATAQTDATSTHPSNRFSVTNAHSQANPSRNCFPTYVSKAAAIKSKVKMISCIPRSLREHFAVELSKTINEACSVASQHSWERLIEFPTMMFSIPVKKEKGRTLTSVLRENLLRFRRGARLEDNPHVTSGRPSQATTTDDASRRAKIVQSKLSQGDVSSAARTLLSTDQTAPIDANTRASLLQKHPAHPTNPAYPEAPTPVPATSEIDVTTEEIRIAIRSFPSSSSGGPDGLRPRHLKDLIGCRQDDSNPLLQALRHFVILAANGRLPEFTLSTFYGATLIALRKKDGGIRPIAVGLTLRRLVGKILMKKAMTAILELVAPMQLGCGIKRGAEAAVHAAAAFIKSNRGLRKALVKLDFQNAFNMLRRDHLLNAVKRSIPAIYPAVYQMYRLPTNLLWQGETLKSMCGVQQGDPCGPALFCIAIAEQQAKLRSEFRPWYLDDATLAGDLATIQADIKTVQEFQACSGLTLNANKCELFLLSEEHRDEPISSLRGILPDIRLAADDSIELLGAPLTDAALEGVLRKKLVEVSRWCSRLQTLDAHPALYLLRQSLSTPRLTYILRCSPSFKRTDLLDNFDDILRTELERLLNVHLRSASWAQASLPVSAGGLGIRRARDLSLSCYLGSLTTFKDLILSIGVEDTSVQLARASDEALEEFRVCWGEPRERKTQGALDHLVVKKRQDALVAQTLDLKGKARLKACFDPMSGKWLQALPSPQLGTMLDNNTLRIVSGLRLGEAVCAEHVCNLCRSKVTATAEHALSCRFSAGRHSRHFAINDVVHRALQSAQIPPMKEPLGMCANSLLRPDGKTLAPWERGRLLVWDATVSCTLANSYIARTSREAGASARLAESRKLSKYRELSPQYIIQPIAVETLGPMGEATIKFLKELGKRVTAVTKDARAGEYLVQRISIEVQRGNAVAVVGSLPSPGEGLPEMP

SEQ ID NO: 18089 - protein, 952 aa, Dermanyssus gallinae
MLNGQSDIRRWLTSSGQPQATAQTDATSTHPSNRFSVTNAHSQANPPRNCFPTYVSKAAAIKSKVKMISCIPRSLRENFAVELSKTINEACSVASQHSWERLIEFPTMMFSIPVKKEKGRTLTSVLRENLLRFRRGARLEDNPHVTSGRPSRATTTDDASRRAKIVQSKLSQGDVSSAARTLLSTDQTAPIDANTRASLLQKHPAHPTNPTYPEAPAPVPPKSEIDVTTEEIRIAIRSFPSSSSGGPDGLRPRHLKDLIGCRQDDSNPLLQALRHFVILAANGRLPEFTLSTFYGATLIALRKKDGGIRPIAVGLTLRRLVGKILMKKAMTAILELVAPMQLGCGIKGGAEAAVHAAAAFIKSNRGLRKALVKLDFQNAFNMLRRDHLLNAVKRSIPAIYPAVYQMYRLPTNLLWQGETLKSMCGVQQGDPCGPALFCIAIAELQAKLRSEFRPWYLDDATLAGDLATIQADIKTVQEFQACSGLTLNANKCELFLLSEKHRDEPISSLRGILPDIRLAADDSIELLGAPLTDAALEGVLRKKLVEVSRWCSRLRTLDAHPALYLLRQSLSTPRLTYILRCSPSFKRTDLLDNFDDILRTELERLLNVHLRSASWAQASLPVSAGGLGIRRARDLSLSCYLGSLTTFKDLILSIGVEDTSVQLARASDEALEEFRVCWGEPRERKTQGALDHLVVKKRQDALVAQTLDLKGKARLKACFDPMSGKWLQALPSPQLGTMLDNNTLRIVSGLRLGEAVCAEHVCNLCRSKVTATAEHALSCRFSAGRHSRHFAINDVVHRALQSAQIPSMKEPLGMCANSLLRPDGKTLAPWERGRLLVWDATVSCTLANSYIARTSREAGASARLAENRKLSKYRELSPQYIIQPIAVETLGPMGEATIKFLKELGKRVTAVTKDARAGEYLVQRISIEVQRGNAVAVVGSLPSPGEGLPEMP

SEQ ID NO: 18090 - protein, 952 aa, Dermanyssus gallinae
MLNGQSDIRRWLTSSGQPQATAQTDATSTHPSNRFSVTNAHSQANPPRNCFPTYVSKAAAIKSKVKMISCIPRSLRENFAVELSKTINEACSVASQHSWERLIEFPTMMFSIPVKKEKGRTLTSVLRENLLRFRRGARLEDNPHVTSGRPSRATTTDDASRRAKIVQSKLSQGDVSSAARTLLSTDQTAPIDANTRASLLQKHPAHPTNPAYPEAPTPVPPTSEIDVTTEEIRIAMRSFPSSSSGGPDGLRPRHLKDLIGCRQDDSNPLLQALRHFVILAANGRLPEFTLSTFYGATLIALRKKDGGIRPIAVGLTLRRLVGKILMKKAMTAILELVAPMQLGCGIKGGAEAAVHAAAAFIKSNKGLRKALVKLDFQNAFNMLRRDHLLNAVKRSIPAIYPAVYQMYRLPTNLLWQGETLKSMCGVQQGDPCGPALFCIAIAELQAKLRSEFRPWYLDDATLAGDLATIQADIKTVQEFQACSGLTLNANKCELFLLSEEHRDEPISSLRGILPDIRLAADDSIEFLGAPLTDAALEGVLRKKLVEVSRWCSRLQTLDAHPALYLLRQSLSTPRLTYILRCSPSFKRTDLLDNFDDILRTELERLLNVHLRSASWAQASLPVSAGGLGIRRARDLSLSCYLGSLTTFKDLILSIGVEDTSVQLARASDEALEEFRVCWGEPRERKTQGALDHLVVKKRQDALVAQTLDLKGKARLKACFHPMSGKWLQALPSPQLGTMLDNNTLRIVSGLRLGEAFCAEHVCNLCRSKVTATAEHALSCRFSAGRHSRHFAINDVVHRALQSAQIPSMKEPLGMCANSLLRPDGKTLAPWERGRLLVWDATVSCTLANSYIARTSREAGASARLAESRKLSKYRELSPQYIIQPIAVETLGPMGEATIKFLKELGKRVTAVTKDARAGEYLVQRISIEVQRGNAVAVVGSLPSPGEGLPEMP

SEQ ID NO: 18091 - protein, 926 aa, Dermanyssus gallinae
MLNGQSDIRRWLTSSGQPQATAQTDATSTHPSNRFSVTNAHSQANPPRNCFPTYVSKAAAIKSKVKMISCIPRSLRENFAVKLSKTINEVCSVASQHSWERLIEFPTMMFSIPVKKEKGRTLTSVLRENLLRFRRGARLEDNPHVTSGRHSRATTTDDASRRAKIVQSKLSQGDVSSAARTLLSTDQTAPIDANTRASLLQKHPAHPTNPAYPEAPTPVPPTSEIDVTTEEIRIAIRSFPSSSSGGPDGLRPRHLKDLIGCRQDDSNPLLQALRHFVILAVNGRLPEFTLSTFYGATLIALRKKDGGIRPIAVGLTLRRLVGKILMKKAMTAILELVAPMQLGCGIKGGAEAAVHAAAAFIKSNRGLRKALVKLDFQNAFNMLRRDHLLNAVKRSIPSIYPAVYQMYRLPTNLLWQGETLKSMCGVQQGDPCGPALFCIAIAELQAKLRSEFRPWYLDDATLAGDLATIQTDIKTVQEFQACSGLTLNANKCELFLLSEEHRDEPISSLRGILPDIRLAADDSIELLGAPLTDAALEGVLRKKLVEVSRWCSRLQTLDAHPALYLLRQSLSTPRLTYILRCSPSFKRTDLLDNFDDILRTELERLLNVYLRSASWAQASLPVSAGGLGIRRARDLSLSCYLGSLTTFKDLILSIGVEDTSVQLARASDEALEEFRFCWGEPRERKTQGALDHLVVKKMQDALVAQTLDLKGKARLKACFDPMSGKWLQALPSPQLGTMLDNNTLRIVSGLRLGEAVCAEHVCNLCRSKVTATAEHALSCRFSAGRHSRHFAINDVVHRALQSAQIPSMKEPLGMCANSLLRPDGKTLAPWERGRLLVWDATVSCTLANSYIARTSREAGASARLAESRKLSKYRELSPQYIIQPIAVETLGPMGEATIKFLKELGKRVTAVTKDARARKFVLKRTR

SEQ ID NO: 18092 - protein, 1149 aa, Pissodes strobi
MKTTRAKTRNRQINNPDPQSIPTSSDVDEHEAIPIPEACNTGKKTRFKWSEEMNTHLYRAYLHITRMETDTNPYGQRLHDEMIRRFAELQGKTLQNILDQRRQLFIKHRLNPNLIKEIRREVAADLGMLADEPEAEVQEVHQPQEEPHIIIDENFRTTYNALQKNITLYEGLDPHKRPKIPKLRSTSKTKEIINNVNKALKLKIQNVNNIITLHDYIYAAAITALELHHQKPINTKEKAPNSKQPAWEIRLKIKIEQNRKEIGILTQYITNASHSDRVARRANIVIGKHKSDTNKTPEEILDYLKQRLQVYANRLRRYHEAYRRRRDNRLFQTNQKAFYRDIQNPQNSTQNNVTPDSTATQKFWSDIWEKPVTHKRNATWIKLERKKTDRIPVMPSPDIETDDLMQVLSGTQNWKAAGPDKIQNYWYKKFTCIHDKLAEMFNNILEQPDTMPGFLTQGNTYLLPKTTPSVANPSKYRPITCLPTMYKLLTGILANKIYNHMTAQNLLAEEQKGCRRRAMGCKDQLIFDSIITEDAKKNKKDLHTAFIDYQKAFDSVPHSWLLECLSIYKIHPQIIKFLETAMSKWETNIVVRDHTITEIKIKVQRGIFQGDALSALWFCIALNPLSTALNNRESAYQLPAAQESISHLMYMDDIKIFSGTPAGLKRLLRTTEEFSSDIRMNFGLEKCKTNHLLKGKWSQAEDYTLLHKTGSGTISAMNRHESYKYLGVMQSQGINNAEMKQELTQKLKSRLNNILKSQLSGSNKVKATNAFVIPVVTYSFGILKWTPTELNELNRIIRVGYTKHRAHHPKACKERFHLSRHIGGRGIVDLRIRHKDQINHLRSYFYRRALTSVIYDTIANLDRNLTPLNLKNKNLKIDEEYSAATLIDRWHEKELHGRYPNFLNQNHINTQASVAWLTQGTLFAETEGFMCAIQDQVICTRSYLKYIIKDQTVTSSKCRMCGEGNENIEHIISSCKTLAPKEYTNRHNDVAKILHAEISLKYGCTEENPPYYKYTATPVLENNECKIYWDRDVLTDRTILHNRPDICVLDKKENTMLLIDIAIPAPSNVHKKHSEKIEKYLPLAQEIKEVWRVRDVRIIPIVIGSTGEIPTQLLDNLKILGLPGKIYVQMQKAVILATCNIMRKVLNIK

SEQ ID NO: 18093 - protein, 756 aa, Pissodes strobi
MPSPDIETDDLMQVLSGTQNWKAAGPDKIQNYWYKKFTCIHDKLAEMFNNILEQPDTMPGFLSQGNTYLLPKTTPSVANPSKYRPITCLPTMYKLLTGILANKIYNHMTAQSLLAEEQKGCRRRAMGCKDQLIFDSIITEDAKKNKKDLHTAFIDYQKAFDSVPHSWLLECLSIYKIHPQIIKFLETAMSKWETNIVVRDHTITEIKIKVQRGIFQGDALSALWFCIALNPLSTALNNRESAYQLPAAQESISHLMYMDDIKIFSGTPAGLKRLLRTTEEFSSDIRMNFGLEKCKTNHLLKGKWSQAEDYTRLHKTGSGTISAMNRHESYKYLGVMQSQGINNAEMKQELTQKLKSRLNNILKSQLSGSNKVKATNAFVIPVVTYSFGILKWTPTELNELNRIIRVGYTKHRAHHPKACKERFHLSRHIGGRGIVDLRIRHKDQINHLRSYFYRRALTSVIYDTIANLDRNLTPLNLKNKNLKIDEEYSATTLIDRWHEKELHGRYPNFLNQNHINMQASVAWLTQGTLFAETEGFMCAIQDQVICTRSYLKYIIKDQTVTSSKCRMFGEGNENIEHIISSCKTLAPKEYTNRHNDVAKILHAEISLKYGCTEENPPYYKYTATPVLENNECKIYWDRDVLTDRTILHNRPDICVLDKKENTMLLIDIAIPVPSNVHKKHSEKIEKYLPLAQEIKEVWRVRDVRIIPIVIGSTGEIPTQLLDNLKILGLPGKIYVQMQKAVILATCNIMRKVLNIK

SEQ ID NO: 18094 - protein, 1149 aa, Pissodes strobi
MKTTRAKTRNRQINNPDPQSIPTSSDVDEHEAIPIPEACNTGKKTRFKWSEEMNTHLYRAYLHITRMETDTNPYGQRLHDEMIRRFAELQGKTLQNILDQRRQLFIKHRLNPNLIKEIRREVAADLGMLADEPEAEVQEVHQPQEEPHIIIDENFRTTYNALQKNITLYEGLDPHKRPKIPKLRSTSKTKEIINNVNKALKLKIQNVNNIITLHDYIYAAAITALELHHQKPINTKEKAPNSKQPAWEIRLKIKIEQNRKEIGILMQYITNASHSDRVARRANIVIGKHKSDTNKTPEEILDYLKQRLQVYANRLRRYHEAYRRRRDNRLFQTNQKAFYRDIQNPQNSTQNNVTPDSTATQKFWSDIWEKPVTHKRNATWIKLERKKTDRIPVMPSPDIETDDLMQVLSGTQNWKAAGPDKIQNYWYKKFKCIHDKLAEMFNNILEQPDTMPGFLTQGNTYLLPKTTPSVANPSKYRPITCLPTMYKLLTGILANKIYNHMTAQNLLAEEQKGCRRRAMGCKDQLIFDSIITEDAKKNKKDLHTAFIDYQKAFDSVPHSWLLECLSIYKIHPQIIKFLETAMSKWETNIVVRDHTITEIKIKVQRGIFQGDALSALWFCIALNPLSTALNNRESAYQLPAAQESISHLMYMDDIKIFSGTPAGLKRLLRTTEEFSSDIRMNFGLEKCKTNHLLKGKWSQAEDYTLLHKTGSGTISAMNRHESYKYLGVMQSQGINNAEMKQELTQKLKSRLNNILKSQLSGSNKVKATNAFVIPVVTYSFGILKWTPTELNELNRIIRVGYTKHRAHHPKACKERFHLSRHVGGRGIVDLRIRHKDQINHLRSYFCRRALTSVIYDTIANLDKNLTPLNLKNKNLKIDEEYSATTLIDRWHEKELHGRYPNFLNQNHINTQASVAWLTQGTLFAETEGFMCAIQDQVICTRSYLKYIIKDQTVTSSKCRMCGEGNENIEHIISSCKTLAPKEYINRHNDVAKILHAEISLKYGCTEENPPYYKYTATPVLENNECKIYWDRDVLTDRTILHNRPDICVLDKKENTMLLIDIAIPAPSNVHKKHSEKIEKYLPLAQEIKEVWRVRDVRIIPIVIGSTGEIPTQLLDNLKILGLPGKIYVQMQKAVILATCNIMRKVLNIK

SEQ ID NO: 18095 - protein, 1107 aa, Pissodes strobi
MADLEQYFLPYPLQAVFNCPFCEVVPPRVYRNHNDLNKHTKTYHQKRLAFACALCGAEIGTIKQVKAHQTTEHEGVVPPPPPLPPPPRDRLLRRRNQPAQQNINAVVDADPPPPVRPDLPAAGVDVIPPPVPDPADRATGSPLAAPEPLLPEPRMGDPPPSPMAPRPTNQPPRRVGVPTADQLRWIRWIEGVQDFDDMETAYNRILEEMKAKINPTELPAVRPVNHPRPPPRPNNVPNRYNPQDAARIQKLYRANKSKAYRSVASPEGETFCEIQEDRLHEYFARTHGYRAPGGPPHDVQLPHAPNGHVLVVPFQPQELQTRLGRTSNTAPGRDSIKYYQLKKIDPGCRLLCALFNKILEMRRVPSAWKEAVMVLVYKKGDRDDPGNWRPISLCSCLYKLFTSCLAHRLSSWSMEHGLVSPVQKGFGQYEGCLEHNFVLQSLLDATRRKNRALAVAWLDLANAFGSVPHGHIFQTLSRMGADPAFVDVFRDIYDGCTATVRTATGETESFAIQAGVRQGCPLSPIVFNLALEPVIRAAIGTGRGCNVEGRVVPLLAFADDLVLLANEPRDLQQLLDSVGDIAARCGLTFKPQKCASLHLDCRRRHQCLGTVFSVQGSQFSALAEGDAYDHLGVPTGYHANQSPEVAVARMMAELESVDGSLLAPWQKIDAVSTFILPQLSFLLRGSHIQKNAVKPLDNLIKKACKNWLHLPQRASPELVYLHGKKGGAGLLPLADLADISTVVQAFRMITCPENLARSVAESQLCEVANRRIGRPPSKQDLARYLSGDLSEEFGRDGGDIASLWSRTRNATRRLHRRFHVQWVVEEGVLCVKVGSPTHTEIITPAGRSKLEGALKNGLRSLYGSQLIRKADQGKVFRVSSTSAASNHFLRDGFATRFCDWRFIHRARLNCVPLNGARRWGDGDKRCRRCGAQDETLPHVLNHCRMHSAAWQRRHNAVQDRLVKAIPPRVGDVRINRIVPETTSTLRPDIVIRNGNSVVMVDVCIPFENGLEAFQRARQIKIEKYLPIAAELEAQGMQVAIHAFIVGALGSWDQCNEAALRACGVSMRYASLMRKLMCSDAIKWSRDIYVEHVTGIRQYHVPAPEAEL

SEQ ID NO: 18096 - protein, 1095 aa, Pissodes strobi
MADLEQYFLPYPLQAVFNCPFCEVVPPRVYRNHNDLNKHTKTYHQKRLAFACALCGAEIGTIKQVKAHQTTEHEGVVPPPPPPPPRDRLLRRRNQPAQQNVNAVVDADPPPPVRPDLPAAGVDVIPPPVPDPAPEPLLPEPRMGDPPPSPMAPRPTNQPPRRVGVPTADQLRWIRWIEGVQDFDDMETAYNRILEEMKAKINPTELPAVRPVNHPRPPPRPNNVPNRYNPQDAARIQKLYRANKSKAYRSVASPGGETFCEIQEDRLHEYFARTHGYRAPGGPPHDVQLPHAPNGHVLVVPFQPQELQTRLSRTSNTAPGRDGIKYYQLKKIDPGCRLLCALFNKILEMRRVPSAWKEAVMVLVFKKGDRDDPGNWRPISLCSCLYKLFTSCLAHRLSSWSMEHGLVSPVQKGFGQYEGCLEHNFVLQSLLDATRRKNRALAVAWLDLANAFGSVPHGHIFQTLSRMGVDPAFVDVFRDIYDGCTATVRTATGETESFAIQAGVRQGCPLSPIVFNLALEPVIRAAIGTDRGCNVEGRVVPLLAFADDLVLLANEPRDLQQLLDSVGDIAARCGLTFKPQKCASLHLDCRRRHQCLGTVFSVQGSQFSALAEGDAYDHLGVPTGYHANQSPDVAVARMMAELESVDGSLLAPWQKIDAVSTFILPQLSFLLRGSHIQKNAVKPLDNLIKKACKNWLHLPQRASPELVYLHGRKGGAGLLPLADLADISTVVQAFRMITCPENLARSVAESQLCEVANRRIGRPPSRQDLARYLSGDLSEEFGRDGGDIASLWSRTRNATRRLHRRFHVQWVVEEGVLCVRVGSPTHAETITPAGRSKLEGALKNGLRSLYGSQLIRKADQGKVFRVSSTSAASNHFLRDGFATRFCDWRFIHRARLNCVPLNGARRWGDGDKRCRRCGAQDETLPHVLNHCRMHSAAWQRRHNAVQDRLVKAIPPRVGDVRVNRTVPETTSTLRPDIVIRNDNSVVMVDVCIPFENGLEAFQRARQIKIEKYLPIAAELEAQGMQVAIHAFIVGALGSWDQCNEAALRACGVSMRYASLMRRLMCSDAIKWSRDIYVEHVTGIRQYHVPAPEAEL

SEQ ID NO: 18097 - protein, 988 aa, Aelia acuminata
MAEALSLACRFCSRTFTSVRGLGQHCKRAHPVERNALIEVPSVKRRWDEEELALLAAEELKLRAAGVTVGLDRLLCEASSGRTFDAVKGARSRLAYRQLLERLSTSNGDPPPSVVPVADSSDPRTENEVILASLRSHCEKILSSPTTLCTDRLLDVVGDALAGRSVGGRLEGWVNTHLASGAPSDPPADPSASASFPLSGPRQRGDGWRRKRYARLQRLWYRDRPAAARLVLDPVSDTSRASVEDLYSYWAPILETPSSEWNADRVFGSPALCGSDVWRPVSESEAKSLCPARGSAAGLDRVEPSVWRALPWRVRAVILDLLLLEGHVPYSLLKARVTMIPKVADPSGPGDYRPISVSSVIVRHLHRILASRLESGVEHAFGQNGFRKGFDGVAANVFMLDSVLRCAWKKSRSLCMAILDVRKAFDSVSHVAILRILRERGFPARFCSYIDHVYSNGASYILSGGVVSGAIRPGRGVRQGDPLSSLLFNLVMDHVIGGLSPLLGFPMSAARSRIRALAYADDLILFASTSAGLQTLIDSVVMRFGECGLSINPDKSCSLTLTAAAGRKLVRLDPGRLYRVGSLEMRALAVEDTFEYLGVKFCPSGLVRDSVDLDAGLERISRAPLKPQQRLELLRTFFLPRFFHRLTFGVTSKIALAALDVRVRSYVRRWLRLPHDCLSSFIHAPVRSGGLGVPRLVRFVPYMKQKRFHVLDDELENMGLDDFLRDLLSDIPSGVLPPKPSFFESSTLISHHDGRDLAFAGEVPASTAWASRASSSISGREWTQFVRLRAGVLPTAVRLSRGRREDGLPLCRAGCGVPESAAHVVNHCVLTKEVTILRHHAVVKLLQSSLRRAGMRILREPTLRTVSGVFRPDLVSEFGNELYILDVTIVSGGSPFANAAIAKKRRYGRKDVFTAAATALGVRPSRSQVVPVILNYKGVWCPKSAGKLMKMGVSRSALSWITVRVIRGSCMNFNTWRRSVAQNPVYTA

SEQ ID NO: 18098 - protein, 989 aa, Aelia acuminata
MAESISLACRFCSRTFTSVRGLGQHCKRAHPVERNAMIEVPSVKRRWDEEELALLAAEELKLRAAGVTVGLDRLLCEASSGRTFDAVKGARSRPAYRQLLERLSISNGDAPSSVVPCSDSGDPQIENEAIFASLRSHCEELGAGSTTLCMDRLLEVVRGALAGNSVGDPLARWVSTHLATGDPSDRPVAESPSSSIPVSCPGRRGDGRRRSRYARLQRLWNRDRPAAARLVLDPASDICRASVEDLHSYWAPILEAPSSAWSAVRVFGSPILSGSGVWCPVSESEAKSLCPARRSAPGLDRVEPSVWRALPWRVRAVILDLLLLEGRVPSCLLRARVTMIPKVADPSGPGDYRPISVSSVIVRHLHRILASRLERIVEHVSGQNGFRRGFDGVAANVFMLDSVLRYAWKKSGSLCMAVLDVRKAFDSVSHEAILRILRERGFPARVCSYIDHVYSNGASHICYDGVVSEVIRPGRGVRQGDPLSSLLFNLVMDHVIGGLSPLFGFSVSAARSRIRALAYADDLVLLASTSAGLQALVDSVVMRLGECGLSVNPDKSCSLTLTAAAGRKQVKLDPDRTYLVGGLVMRALSMGDEFEYLGVRFCPSGLVRDSVDLEIGLERITRAPLKPQQRLEMLKTFFLPKFYHRLTFGVTSKIALAALDVSIRSCVRRWIRLPHDCLNSFIHAPVRSGGLGVPRLVRFVPYMRRKRFAKLDDELEDLGLDDILRELLSEVPSSDVPPKPSLLDSESLCAHNDGKYLACAADVPASTAWISSPTSSISGREWTQFVRLRAGVLPTAVRLSRGRRCDGLPQCRAGCAVPESAAHVINHCPLVKKAVILRHHAVVRLLLASLRRVGFKTLHEPTLRTVSGIYRPDLVSASNTKMWLLDVTIVSGCGPFLPAAVAKKRRYGREEVFRAAAAALGVVPVNSAVVPVIMNYKGVWCPKSAKALLDIGISRRALSWMTTRVMRGSCMNFTTWRKRCQGSGNADAV

SEQ ID NO: 18099 - protein, 990 aa, Aelia acuminata
MAEPLSLVCRFCGRTFSSVRGLGQHHKRAHPVERNALVDVSLVKRRWDDEELALLAAEELKLRAAGVTEGLDRLLCETCPGRTFDAVKGARSRLAYRQLLERLSASDGDSPSPVPADVDHGDPQSENGAILASLRVHCESILSGPTTLCMDRLLDLVGDALAGRSVGDRLAGWVSTHLASGTPSRRPTDSSLSLSLSLSSPGQRGDGRRRNKYAELQRLWNRDRTGAARLVLDPVSGSCRASVEDLYSYWAPILEAPSAAWNADRVFGSLVPGGVDVWCPVSESEAKSLCPARRSAPGLDRVEPSVWRGLPWRVRAVILNLLLLEGRVPSSLLRARVTMIPKVSDPCGPSDYRPISVSSVIVRHLHRILASRLESIVEHVPGQNGFKKGFDGVAANVFMLDSVLRYAWKKSRSLCMAVLDVRKAFDGVSHSAILRILRERGFPARLCTDHIYSDGVSHIYQNGILSDVIRPARGVRQGDPLSSLLFNLVMDHVIGGLSPMLGFPISSASSKIRALAYADDLVLLASTSAGLQVLVDSAVTRLGECGLSINPDKPCSLTLTAAAARKLVRLDPDRAYCVGGSMMRTLSVEDSFEYLGVRFCPSGLVRDSVDLGVGLERISRAPLKPQQKLELLRTFYLPKFYHRLTFGVASKIALAALDVQVRSCVRRWIGLPHDSLNSFIHAPIKSGGLGLPRLVRFVPYLKHKRFAALDDDLENMGLDDIVRELLPDIPSGGVPPKPSFLEASSMCSHHDGRDLACSMDTPASSAWVSRTSSSITGRDWRQFVRLRAGALPTAVRLSRGRRDALPPCRAGCGVPESAAHVINHCHLVRDVAILRHHAVVRLLLASLQRVGMRCLREPTLETQVGTFRPDLVVFSGEKLLVIDVTIVSGDGAFAAATAAKKRRYGRSAVYRAAARTLGVQPRSCRVIPVVLNYKGVWCPKSLGALRDIGVTSKALGWITVRVLRGSSMNFTTWQRAVTSGGLAAMVNCAS

SEQ ID NO: 18100 - protein, 994 aa, Aelia acuminata
MAESLGYDCRFCPLSFASARGLGQHIKRAHPVERNDWIEVPSTKRRWNEEEIALLAAEELKLRAAGLCEDLNRRLCEAFPGRTFDAIKCIRARPRYRQYLVELSASTIEVPSPVVSGVFTTDDAVQREGFFAELRQLRDAILANPTTLCVDRLLGVVDEALSGRPVGALLARWISVHLASGAPPVRPDNPVAHSNAFLAGERRRGDGSRRRKYGELQRLWSRDRPAAARLVLDPGSHFCGNSVEDLFSYWAPILEAPSSEWNHGKVFGPPVSFDFDVWCPVSKLESVSLCPAGRSAAGLDRVEPSLWRALPWRVRAVILDLLLLEGRVPVELLRARVTMVPKVADPSGPGDYRPISVSSVIVRHLHRILAARLESSVVHVPEQNGFRKGFDGVAANVFMLDSVLRCAWKKRRSLCAAVLDVRKAFDSVSHAAVLSILRERGFPVRLCRYIEYIYGNGVSHICSNGVVSGEIRPARGVRQGDPLSSMLFNLVMDHVIDGLSPVLGFPLSTSRPRIRALAYADDLILFASTPEGLQILIDSVVSRLGECGLSVNPEKSASLALTAAGGRKLVKLDIERHFHVGDEMIRTLAMMDTFEYLGVTFSPIGLARDSIDLDPGLERITRAPLKPYQKLELLRTFFLPRFYHRLTFCETRKVVLSALDVAIRSRIRRWLGLPHDCLNAFIHSPIRHGGLGVPRLSRFVPYMRARRFGTVDDELEGLGLDDSLRDVLFDFPTGHLPLHPSYTESASLVGHSDGKDLALACEVPASTAWVSRAASSISSRDWRQFVALRASALPTAVRLSRRRRDVLPQCRAGCGVPESAAHVINHCPLVKGVIILRHHAVVRLLLASLRRAKFKCLHEPALRTPTGLFRPDVVASSGEELLILDVTVVSGDGAFSSATTAKKRRYGRDSVFRAAASALGVQPRSCRVIPVVLNYKGVWCPKSADALINIGVTSRALGWMTVRVLRGSSMNFTAWQRSASLGGLRRTIGGGPIL

SEQ ID NO: 18101 - protein, 989 aa, Aelia acuminata
MAESLGYDCRFCPLSFASARGLGQHIKRAHPVERNDWIEVPSIKRRWNEEEIALLAAEELKLRAAGLCENLNRRLCEAFPGRTFDAIKCIRTRPIYRQYLVELSASTAEVPSPVVSGVFDADSAVQREDFFSELRQLRDAILANPTTLCVDRLLGVVDEALSGRPVGALLARWISVHLASGAPSDRPDNPVTHGNAFLAGERRRGDGSRRRKYGELQRLWNRDRPAAARLVLDPGSHFCGNSVEDLFSYWAPILEAPSSEWNHGKVFGPPVSFDLYVWCPVSKLESVSLCPAGRSAAGLDRVEPSLWRALPWRVRAVILDLLLLEGRVPVELLRARVTMVPKVANPSGPGDFRPISVSSVIVRHLHRILAARLESSVVHVPEQNGFKKGFDGVAANVFMLDSVLRYAWKKRSLCAAVLDVRKAFDSVSHAAVLGILRERGFPAQLCQYIEYIYGNGVSHICSNGAVSGEIRPACGVRQGDPLSSMLFNLVMDHVIGGLSPVLGFPLSTSRPRIRALAYADDLVLFASTPEGLQVLIDSVVRRLGECGLSVNPEKSASLALTAAGGRKLVKLDVDRHFHVGDEMIRMLSMMDTFEFLGVTFSPVGLARDNIDLEPGLERITRAPLKPYQKLELLRTFFLPRFYHRLTFCETRKVVLSALDVVIRSRIRRWMGLPHDCLNAFVHTPIRHGGLGVPRLSKFVPYMREKRFGTVDDELEGLGLDDSLRDVLFDFPSGILPQHPSYTELLYLVGHSDGKDLALAHGVPASTAWIARTACSISGRDWTQFVRMRANALPTAVRLTRGRREALPHCRAGCGVPESAAHVVNHCPLIRRATILRHHAVVELLLASLRKAGLSCLHEPTLRTPTGLYRPDVVASSGEELFILDVTVVSGDGAFEKATAAKRRRYGRGDVFRAAAEVLGVRPRHSMVIPVVLNYKGVWCPKSADALIKLGISSKALGWITIRVLRGSCMNFTAWQSAVASLGERWRLGG

SEQ ID NO: 18102 - protein, 986 aa, Aelia acuminata
MAESLSHCCRCCQRSFSSARGLGQHMRCAHPVERNEWIEVPSTKRRWNEEEIALLAAEELKLRAAGLCENLNRRLCEAFPGRTFDSVKCIRARPLYRQYLVELSPSTSVIPSPVVVDPLDTNSVSQHEDFLSELRSLREAILSNPTTLCVDRLLVILDEALSGRSVGALVAHWTSVHLASGVPPVRTDNPMAHSNPFLAGERKRGDGSRRRKFGMLQRLWSRDRPAAARLVLDPGSHSCGHSVEDLFSYWAPILEAPSSEWRAEKVFGPPVSFGLNVWCPVSKQESISLCPAGRSAAGLDRVEPSVWRSLPWRVRAVILDLLLLEGRLPTDLLRARVTMVPKVADPSGPRDFRPISVASVIVRHLHRILAARLESSVVHVPEQNGFRRGFDGVAANVFMLDSVLRCAWKKKRSLCAAVLDVRKAFDSVSHAAVLHILRERGFPVQLCNYIEHVYGSGVSHICSNGEISGEIRPARGVRQGDPLSSMLFNLVMDHVIGGLSPVLGFPLSTSRPRVRALAYADDLVLFASTPEGLQVLIDSVVKRLGECGLSVNPEKSSSLALAAAAGRKLVKLDVERHFHVGDENIRTLSPLDTFEYLGVLFSPSGLVRDNVDLGEGLERITRAPLKPYQRLEMLKTFYLPRFYHRLTFGVTRQVILSALDVSIRSYIRRWLGLPHDCLNAFIHSPVRHGGLGVPRLSKVVPFMREKRFLAVDDELEGLGLDDSLRDILFEFPTGVLPQHPSYTESSRLIVHADGRDLALARDVPSSTAWVSRAASSIGARDWKQFIKLRAGALPTAVRLSRGRRDALPHCRAGCEVPESAAHVINHCPLIRNTVILRHHAVVRLLLASLRRTGMRCLHEPTLRTPTGLFRPDVVASSGDELLIMDVTVVSGDGAFDTASLAKKRRYGRDSVFRAAAAVLGVRPRRCVVIPVMLNYKGVWCPKSAGALTKLGISSRALGWMAVRVLRGSCMNFTAWQRATSSLVARW

SEQ ID NO: 18103 - protein, 994 aa, Aelia acuminata
MAESLSYCCRFCPRSFTSGRGLGQHMKRAHPVERNEWIEVPSVKRRWNEEEISLLAAEELKLRAAGLCENLNRRLCEAFPGRTFDSIKCIRARPNYRQLLAEMSAPAAGVPSPDATDLFGTDDVVNSEDILSELRSLREALLSSPTTLCIDRLLAVLDEALSGRPVGALLARWISIHLASGTTAGRSDNPEMHGNPFLAGERKRGDGSRRRRYGILQRLWNRDRPASAGLVLDPGSHSRGLSVEDLSSYWAPILETPSSEWSAGKVFGPPVSFGFDVWCPVSKLESISLCPAGRSAAGLDRVEPSLWRALPWRVRAVILDLLLLEGRVPTDLLRARVTMVPKVADPSGPSDFRPISVSSVIVRHLHRILAARLESTVVHVPEQNGFKGGFDGVAANVFMLDSVLRCAWKKRRSLCAAVLDVRKAFDSVSHAAVLHVLRERGFPARLCQYIEHVYRNGVSHICSNGVVSGEIRPARGVRQGDPLSSMLFNLVMDHVIGGLSPVLGFPLSTSRPRIRALAYADDLVLFASTPEGLQVLIDSVVKRLGECGLSINPDKSSSLALTAAAGRKLVKLDVDCHFHVGNEMIRTLSILDTFEYLGVTFSPSGLVRDVVDLDAGLERITRAPLKPYQRLELLRTFYLPRFYHRLTFGETRQVVLSALDVTIRSYIRRWMGLPHDCLNAFIHSSIRHGGLGVPRLSKFVPYMREKRFGTVDDELEGLGLDDSLRDVLFDFPLGLLPQHPSYTESSSLVAHPDGRDLAMARDVPASTAWISRAASSISGKDWRNFVRLRAGALPTAVRLSRGRRDILPQCRAGCEVPESAAHTINHCPLVKNAVILRHHAVVRLLVASLRRANTKCLQEPTLRTPTGLFRPDVVAFSHEELLVLDVTVVSGDGAFNSAAAAKRRRYGRDSVFAAAASALGVKPRRCRVFPVVINFKGVWCPKSADALIRLGVSSRALGWMTVRVLRGSSMNFTAWQRAASAGVRTQTDRAGPGG

SEQ ID NO: 18104 - protein, 990 aa, Aelia acuminata
MAESLGYDCRFCPLSFASARGLGQHIKRAHPVERNDWIEVPSVKRRWNEEEIALLAAEELKLRAAGLCENLNRRLCEAFPGRTFDAIKCIRTRPIYRQYLVELSASTAEVPSPVVSGVFDADSAVQREGFFSELRQLRDAILANPTTLCVDRLLGVVDEALSGRPVGALLARWISVHLASGAPSDRPDNPITHGNAFLAGERRRGDGSRRRKYGELQRLWNRDRPTAARLVLDPGSHFCGNSVEDLFSYWAPILEAPSSEWNHGKVFGPPVSFDFDVWCPVSKLESVSLCPAGRSAAGLDRVEPSLWRALPWRVRAVILDLLLLEARVPLELLRARVTMVPKVADPSGPGDFRPISVSSVIVRHLHRILAARLESSVVHVPEQNGFKKGFDGVAANVFMLDSVLRCAWKKRRSLCAAVLDVRKAFDSVSHAAVLGILRERGFPAQLCQYIEYIYGNGVSHICSNGAVSGEIRPARGVRQGDPLSSMLFNLVMDHVIGGLSPVLGFPLSASRPRIRALAYADDLVLFASTPEGLQVLIDSVVRRLGECGLSVNPEKSASLALTAAGGRKLVKLDVDRHFHVGDEIIRMLSMMDTFEYLGVTFSPVGLARDNIDLEPGLERITRAPLKPYQKLELLRTFFLPRFYHRLTFCETRKVVLSALDVVIRSRIRRWMGLPHDCLNAFIHTPIRHGGLGVPRLSKFVPYMREKRFGTVDDELEGLGLDDSLRDVLFDFPSGILPQHPSYTESLHLVGHSDGKDLALAHGVPASTAWIARTACSISGRDWTQFVRMRANALPTAVRLTRGRREALPRCRAGCGVPESAAHVVNHCPLIKRATILRHHAVVELLLASLRKAGLSCLHEPTLRTPTGLFRPDVVASSGEELIILDVTVVSGDGAFEKATAAKKRRYGRGDVFRAAAEVLGVRPRHSMVIPVVLNYKGVWCPKSADALIKLGISSKALGWIAIRVLRGSCMNFTAWQSAVASLGERWRLGG

SEQ ID NO: 18105 - protein, 990 aa, Aelia acuminata
MAESLGYDCRFCPLSFASARGLGQHIKRAHPVERNDWIEVPSVKRRWNEEEIALLAAEELKLRAAGLCENLNRRLCEAFPGRTFDAIKCIRTRPIYRQYLAELSASTAEVPSPVVSGVFDADSAVQREGFFSELRQLRDAILANPTTLCVDRLLGVVDEALSGRPVGALLARWISVHLASGAPSDRPDNPVTHGNAFLAGERRRGDGSRRRKYGELQRLWNRDRPTAARLVLDPGSHFCGNSVEDLFSYWAPILEAPSSEWNHGKVFGPPVSFDFDVWCPVSRLESVSLCPAGRSAAGLDRVEPSLWRALPWRVRAVILDLLLLEARVPLELLRARVTMVPKVADPSGPGDFRPISVSSVIVRHLHRILAARLESSVVHVPEQNGFKKGFDGVAANVFMLDSVLRCAWKKRRSLCAAVLDVRKAFDSVSHAAVLGILRERGFPAQLCQYIEYIYGNGVSHICSNGAVSGEIRPARGVRQGDPLSSMLFNLVMDHVIGGLSPVLGFPLSASRPRIRALAYADDLVLFASTPEGLQVLIDSVVRRLGECGLSVNPEKSASLALTAAGGRKLVKLDVDRHFHVGDEIIRMLSMMDTFEYLGVTFSPVGLARDNIDLEPGLERITRAPLKPYQRLELLRTFFLPRFYHRLTFCETRKVVLSALDVVIRSRIRRWMGLPHDCLNAFIHTPIRHGGLGVPRLSKFVPYMREKRFGTVDDELEGLGLDDSLRDVLFDFPSGILPQHPSYTESLHLVGHSDGKDLALAHGVPASTAWIARTACSISGRDWTQFVRMRANALPTAVRLTRGRREALPRCRAGCGVPESAAHVVNHCPLIKRATILRHHAVVELLLASLRKAGLSCLHEPTLRTPTGLFRPDVVASSGEELIILDVTVVSGDGAFEKATAAKKRRYGRGDVFRAAAEVLGVRPRHSMVIPVVLNYKGVWCPKSADALIKLGISSKALGWIAIRVLRGSCMNFTAWQSAVASLGERWRLGG

SEQ ID NO: 18106 - protein, 986 aa, Aelia acuminata
MAESLSHCCRCCQRSFSSARGLGQHMRCAHPVERNEWIEVPSTKRRWNEEEIALLAAEELKLRAAGLCENLNRRLCEAFPGRTFDSVKCIRARPLYRQYLVELSPSTGVIPSPVVVDPLDTNSVSQHEDLLSELRSLREAILSNPTTLCVDRLLVILDEALSGRSVGALVAHWTSVHLASGVPPVRTDNPMAHSNPFLAGERKRGDGSRRRKFGVLQRLWSRDRPAAARLVLDPGSHSCGHSVEDLFSYWAPILEAPSSEWRAEKVFGPPVSFGLNVWCPVSKQESISLCPAGRSAAGLDRVEPSVWRSLPWRVRAVILDLLLLEGRVPTDLLRARVTMVPKVADPSSPSDFRPISVASVIVRHLHRILAARLESSVVHVPEQNGFRRGFDGVAANVFMLDSVLRCAWKKKRSLCAAVLDVRKAFDGVSHAAVLHILRERGFPVQLCNYIEHVYGNGVSHICSNGEISGEIRPARGVRQGDPLSSMLFNLVMDHVIGGLSPVLGFPLSTSRPRVRALAYADDLVLFASTPEGLQVLIDSVVKRLGECGLSVNPEKSSSLALTAAAGRKLVKLDVERHFHVGDENIRTLSPLDTFEYLGVLFSPSGLVRDNVDLGEGLERITRAPLKPYQRLEMLKTFYLPRFYHRLTFGVTRQVILSALDVSIRSYIRRWLGLPHDCLNAFIHSPVRHGGLGVPRLSRVVPYMREKRFLAVDDELEGLGLDDSLRDILFEFPTGVLPQHPSYTESSRLIVHADGKDLALARDVPSSTAWVSRAASSIGARDWKQFIKLRAGALPTAVRLSRGRRDALPHCRAGCEVPESAAHVINHCPLIRNAVILRHHAVVRLLLASLRRAGVTCLHEPTLRTPTGLFRPDVVAYSGDELLIMDVTVVSGDGAFDTASLAKKRRYGRDSVFRAAAAVLGVQPRRCLVIPVMLNYKGVWCPKSAGALVKLGISSRALGWMAVRVLRGSCMNFTAWQRATSSLVARR

SEQ ID NO: 18107 - protein, 1002 aa, Aelia acuminata
MFSRWRSIGLITMAESPSFACRFCGRSFSSVRGLGQHLKRAHPAERNAMIEVPSIKRRWDDEELALLAAEELKLRAAGYNEGLDRLLCETFPGRTLDAVKGARSRLAYRQLFERLAASNGDTPSPIVPCLDTGDPQFENETFFASLRDHREEFLKSPTTLCMDRLLELVEDALAGRPVGDRLAGWVSTHLAAGPPSGRPVGAPSSSSCFVFGPRQRGDGSRRNKYALLQRLWSRDRPAAARLVLDPASDTCRASVEDLHSYWAPILEAPSAAWNAEKVFGSPFCSGVEIWRPVSESESKSLCPARGSAPGLDRVEPSVWRSLPWRVRAVILDLLLLEGRVPSGLLRARVTMIPKVVDPCGPGDYRPISVASVIVRHLHRVLASRLESTVEHVSVQNGFKRGFDGVAANVFMLDSVLRYAWKKSRSLCMAVLDVRKAFDSVSHEAILRILRERGFPARLCSYIDHVYRSGTAQICSNGVVSGVIRPGRGVRQGDPLSSLLFNIVMDHVIGGLSPLLGFPMSAARSGIRALAYADDLVLLASTSAGLQVLIDTVVERLGECGLSVNPDKSCSLTLTAVGGRKLVKLDPGRTYLVGDLVMRALSIEDGFEYLGVKFCPSGLVRDTVDIRDGLERISRAPLKPQQKLEMVKTFYLPRFYHRLTFGVTSKIALAALDVLIRSYVRRWNRLPHDSLNSFIHASVRSGGLGVPRLLRFIPYMRAKRFAALDDYLENMGLDDLLKELLFDFQTSDVPPIPSSLDSASLCLQHDGRDLACAVEVPASTAWVSRSSSSISGRDWMQFVRLRAGALPTAVRLSRGRRDSLPHCRAGCRVPESAAHVVNHCPLIRNVTILRHHAIVDLLLASLRRAGMKCLREPTLRTPGGLLRPDLVASSGDELFILDVTVVSGDGAFMPASVAKKRRYGRGSVFRAAAQALGVRPTRSKVIPVVINYKGIWCPKSAGALQELGVTSKALGWMAVRVLRGSSMNFTTWQRVAALHGMAVTLSG

SEQ ID NO: 18108 - protein, 990 aa, Aelia acuminata
MAESLSYCCRFCPRSFTSGRGLGQHIKRAHPVERNEWIEVPSVKRRWNEEEISLLAAEELKLRAAGLCENLNRRLCEAFPGRTFDSIKCIRARPNYRQLLAEMSAPAAGVPSPDATGLFGAYDVVNSEDILSELRSLREALLSSPTTLCIDRLLAVVDEALSGRPVGALLARWISVHLASGAPSDRPDNPVTHGNAFQAGERRRGDGSRRRKYGELQRLWNRDRPAAARLVLDPGSHFCGNSVEDLFSYWAPILEAPSSEWNHGKVFGPPVSFDFDVWCPVSKLESVSLCPAGRSAAGLDRVEPSLWRALPWRVRAVILDLLLLEGRVPVELLRARVTMVPKVADPSGPGDFRPISVSSVIVRHLHRILAARLESSVVHVPEQNGFKKGFDGVAANVFMLDSVLRCAWKKRRSLCAAVLDVRKAFDSVSHAAVLGILRERGFPAQLCQYIEYIYGNGVSHICSNGAVSGEIRPARGVRQGDPLSSMLFNLVMDHVIGGLSPVLGFPLSASRSRIRALAYADDLVLFASTPEGLQVLIDSVVRRLGECGLSVNPEKSASLALTAAGGRKLVKLDVDRHFHVGDEMIRMLSMMDTFEYLGVTFSPVGLARDNIDLEPGLERITRAPLKPYQKLELLRTFFLPRFYHRLTFCETRKVVLSALDVVIRSRIRRWMGLPHDCLNAFVHTPIRHGGLGVPRLSKFVPYMREKRFGTVDDELEGLGLDDSLRDVLFDFPSGILPQHPSYTESLYLVGHSDGKDLALAHGVPASTAWIAKAACSISGRDWTQFVRMRANALPTAVRLTRGRREALPHCRAGCGVPESAAHVVNHCPLIKRATILRHHAVVELLLASLRKAGLSCLHEPTLRTPTGLYRPDVVASSGEELFILDVTVVSGDGAFEKAKAAKRRRYGRGDVFRAAAEVLGVRPRRSMVIPVVLNYKGVWCPKSADALIKLGISSKALGWITIRVLRGSCMNFTAWQSAVASLGERWRLGG

SEQ ID NO: 18109 - protein, 990 aa, Aelia acuminata
MAESLGYDCRFCPLSFASARGLGQHIKRAHPVERNDWIEVPSVKRRWNEEEIALLAAEELKLRAAGLCENLNRRLCEAFPGRTFDAIKCIRTRPIYRQYLVELSASTAEVPSPVVSGVFDADSAVQREGFFSELRQLRDAILANPTTLCVDRLLGVVDEALSGRPVGALLARWISVHLASGAPSDRPDNPVTHGNAFLAGERRRGDGSRRRKYGELQRLWNRDRPAAARLVLDPGSHFCGNSVEDLFSYWAPILEAPSSEWNHGKVFGPPVSFDFDVWCPVSKLESVSLCPAGRSAAGLDRVEPSLWRALPWRVRAVILDLLLLEGRVPVELLRARVTMVPKVADPSGPGDFRPISVSSVIVRHLHRILAARLESSVVHVPEQNGFKKGFDGVAASVFMLDSVLRCAWKKRRSLCAAVLDVRKAFDSVSHAAVLGILRERGFPAQLCQYIEYIYGNGVSHICSNGAVSGEIRPARGVRQGDPLSSMLFNLVMDHVIGGLSPVLGFPLSASRPRIRALAYADDLVLFASTPEGLQVLIDSVVRRLGECGLSVNPEKSASLALTAAGGRKLVKLDVDRHFHVGDEMIRMLSMMDTFEYLGVTFSPVGLARDNIDLEPGLERITRAPLKPYQKLELLRTFFLPRFYHRLTFCETRKVVLSALDVVIRSRIRRWMGLPHDCLNAFVHTPIRHGGLGVPRLSKFVPYMREKRFGTVDDELEGLGLDDSLRDVLFDFPSGILPQHPSYTESLYLVGHSDGKDLALAHGVPASTAWIARTACSISGRDWTQFVRMRANALPTAVRLTRGRREALPHCRAGCGVPESAAHVVNHCPLIKRATILRHHAVVDLLLASLRKAGLSCLHEPTLKTPTGLYRPDVVASSGEELFILDVTVVSGDGAFEKATVAKRRRYGRGDVFRAAAEVLGVRPRHSMVVPVVLNYKGVWCPKSADALIKLGISSKALGWIAIRVLRGSCMNFTAWQSAVASLGERWRLGG

SEQ ID NO: 18110 - protein, 990 aa, Aelia acuminata
MAESLGYDCRFCPLSFASARGLGQHIKRAHPVERNDWIEVPSVKRRWNEEEIALLAAEELKLRAAGLCENLNRRLCEAFPGRTFDAIKCIRTRPIYRQYLVELSASTAEVPSPVVSGVFDADSAVQREGFFSELRQLRDAILANPTTLCVDRLLGVVDEALSGRPVGALLARWISVHLASGAPSDRPDNPLTHGNAFLAGERRRGDGSRRRKYGELQRLWNRDRPTAARLVLDPGSHFCGNSVEDLFSYWAPILEAPSSEWNHGKVFGPPVSFDFDVWCPVSKLESVSLCPAGRSAAGLDRVEPSLWRALPWRVRAVILDLLLLEARVPLELLRARVTMVPKVADPSGPGDFRPISVSSVIVRHLHRILAARLESSVVHVPEQNGFKKGFDGVAANVFMLDSVLRCAWKKRRSLCAAVLDVRKAFDSVSHAAVLGILRERGFPAQLCQYIEYIYGNGVSHICSNGAVSGEIRPARGVRQGDPLSSMLFNLVMDHVIGGLSPVLGFPLSASRPRIRALAYADDLVLFASTPEGLQVLIDSVVRRLGECGLSVNPEKSASLALTAAGGRKLVKLDVDRHFHVGDEIIRMLSMMDTFEYLGVTFSPVGLARDNIDLEPGLERITRAPLKPYQKLELLRTFFLPRFYHRLTFCETRKVVLSALDVVIRSRIRRWMGLPHDCLNAFIHTPIRHGGLGVPRLSKFVPYMREKRFGTVDDELEGLGLDDSLRDVLFDFPSGILPQHPSYTESLHLVGHSDGKDLALAHGVPASTAWIARTACSISGRDWTQFVRMRANALPTAVRLTRGRREALPRCRAGCGVPESAAHVVNHCPLIKRATILRHHAVVELLLASLRKAGLSCLHEPTLRTPTGLFRPDVVASSGEELIILDVTVVSGDGAFEKATAAKKRRYGRGDVFRAAAEVLGVRPRHSMVIPVVLNYKGVWCPKSADALIKLGISSKALGWIAIRVLRGSCMNFTAWQSAVASLGERWRLGG

SEQ ID NO: 18111 - protein, 1020 aa, Stiretrus anchorago
MPWRNVRPIRGCLDWLSIGPITMAESLGHRCRFCGRLFMSAGGLGQHLRWAHPVERNELVEVPHVKRRWNDEEIALLAAEELKLRAAGIAEHLNLHLARAFPGRSYDAIKGARAKVEYRRLLGDPSGSHMEGPPPDVDPCVSGVGRSSARREYLRDALRSLYDQIVARPTTLCTDRLMEIVAGALAGESVGDSLARWVSTHLASGAPSGLPGIARRSPHGCLATGRQRGDGARRRSYGELQSLWVGDRPRAARRVLDRESDPVRFSVVDLHSYWAPVLEARSEEWRGERVLGPPISASSGLWSPVSRSESESLCPAGQSAAGLDRVAPTLWKALPWRVRVVILNLLLLEGRVPKDLLRARVTMIPKAVDVCGPGDLRPISVSSVIVRHLHRVLASRLENIVPHVPEQNGFRRGFDGVAASVFTLDSVLRCASKKRRSLCMAVLDVRKAFDSVSHSAILRILRERRFPAELCEYIAFIYGNGVSHICSDGKVSEEIRPGRGVRQGDPLSSILFNVVMDHVIGGLPSIVGFPLSTSRPRIRALAYADDLILFASTPEGLQTLIDAAVKGLGECGLAVNPDKSRSLSLVVAGKSKLVKVDSGRAYGVGDEMIRALSFGEEFDFLGVSFSHSGLVRDNVDLRVGLDRISKAPLKPQQKMEVLRTFFLPRFYHRLTFGVTRRVVLAALDVMVRSYVRRWLRLPHDTLNSFVHASVRAGGLGVPRLVKFVPYMRERRFASVDDELEDLGLDDSLRDEFYDFPHGAPPPKPSFEDSVQLVSHFDGRDLVSASDVPASTSWVSRVSSSLSGRDWTQFVGLRAGALPTAVRLSRGRRCDGMPSCRAGCEVPETAAHVINHCPLVKKVAILRHHSIVGILVASLRRAGLRCLREPTLSTTAGLFRPDVVAATSEEILVLDVTIVSGDGAFRGAATAKKRRYGREQVFMAASSVLGVRLARCRVIPVVISYKGIWYAKSAEDLRMIGVTSKAMGWMTIRALRGSCMNFTTWQRAVSAFSPARGPVVLSGRV

SEQ ID NO: 18112 - protein, 1356 aa, Pterostichus madidus
MAEARVPPIEHQTDAEESKTMKRYNTTLTMWHPAATTMKCTETSCAHFYSAKIWTSTKQSIQRHLQEVHRILIDECIHICRNCDELLSNRPASHKCCAPNIPIPLADTTEAHQCTFCTMQFPSVQGVKNHEREHVRSDRTLELNNPLPRPRTRAHLRRVRTPPPHIAPATQINSPSEESDTNSTASSLHVQCSQLTDTSREPTPELPRTPPHPLRLPATCRLSSEDTSESDSDTGSVASRTRARSAARRLSSEPRTPERGSRRNLRAKTLSVPTPRPAAMVRSTPNRLSQQSLSQPPCRTTPHPYTLSPIAEETDTASTYTNLHATLTQGSVFSTENNTSQTQTNTNHSKTNQVPDEPLKDLTVTLKNIANRPISDTNWREFNVSLKTITDTIHESLKIRPRSDNSANKSRRNNIDPDNAKTIQKLYRNNRRRAIRAILDEQRINCDIDNHTITTHFKNIWAPQPYVTGAYRRETNRPTIKLDDFTTEEVRNKLRKCENTSPGPDRITYNNWRRIDPETETLTTIFNICKKYRQIPTTWKQTTTILIHKKGDAQAINNWRPIALSSTIYKLYAGCWATRLTDWLMTNNILHPAQKGFMPHDGVTEHNFAIRHAIAEARRGGRELCVAWLDLSNAFGSVPHDAVTEAVAAAGVGEHFHDIISDILHNNTTQIITNDGPTEQISVGAGVKQGCPLSGLLFNLAVDPVLQELQGADKHNLCVLAYADDIAILTEKSYDLDTRLTTANTYVNRLGMKFNADKSRTIHIARNGRRVRVHATQFILNNKLIPAMTDRHDTETFLGNPVGFSPIAGNADIVKLSDTGLKILSSKLAPWQRIDALKTFVIPAALHSMRFGNHLKKEWTQLDRIFRAEIKKTLNIPQEAANEYIYGPRDSGLCGIPVMADMSDNALIDTAFKLLTSRDAPLSMLARDDFDSAVQRRTLEQASDDLRGRYINGDSDAPFRRANDAASVWSRARNATSRNDVSWTFEDRAPSLHISDTTITEAGRRSVMATLRRGQQTKFQQRLLGLRSQGKAIECVATSDTNTHFMSDGAFTRFADWRFIHRARLSLVPLNAYKKNGDHDSSCRRCGYRNETLAHVLNHCLRYAHAYQLRHNAIVDRVKNAAQYKGFRIVSENQRIGDTNQRPDLVLSRGAVAFIVDVTVAFENRLEALDTARATKITKYSNLAEELRSQYDTITVEPIVVGSLGCWHRENDGFISRLCSRRYARLMRKLVTSDTIRWSRDVYVEHITGTRQYVNPTAAEVTLVANVTGAHVAAPMFSPPPSPHQAASPPAPNPPAQEQLSDSDSESECDMQPPVNLIYSPRSRTVRMPSQPAFATTPHSTSAKRTKETYRTFEID

SEQ ID NO: 18113 - protein, 1356 aa, Pterostichus madidus
MAEARVPPIEHQTDAEESKTMKRYNTTLTMWHPAATTMKCTETSCAHFYSAKIWTSTKQSIQRHLQEVHRILIDECIHICRNCDELLSNRPASHKCCAPNIPIPLADTTEAHQCTFCTMQFPSVQGVKNHEREHVRSDRTLELNNPLPRPRTRAHLRRVRTPPPHIAPATQINSPSEESDTNSTASSLHVQCSQLTDTSREPTPELPRTPPHPLRLPATCRLSSEDTSESDSDTGSVASRTRARSAARRLSSEPRTPERCSRRNLRAKTLSVPTPRPAAMVRSTPNRLSQQSLSQPPCRTTPHPYTLSPIAEETDTASTYTNLHATLTQGSVFSTENNTSQTQTNTNHSKTNQVPDEPLKDLTVTLKNIANRPISDTNWREFNVSLKTITDTIHESLKIRPRSDNSANKSRRNNIDPDNAKTIQKLYRNNRRRAIRAILDEQRVNCDIDNHTITTHFKNIWAPQPYVTGAYRRETNRPTIKLDDFTTEEVRNKLRKCENTSPGPDRITYNNWRRIDPETETLTTIFNICKKYRQIPTTWKQTTTILIHKKGDAQAINNWRPIALSSTIYKLYAGCWATRLTDWLMTNNILHPAQKGFMPHDGVTEHNFAIRHAIAEARRGGRELCVAWLDLSNAFGSVPHDAVTEAVAAAGVGEHFHDIISDILHNNTTQIITNDGPTEQISVGAGVKQGCPLSGLLFNLAVDPVLQELQGADKHNLCVLAYADDIAILTEKSYDLDIRLTTANTYVNRLGMKFNADKSRTIHIARNGRRVRVHAIQFILNNKLIPAMTDRHDTETFLGNPVGFSPIAGNADIVKLSDTGLKILSSKLAPWQRIDALKTFVIPAALHSMRFGNHLKKEWTQLDRIFRAEIKKTLNIPQEAANEYIYGPRDSGLCGIPVMADISDNALIDTAFKLLTSRDAPLSMLARDDLDSAVQRRTLEQASDDLRGRYINGDTDAPFRRANDAASVWSRARNATSRNDVSWTFEDRAPSLHISDTTITEAGRRSVMATLRRGQQAKFQQRLLGLRSQGKAIECVATSDTNTHFMSDGAFTRFADWRFIHRARLSLVPLNAYKKNGDHDSSCRRCGYRNETLAHVLNHCLRYAHAYQLRHNAIVDRVKNAAQYKGFRIVSENQRIGDTNQRPDLVLSRGAVAFIVDVTVAFENRLEALDTARATKITKYSNLAEELRSQYDTITVEPIVVGSLGCWHRENDGFISRLCSRRYARLMRKLVTSDTIRWSRDVYVEHITGTRQYVNPTAAEVTLVANVTGAHVAAPMFSPPPSPHQAASPPAPNPPAQEQLSDSDSESECDMQPPVNLIYSPRSRTVRMPSQPAFATTPHSTSAKRTKETYRTFEID

SEQ ID NO: 18114 - protein, 1357 aa, Pterostichus madidus
MAEARVPPIEHQTDAEESKTMRRYNTTLTMWHPAATTMKCTETICAHFYSAKTWTSTKQSIQRHLQEVHHILIDECIHICRNCDELLSNRPASHRCCAPHIPIPIADATEAHQCTFCTMQFPSVQGVKNHEREHVRSDRTLELNNPLPRPRTRAHVRRVRTPPPHIAPATQVNSPSEESDTNSTASSLHVQCSQLTDTSREPTPELPRTPPHPLRLPATCRLSSEDTSESDSDTGSVASRTRARSAARRLSSEPRTPERGSRRNLRAKTLSVPTPRHTAMVRSTPNRLSQQNLSQPLCRTSQPCTLSSIAEETDTASTDTNMHATPTQDSVFSTDNNTNQTQTNTNHSKTNQVPDEPLKDLTVTLKNIANRPISDTNWREFNASLKTITDTIHESLKIRPRSDNSANKSRRNNIDPDNAKTIQKLYRNNRRRAIRAILDEQRVNCDIDNYTITTHFKNTWAPQPYVTGAYRRETNRPTIKLDDFTTEEVRKKIRKCENTSPGPDRITYNNWRRIDPETETLTTIFNICKKYRQIPTTWKQTTTILIHKKGDAQAINNWRPIALSSTIYKLYAGCWATRLTDWLMTNNILHPAQKGFMPHDGVTEHNFAIRHAIAEARRGGRELCVAWLDLSNAFGSVPHDAVTEAVAAAGVGEHFHDIISDILHNNTTQIITNDGPTEQISVGAGVKQGCPLSGLLFNLAVDPVLHELQGADKHNLCVLAYADDIAILTEKSYDLDTRLTTANTYVNRLGMKFNADKSRTIHIARNGRRVRVHATQFILNNKLIPAMTDRHDTETFLGNPVGFSPIAGNADIVKLSDTGLKILSSKLAPWQRIDALKTFVIPAALHSMRFGNHLKKEWTQLDRIFRAEIKKTLNVPQEAANEYIYGPRDSGLCGIPVMADMSDNALIDTAFKLLTSRDAPLSMLARDDLDSAVQRRTLEQASDDLRGRYINGDTDAPFRRANDAASVWSRARNATSRNDASWTFEDRAPSLHISDTTITEAGRQSVMATLRRGQQAKFQQRLLGLRSQGKAIECVATSDTNTHFMSDGAFTRFADWRFIHRARLSLVPLNAYKKNGDHDSSCRRCGYRNETLAHVLNHCLRYAHAYQLRHNAIVDRVKNAAQYKGFRIVSENQRIGDTNQRPDLVLSRGAVAFIVDVTVAFENRLEALDTARAAKITKYSNLAEELRSQYDTVTVEPIVVGSLGCWHRENDGFISRLCSRRYARLMRKLVTSDTIRWSRDVYVEHITGTRQYVNPTAAEVTLVANVTGAHVAAPMFSPPPSPHQAASPLAPNPPAQEQLSDSDSDSESECDMQPPVNLIYSPRSRTVRMPSQPAFATTPHSSSDKRTKETYRTFQID

SEQ ID NO: 18115 - protein, 1134 aa, Teleogryllus occipitalis
MNENIVRIFQRTTRCETVYLGYRQELYKRFMELYPHLTQITEQNVADRRALIYKSEKYVSRIRREEIKAEVQTEMRRNEGREETIDPIVELMPQISEPDAIIQQVDACPNEHQHSEDSIEMPLLEQLRQQYQTTKAEYWGFAYQTRPRILRQHNSKKLAQLIKLANENILPTEMEQVKNITHDQIDSTIYCMAMAIVKANGGKIIESREQAHRQQHEPPWKIRLERRIKRLRSDIAVLEAYLRGNKGKKMKRKASKIMKMHRKHAAYNPENEYILEYIDTLKQKLSLYSQRLRRYNKSLKRKNDNQTFNRNQKVFYRRLNGEIQNIELPGKSAVEEFWGRIWSTKGHFQDNTSWMSDVTNPTATIRHMETNEISMDILQATIRKLANWKCPGPDGLHNIWFKRFTCLHEKILTLVNHYLKNPEETPDILSEGVTYLKPKTNDTTHPGNYRPITCLNALYKIMTGCLHTIIEQHCTQNNIISKTQKGSCKGSLGSREQLIIDSVIMSQACGRKRNLYTCFIDYKKAFDMAPHDWLIHVLRMYGINPMIVEFLKFVMNHWCTRIHMHSGNKRVVSKILKIKRGIFQGDSLSPFWFCLAINPLSFLLDNTKLGFELKGQEKCVITHLAYMDDIKLYSGSLQGLKKLIYITERFSSDIGMQFGIEKCKIQSIQRGKFTDSTEHDTASREIITALGMNEFYKYLGIQQNKMIIHSQIKEKLKTEFTNRLNTILKTSLNSRNLTTAINTYAIPVITYSLGIIKWTRTDLDSLERIIRVQMTRFKYHHPKSSIQRITLPRKLGGRGILNIGNLHAKMITDMREYFNEKALSSQLYRVIQQVDENYTPLNLKQQNVLHEQPTQAELLEQWKQKVLHGRYPTEIAKSNVDACLSYKWLKIGYLYPETEGFLIAIQDQVIATRNYLKHIIKDPEVPSDICRACGVGQETIQHITTGCSMLAPTDYKQRHDMVARIIHAKLARKCGTASEFDTPYYKYHPQNVIENNTYKLLWDRSVLTDRTVHHNRPDVILWDKSKRKVWLIDIAVVDTSNLDTTHKKKIQKYRELAEVIKEQWHVLEVEIVPIVLSATGVILTVLKHSEKTGDRDEHYHQSTESCDPEHVFFSQKIYGFLNKFVLKNYILFNL

SEQ ID NO: 18116 - protein, 1120 aa, Teleogryllus occipitalis
MATHSNMESRINSRKASENKPLPGERQGMSGASAGRDSLQAASGVLLNRRAHTGSPEATTADERSTQIQSAAPANSVSWTSLGTTQAGLPRRRLHWTTDMNENIVRIFQRTTRCETVYLGYRQELYKRFMELYPHLTQITEQNVADRRALIYKSEKYVSRIRREEIKAEVQTEMRRNEGREETIEPIVELMPQISEPDAINQQVDACPNEHQHSEDSIEIPLLEQLRQQYQTTKAEYWGFAYQTRPIIPRQHSSKKLAQLIKLANENILPTEMERVKNITHDQIDSTIYCMAMAIVKANGGKIIESREQTHRQQHEPPWKIRLERRIKRLRSDIAVLEAYLRGNKGKKMKRKASKIMKMHRKHAAYNPENEYILEYIDTLKQKLSLYSQRLRRYNKSLKRKNDNQTFNRNQKVFYRRLNGEIQSIELPGKSAVEEFWGRIWSTEGHFQDNTSWMSDVTNPTATIRHMETNEISMDILQATIRKLANWKCPGPDGLHNIWFKRFTCLHEKILTLVNHYLKNPEETPDILSEGVTYLKPKTNDTTHPENYRPITCLNALYKIMTGCLHTIIEQHCTQNNIISKTQKGSCKGSLGSREQLIIDSVIMSQACGRKRNLYTCFINYKKAFDMVPHDWLIHVLRMYGINPMIVEFLKFVMNHWCTRIHMHSGNERVVSKILKIKRGIFQGDSLSPFWFCLAINPLSFLLDNTKLGFELKGQEKCVITHLAYMDDIKLYSGSLQGLKKLIYITERFSSDIGMQFGIEKCKIQSIQMGKFTDSTEHETASREIITALGMNEFYKYLGIQQNKMIIHSQIKEKLKTEFTNRLNTILKTSLNSRNLTTAINTYAIPVITYSLGIIKWTRTDLDSLERIIRVQMTRFKYHHPKCSIQRITLPRKLGGRGILNIGNLHAKLITDMREYFNEKALSSQLYRVIQQVDENYTPLNLKQQNVLHEQPTQAELLEQWKQKALHGRYPTEIAKSNVDACLSYKWLKIGYLYPETEGFLIAIQDQVIATRNYLKHIIKDPEVPSDICRACGVGQETIQHITTGCSMLAPTDYKQRHDMVARIIHAKLARKCGTASEFDTPYYKYHPQNVIENNIYKLLWDRSVLTDRTVRHNRPDVMS

SEQ ID NO: 18117 - protein, 1220 aa, Teleogryllus occipitalis
MATHSNMESRINSRKASENKPLPGERQGTSGASAGRDSLQAASGVLLNRRAHTGSPEATTADERSTQIQSAAPANSVSWTSLGTTQAGLPRRRLHWTTDMNENIVRIFQRTTRCETVYLGYRQELYKRFMELYPHLTQITEQNVADRRALIYKSEKYVSRIRREEIKAEVQTEMRRNEGREETIEPIVELMPQISEPDAINQQVDACPNEHQHSEDSIEIPLLEQLRQQYQTTKAEYWGFAYQTRPRIPRQHSSKKLAQLIKLANENILPTEMERVKNITHDQIDSTIYCMAMAIVKANGGKIIESREQTHRQQHEPPWKIRLERRIKRLRSDIAVLEAYLRGNKGKKMKRKASKIMKMHRKHAAYNPENEYILEYIDTLKQKLSLYSQRLRRYNKSLKRKNDNQTFNRNQKVFYRRLNGEIQSIELPGKSAVEEFWERIWSTEGHFQDNTSWMSDVTNPTATIRHMETNEISMDILQATIRKLANWKCPGPDGLHNIWFKRFTCLHENILTLVNHYLKNPEETPDILSEGVTYLKPKANDTTHPGNYRPITCLNALYKIMTGCLHTIIEQHCTQNNIISKTQKGSCKGSLGSREQLIIDSVIMSQACGRKRNLYTCFIDYKKAFDMVPHDWLIHVLRMYGINPMIVEFLKFVMNHWCTRIHMHSGNKRVVSKILKIKRGIFQGDSLSPFWFCLAINPLSFLLDNTKLGFELKGQEKCMITHLAYMDDIKLYSGSLQGLKKLIYITERFSSDIGMQFGIEKCKIQSIQRGKFTDSTEHETASREIITALGMNEFYKYLGIQQNKMIIHSQIKEKLKTEFTNRLNTILKTSLNSRNLTTAINTYAIPVITYSLGIIKWTRTDLDSLERIIRVQMTRFKYHHPKSSIQRITLPRKLGGRGILNIGNLHAKLITDMREYFNEKALSSQLYRVIQQVDENYTPLNLKQQNVLHEQPTQSELLEQWKQKALHGRYPTEIAKSNVDACLSYKWLKIGYLYPETEGFLIAIQDQVIATRNYLKHIIKDPEVPSDICWACGVGQETIQHITTGCSMLAPTDYKQRHDMVARIIHAKLARKCGTASEFDTPYYKYHPQNVIENNIYKLLWDRSVLTDRTVHHNRPDVILWDKSKRKVWLIDIAVVDTSNLDTTHKKKIQKYRELAEVIKEQWHVLEVEIVPIVLSATGVIPTVLKHSLKKLGIETNIITNLQKAVILSTCSLVRRFMGS

SEQ ID NO: 18118 - protein, 1120 aa, Teleogryllus occipitalis
MATHSNMESRINSRKASENKPLPGERQGTSGASAGRDSLQAASGVLLNRRAHTGSPEATTADERSTQIQSAAPANSVSWTSLGTTQAGLPRRRLHWTTDMNENIVRIFQRTTRCETVYLGYRQELYKRFMELYPHLTQITEQNVADRRALIYKSEKYVSRIRREEIKAEVQTEMRRNEGREETIDPIVELMPQISEPDAIIQQVDACPNEHQHSEDSIEMPLLEQLRQQYQTTKAEYWGFAYQTRPRILRQHNSKKLAQLIKLANENILPTEMEQVKNITHDQIDSTIYCMAMAIVKANGGKIIESREQAHRQQHEPPWKIRLERRIKRLRSDIAVLEAYLRGNKGKKMKRKASKIMKMHRKHAAYNPENEYILEYIDTLKQKLSLYSQRLRRYNKSLKRKNDNQTFNRNQKVFYRRLNGEIQSIELPGKSAVEEFWGRIWSTEGHFQDNTSWMSDVTNPTATIRHMETNEISMDILQATIRKLANWKCPGPDGLHNIWFKRFTCLHEKILTLVNHYLKNPEETPDILSEGVTYLKPKTNDTTHPGNYRPITCLNALYKIMTGCLHTIIEQHCTQNNIISKTQKGSCKGSLGSREQLIIDSVIMSQACGRKRNLYTCFIDYKKAFDMVPHDWLIHVLRMYGINPMIVEFLKFVMNHWCTRIHMHSGNKRVVSKILKIKRGIFQGDSLSPFWFCLAINPLSFLLDNTKLGFELKGQEKCVITHLAYMDDIKLYSGSLQGLKKLIYITERFSSDIGMQFGIEKCKIQSIQRGKFTDSTEHETASREIITALGMNEFYKYLGIQQNKMIIHSQIKEKLKTEFTNRLNTILKTSLNSRNLTTAINTYAIPVITYSLGIIKWTRTDLDSLERIIRVQMTRFKYHHPKSSIQRITLPRKLGGRGILNIGNLHAKLITDMREYFNEKALSSQLYRVIQQVDENYTPLNLKQQNVLHEQPTPAELLEQWKQKALHGRYPTEIAKSNVDACLSYKWLKIGYLYPETEGFLIAIQDQVIATRNYLKHIIKDPEVPSDICRACGVGQETIQHITTGCSMLAPTDYKQRHDMVARIIHAKLARKCGTASEFDTPYYKYHPQNVIENNIYKLLWDRSVLTDRTVRHNRPDVMS

SEQ ID NO: 18119 - protein, 1121 aa, Teleogryllus occipitalis
MNENIVRIFQRTTRCETVYLGYRQELYKRFMELYPHLTQITEQNVADRRALIYKSEKYVSRIRREEIKAEVQTEMRRNEGREETIEPIVELMPQISEPDAIIQQVDACPNEHQHPEDSIEIPLLEQLRQQYQTTKAEYWGFAYQTRPRIPRQHSSKKFAQLIKLANENILPTEMERVKNITHDQIDSTIYCMAMAIVKVNGGKIIESREQAHRQQHEPPWKIRLERRIKRLRSDIAVLEAYLRGNKGKKMKRKASKIMKMHRKHAAYNPENEYILEYIDTLKQKLSLYSQRLRRYNKSLKRKNDNQTFNRNQKVFYRRLNGEIQSIELPGKSAVEEFWGRIWSTEGHFQDNTSWMSDVTNPTATIRHMETNEISMDILQATIRKLANWKCPGPDGLHNIWFKRFTCLHEKILTLVNHYLKNPEETPDILSEGVTYLKTRTNDTTHPGNYRPITCLNALYKIMTGCLHTIIEQHCTQNNIISKTQKGSCKGSLGSREQLIIDSVIMSQACGRKRNLYTCFIDYKKAFDMVPHDWLIHVLRMYGINPMIVEFLKFVMNHWCTRIHMHSGNKRVVSKILKIKRGIFQGDSLSPFWFCLAINPLSFLLDNTKLGFELKGQEKCVITHLAYMDDIKLYSGSLQGLKKLIYITERFSSDIGMQFGIEKCKIQSIQRGKFTDSTEHETASREIITALGMNEFYKYLGIQQNKMIIHSQIKEKLKTEFINRLNTILKTSLNSRNLTTAINTYAIPVITYSLGIIKWTRTDLDSLERIIRVQMTRFKYHHPKSSIQRITLPRKLGGRGILNIGNLHAKLITDMREYFNEKALSSQLYRVIQQVDENYTPLNLKQQNVLHEQPTPAELLEQWKQKALHGRYPTEIAKSNVDACLSYKWLKIGYLYPETEEFLIAIQDQVIATRNYLKHIIKDPEVPSDICRACGVGQETIQHITTGCSMLAPTDYKQRHDMVARIIHTKLARKCGTANEFDTPYYKYHPQNVIENNTYKLLWDRSVLTDRTVRHNRPDVILWDKSKRKVWLIDIAVVDTSNLDTTHKKKIQKYRELAEVIKEQWHVLEVEIVPIVLSATGVIPTVLKHSLKKLGIETNIIINLQKAVILSTCSLVRRFMGS

SEQ ID NO: 18120 - protein, 1220 aa, Teleogryllus occipitalis
MATHSNMESRINSRKASENKPLPGERQGTSGASAGRDSLQAASGVLLNRRAHTGSPEATTADERSTQIQSAAPANSVSWTSLGTTQAGLPRRRLHWTTDMNENIVRIFQRTTRCETVYLGYRQELYKRFMELYPHLTQITEQNVADRRALIYKSEKYVSRIRREEIKAEVQTEMRRNEGREETIEPIVELMPQISEPDAINQQVDACPNEHQHSEDSIEIPLLEQLRQQYQTTKAEYWGFAYQTRPRIPRQHSSKKLAQLIKLANENILPTEMERVKNITHDQIDSTIYCMAMAIVKANGGKIIESREQTHRQQHEPPWKIRLERRIKRLRSDIAVLEAYLRGNKGKKMKRKASKIMKMHRKHAAYNPENEYILEYIDTLKQKLSLYSQRLRRYNKSLKRKNDNQTFNRNQKVFYRRLNGEIQSIELPGKSAVEEFWERIWSTEGHFQDNTSWMSDVTNPTATIRHMETNEISMDILQATIRKLANWKCPGPDGLHNIWFKRFTCLHENILTLVNHYLKNPEETPDILSEGVTYLKPKANDTTHPGNYRPITCLNALYKIMTGCLHTIIEQHCTQNNIISKTQKGSCKGSLGSREQLIIDSVIMSQACGRKRNLYTCFIDYKKAFDMVPHDWLIHVLRMYGINPMIVEFLKFVMNHWCTRIHMHSGNKRVVSKILKIKRGIFQGDSLSPFWFCLAINPLSFLLDNTKLGFELKGQEKCMITHLAYMDDIKLYSGSLQGLKKLIYITERFSSDIGMQFGIEKCKIQSIQRGKFTDSTEHETASREIITALGMNEFYRYLGIQQNKMIIHSQIKEKLKTEFTNRLNTILKTSLNSRNLTTAINTYAIPVITYSLGIIKWSRTDLDSLERIIRVQMTRFKYHHPKSSIQRITLPRKLGGRGILNIGNLHAKLITDMREYFNEKALSSQLYRVIQQVDENYTPLNLKQQNVLHEQPTQSELLEQWKQKALHGRYPTEIAKSNVDACLSYKWLKIGYLYPETEGFLIAIQDQVIATRNYLKHIIKDPEVPSDICRACGVGQETIQHITTGCSMLAPTDYKQRHDMVARIIHAKLARKCGTASEFDTPYYKYHPQNVIENNIYKLLWDRSVLTDRTVRHNRPDVILWDKSKRKVWLIDIAVVDTSNLDTTHKKKIQKYRELAEVIKEQWHVLEVEIVPIVLSATGVIPTVLKHSLKKLGIETNIITNLQKAVILSTCSLVRRFMGS

SEQ ID NO: 18121 - protein, 944 aa, Teleogryllus occipitalis
MERVKNITHDQIDSTIYCMAMAIVKANGGKIIESREQTHRQQHEPPWKIRLERRIKRLRSDIAVLEAYLRGNKGKKMKRKASKIMKMHRKHAAYNPENEYILEYIDTLKQKLSLYSQRLRRYNKSLKRKNDNQTFNRNQKVFYRRLNGEIQSIELPGKSAVEEFWGRIWSTEGHFQDNTSWMSDVTNPTATIRHMETNEISMDILQATIRKLANWKCPGPDGLHNIWFKRFTCLHEKILTLVNHYLKNPEETPDILSEGVTYLKPKTNDTTHPENYRPITCLNALYKIMTGCLHTIIEQHCTQNNIISKTQKGSCKGSLGSREQLIIDSVIMFQACGRKRNLYTCFIDYKKAFDMVPHDWLIHVLRMYGINPMIVEFLKFVMNHWCTRIHMHSGNKRVVSKILKIKRGIFQGDSLSPFWFCLAINPLSFLLDNTKLGFELKGQEKCMITHLAYMDDIKLYSGSLQGLKKLIYITERFSSDKGMQFGIEKCKIQSIQRGKFTDSTEHETASREIINALGMNEFYKYLGIQQNKMIIHSQIKEKLKTEFTNRLNTILKTSLNSRNLTTAINTYAIPVITYSLGIIKWTRTDLDSLERIIRVQMTRFKYHHPKSSIQRITLPRKLGGRGILNIVNLHAKLITDMREYFNEKALSSQLYRVIQQVDENYTPLNLKQQNVLHEQPTQSELLEQWKQKALHGRYPTEIAKLNVDACLSYKWLKIGYLYPETEGFLIAIQDQVIATRNYLKHIIKDPEVPSDICRACGVGQETIQHITTGCSMDYKQRHDMVARIIHAKLARKCGTASEFDTPYYKYHPQNVIENNIYKLLWDRSVLTDRTVHHNRPDVILWDKSKRKVWLIDIAVVDTSNLDTTHKKKIQKYRELAEVIKEQWHVLEVEIVPIVLSATGVIPTVLKHSLKKLGIETNIIINLQKAVILSTCSLVRRFMGP

SEQ ID NO: 18122 - protein, 1030 aa, Teleogryllus occipitalis
MPQISEPDAIIQQGDACPNEHQHSEDSIEIPLLEQLRQQYQTTKPEYWGFAYQTRPRIPRQHSSKKLAQLIKLANENILPTEMERVKNITHDQIDSTIYCMAMAIVKANGGKIIESREQAHRQQHEPPWKIRLERRIKRLRSDIAVLEAYLRGNKGKKMKRKASKIMKMHRKHAAYNPENEYILEYIDTLKQKLSLYSQRLRRYNKSLKRKNDNQTFNRNQKVFYRRLNGEIQSIELPGKSAVEEFWGRIWSTEGHFQDNTSWMSDVTNPTATIRHMETNEISMDILQATIRKLANWKCPGPDGLHNIWFKRFTCLHEKILTLVNHYLKNPEETPDILSEGVTYLKPKTNDTTHPGNYRPITCLNALYKIMTGCLHTIIEQHCTQNNIISKTQKGSCKGSLGSREQLIIDSVIMSQVCGRKRNLYTCFIDYKKAFDMVPHDWLIHVLRMYGINPMIVEFLKFVMNHWCTRIHMHSGNKRVVSKILKIKRGIFQGDSLSPFWFCLAINPLSFLLDNTKLGFELKGQEKCVITHLAYMDDIKLYSGSLQGLKKLIYITERFSSDIGMQFGIEKCKIQSIQRGKFTDSTEHETASREIITALGMNEFYKYLGIQQNKMIIHSQIKEKLKTEFTNRLNTILKTSLNSRNLTTAINTYAIPVITYSLGIIKWTRTDLDSLERIIRVQMTRFKYHHPKSSIQRITLPRKLGGRGILNIGNLHAKLITDMREYFNEKALSSQLYRVIQQVDENYTPLNLKQQNVLHEQPTQAELLEQWKQKALHGRYPTEIAKSNVDACLSYKWLKIGYLYPETEGFLIAIQDQVIATRNYLKHIIKDPEVPSDICRACGVGQETIQHITTGCSMLAPTDYKQRHDMVARIIHAKLARKCGTASEFDTPYYKYHPQNVIENNIYKLLWDRSVLTDRTVRHNRPDVILWDKSKRKVWLIDIAVVDTSNLDTTHKKKIQKYRELAEVIKEQWHVLEVEIVPIVLSATGVIPTVLKHSLKKLGIETNIIINLQKAVILSTCSLVRRFMGS

SEQ ID NO: 18123 - protein, 1120 aa, Teleogryllus occipitalis
MATHSNMESRINSRKTSENKPLPGERQGTSGASAGRDSLQAASGVLLNRRAHTGSPEATTADERSTQIQSAAPANSVSWTSLGTTQAGLPRRRLHWTTDMNENIVRIFQRTTRCETVYLGYRQELYKRFMELYPHLTQITEQNVADRRALIYKSEKYVSRIRREEIKAEVQTEKRRNEGREETIEPIVELMPQISEPDAINQQVDACPNEHQHSEDSIEIPLLEQLCQQYQTTKAEYWGFAYQTRPRIPRQHSSKKLAQLIKLANENILPTEMERVKNITHDQIDSTIYCMAMAIVKANGGKIIESREQTHRQQHEPPWKIRLERRIKRLRSDIAVLEAYLRGNKGKKMKRKASKIMKMHRKHAAYNPENEYILEYIDTLKQKLSLYSQRLRRYNKSLKRKNDNQTFNRNQKVFYRRLNGEIQSIELPGKSAVEEFWERIWSTEGHFQDNTSWMSDVTNPTATIRHMETNEISMDILQATIRKLANWKCPGPDGLHNIWFKRFTCLHENILTLVNHYLKNPEETPDILSEGVTYLKPKANDTTHPGNYRPITCLNALYKIMTGCLHTIIEQHCTQNNIISKTQKGSCKGSLGSREQLIIDSVIMSQACGRKRNLYTCFIDYKKAFDMVPHDWLIHVLRMYGINPMIVEFLKFVMNHWCTRIHMHSGNERVVSKILKIKQGIFQGDSLSPFWFCLAINPLSYLLDNTKLGFELKGQEKCVITHLAYMDDIKLYSGSLQGLKKLIYITERFSSDIGMQFGIEKCKIQSIQRGKFTDSTEHETASREIIPALGMNEFYKYLGIQQNKMIIHSQIKEKLKTEFTNRLNTILKTSLNSRNLTTAINTYAIPVITYSLGIIKWTRTDLDSLERIIRVQMTRFKYHHPKCSIQRITLPRKLGGRGILNIGNLHAKLITDMREYFNEKALSSQLYRVIQQVDENYTPLNLKQQNVLHEQPTQSELLEQWKQKALHGRYPTEIAKSNVDACLSYKWLKIGYLYPETEGFLIAIQDQVIATRNYLQHIIKDPEVPSDICRACGVGQETIQHITTGCSMLAPTDYKQRHDMVARIIHAKLARKCGTASEFDTPYYKYHPQNVIENNIYKLLWDRSVLTDRTVRHNRPDVMS

SEQ ID NO: 18124 - protein, 1127 aa, Odontocolon sp.
MASGSRGGVRRPRRAGHGWEAEAGIDILPEPHVVPLPVPVHQSGRGLRDRSSNGHDRSIRALAPQGGAPLIGNTVNPRVRRRRDGASAPPSDEQPFNVSFNEAAVGPPEEEQESEEREPGFDCPQCGRQFRSRIGLGVHRRSKHAEEANADIRVDRVKARWREEEVRLLAWEEVNAPENVPVLNEYLFERLNGTRTVAAIKSKRTQRKYRTVVEEVRALAAARGGPARIERRPGRRIRVPNVLPMAGNTVHREDTLAGEEANGVEIGQLVVRRRESLRDWLRAESANLPADLVGRATLERAINSAMKGENPEEELEEWRTQAFPGSERGGPRPRQTQPQAKLSKKKERQLEYKNIQTLWRKNQGKAARKILDGDSEDGRHLPLGAQEEYWRGIFEERPEERPDLGQPLVADERELGNIWSPITVEEVLKCYPPKGTAAGPDGLQLDVWRERVPPTVQATIMNVMMLSKRVPAGWRDSRTVLIPKKPGAQEPALYRPISISSVVLRHMHKILVKRLSGHELLDQRQRAFIAADGAAENVCILAIAIQSAKESLKPLHIATLDVRKAFDTVNHQAINFVLRKNGIPEEFVEYLEHLYRTSATVIEVGGERSGPIHAARGVRQGDPLSPLLFNMVINEVLEGLLPLVGVEVGGVNVNALAFADDLVLMASTVEGLQRSLSSVAEILGKFGLELMSAKCSALSLVPSGKTKQMKVLTEDQFMVQGQHIPQLRVLGQWKYLGIVFDSRGIVTSSLNLTEMLRKIKVGPLKPQQRWRILVTYLLPRLMHQLVLGRTTYGDLRRLDRQVRRAAREWFRLPHDTPIAYFHAAVRDGGLGIAALESLVPEIRLKRLNNLGKSSYATARAVAGSQFVVKGRQWCARASCRSKDWARKLHGSVDGWDLREAGKSVLSTRWFIDDYIRTPSREWIENVRTRINALPSRTRTTRGVRRDNQPSMCRANCGQPETTAHIIQKCHRTHGGRIMRHDAIVRTLVEALRRKRYEVTVEKVFNTAEGRRKPDIVARGNEQALVIDCQVVSGGRPLSTSYMHKKRYYADNGSLMRAIAADANVAVQQVRVEAVTVSWKGVWAKESAAFLRSVGLSLTTLSGITTRVLQGSHLNFVRFNKMTTMAHG

SEQ ID NO: 18125 - protein, 1121 aa, Odontocolon sp.
MANARDAGVRRSRRAGHSGEAEVGIDIPPEPHVVPLPVPVHLSGRGLRDSSTNRHVRSTRASAPLRGAQLIGNRVNPTERRRRDGVLTPPSDEQLPISIEVNADIHERVEYPRGEEPGFVCPECGRRFSSKIGLGVHRKSKHPEEFNAGIRIDRVKARWKDEEERLLAWEEVNAPEHVVVLNEYLYERLNRTRTVEAIKSKRTQRKYRGILNEVRAVVAARAAPEQPIRRPGRRRREPTVQRGTGESPENEETRETEGEHQGATGCRDWLREWLRTEAANIPHDQRGRDILFRAIELAVNDGNPERELEEWCNHVFPGVERGGSRRRVEREIPNLSRKKKRQMEYKRIQSLWRKNQSKAAKKILDGDSEDGRHLPLQVQERYWRGILEERPAEQPELEHANVLEADGEGDIWGPITTEEVTKCYPPKGTAAGPDGLQVEEWRGTVPAVVQATLMNIMMLSKRVPAVWRDSRTVLIPKKAGAQEPALYRPISISSVVLRHMHKILAKRLAGLNLLDTRQRAFIAADGTAENVCILAAAIQSAKEKLRPVHIATLDVRKAFDTVNHQAISFVLRKSGISNEFVEYLEHLYGASTTVIEVGGERSNPIHAARGVRQGDPLSPLLFNLVINEVLEGVMPIIGIEMGGMNINALAFADDLVLMASTKEGLQRSLTTVAGILKRFGLALMSAKCSALSLVPSGKTKQMKVVTGDQFMIEGQYVPQLRVLDQWRYLGIVFDSRGIVVSTLDLVEMLKKIKAGPLKPQQRWRILVTYLLPRLMHQLVLGRTTYGDLRRVDKQVRKAVREWFRLPHDTPIAYFHAPVREGGMGIAALESIVPEVRLKRLNKLGMSSYDAARAVAASQYVVKGRQWCSRATCKTKDWARKLHGSVDGWDLREAGKSVLSTRWFVDDYMRTPSREWIENVRTRINALPSRMRTTRGLRRDSQPSMCRANCGQPETTAHIIQECHRTHGGRIMRHDAIVRTLAEAFRKKGYMVTVEKIFNTREGRRKPDIVARTNDHALVIDCQVVSGGRPLSASYLHKKRYYADNESLIMAIASEANVEAQQVMVEAVTISWKGVWAKESADFLRARGLSLAMLSGVTTRVLQGSHLNFARFNKMTTMANRQ

SEQ ID NO: 18126 - protein, 1135 aa, Odontocolon sp.
MASRRSGAVRRPGRVGHSWEAEAGIDVLPEPHVVPLRVPVHPSGRGERDRQRNRRTRDTQSHAPNDGAQFVGNNLHNDVVRRREDASVSTSNEHPPPVVRNEEANVRQRRMPDPQEPGPENEEEERGFICPQCGKRFASKIGLGVHRQKKHREEFNAEIDVTRRKARWTAEEIRLLALEELRAPEHVVVMNEYLTQRCGGQRSVEAIKGMRKQQKYKDAIHEVRESLSGHEDAGHQGRLPGRRRRQPVPRHDGIPEEVPGGIEEARPHDVAPDITNQDMETQESVNEWLETVTPEIPPDLVGRESLMTAIRMAIRNEDPEQELERWFRATFPQSMHERPRTQRAQEEPVVTARQRRKQDYKSIQTLWRKNRSKAAKKILDGDAESGEQLPLEVQEPYWRAIMEERPEIQVLGNRHQPDNPIQYQRVWEPITVEEMIKQYPPAGSSAGPDRISVREWRGVPAIVQAVVLNVVLASKRVPAIWRNSRTVLIPKKPGARDPALYRPISISSVILRHLHKILAKRISRLDLLDPRQRAFIEADGTAENICILGAALKSARDNLTPLHIATLDVRKAFDTVNHEAISYVLQKNNFPDEFIQYMEHMYRDSATFLEVGGRKSGTIRATRGVRQGDPLSPLMFNLIIDQVLAELLPIVGVDIGGVNANALAFADDLVLLASTKEGLQRSLDKVAETLQKFGLAIMSAKCSALSLIPSGRTKQLKVITGSQVTVQGHRIPQLKVLDTWKYLGITFDSRGPVTSKTDLEDMLSRTKGGPLKPQQRWRILVTYLLPRYMHSLVLGRTTFGELRRLDRLVRRAARGWFRLPPDTPVAFFHAPVKEGGLGIPALESCVPEIKLRRLNNIRGSSFPIARAAAASQFAVDMRRWCGQQTCKSKDWSRKLHESVDGWELREAKKSNLSTRWFEDDYLRIPAREWVENVRVRINALPSRMRTSRGLRREAQNTMCRAGCGVPETTAHIIQACHRTHGGRVLRHDAIVTSVANALRRKRYQVTVEKIFDTPEGRRKPDIIAVKDGRAQVLDCQIVSGGRPLSTAYNYKKRYYANNLPLVRTIAVTAQVPEDQVSVEAVTISWRGIWAKESDAVLKSLGLAQSVLSGLTTRVLQGSQLNFARFNQMTTMARGQ

SEQ ID NO: 18127 - protein, 1025 aa, Adelognathus sp.
MTLLSGRLTGRTAPVSNSAASGSGDGEPPQDDDTENDEFVCEFPGCARAFRTKTGRGVHYNAAHKAWYNAQARAPRNFLWNDEADTLLARKELQLMREDVKFINVGLCEAFPDRTLESIKGRRKQPKYKAKLAQLMREEEEEDERRRDMLQDPGDPGAVDNADQDLMEVIEHYLRDLPLYNSDEHESAMLNTICANAANWGTDRLFENISLYLRKILPQSGRTPARRPPVAEPQLTRRQSRRAEYAKTQKMWRKNRSRCISSILEGEAVHQPPPPDIMDPFWRTLMTREIVSTPDDERPNDVISDLWSPIKIEEIKAVRFNGSTASGPDGLSLQDFKSVPSEVLMRIFNIFMVCGAVPDHLLESTTTLIPKKAEAIEPGDYRPITVSSILVRAFHKILAARLAKTIKLDERQRAFQALDGCAESTLLLDLILRFHNTRARPLYLASIDVAKAFDSVSHRTLLQTLYIKGVPLEMRLYVAKLYESSKTRLKYGNTTSEPIKPRCGVKQGDPLSPLFFNYVIDRLLAKLPKGIGVDMDGLKVNALAFADDIILVASTKVGLQQNLDTTVDFLNKCGLKVNANKCVTVAIRTVPREKKTAVEPNIRFTIEDRLVPSLNRVDEFTYLGVPFTADGRIKNNPTAEITDLLTKITKAPLKPQQRLFALRVYLLPKLYHTVALGNVRIGVLNKIDRVVRGSVRKWLDLPHDAPTAYFHATIGDGGLGIPSMRYTGPLLRYGRLKGLDRGENIKSQYLESETQIVERRLKPDGVLLRKKDVERRWKQSLYGTVDGAALKGSSKIKGQHYWVGDGTAMLSGRDYINFIKLRINAMPTRSRTSRGRRRDRACRAGCVNIETTNHILQQCHRTHGKRIKRHDAVAHYIARGLEQSQHHVVLEPVFNTEAGRRKPDIVATKNGKTMVIDAQVVSEQTDRDEAHERKVSYYRDNAELVQEIKTRFASTEVQFMSATISWRGVWGAESARQLLEARAVKRTDIKVIATRVLVGGIASFRFFNMATSTRRRAPVPRQGVG

SEQ ID NO: 18128 - protein, 809 aa, Ceratosolen fusciceps
MRDSAPGPDGLRYSELRKADPRCHALVALFNACLRLGRVPRCWKSSNTVLLFKKGDRGDISSWRPISMGDTTARLFAALVADRLSEWAVENKRLSPSQKGFLRYEGCFEHNYVLQEAIRDARTRGKEIAVAWLDLANAFGSVPHESIHEALARHKVPVEIRNIVDSAYEGVRTRIKTADGVTAPIPILSGVRQGCPLSPIVFNLALEPIVRAIDATGLGYRLSGKDYTNLVYADDAALLAGSREAMEVLLTTAERAAELVGLRFNPSKCATLHVGGKKGRAKVLPTKFCLRGVEIRPLAAGEPYEHLGIPTGFRVKQTPFSTLDEMARDLRAVDRSLLAPWQKLECARVFVLPRMDFCLRGARVAKGPLTKLDRELRKMSKRWMSLPQRASCEVVYLPARMGGGGLLPLADMADVLTVAHAFKTLSAKDESVSALAWSSLRDAVSKRLRREPTPQDLASYLSGELSGDFARLANDLESLWSKAREAARRLSRLISLQWRWCPERNEWAVECMGGGGLTVIVPLAARAQVIARLRSAVVEAYRRRLVAKPDQGKVFEVTTRSRVSNHFLQGGNSTRFADWRFVHRARLNVLPLNGAMRWVRDADKRCRRCGADLETLPHVLQHCGRLAAPRQRRHNSIVARLVEATRMRGDVRVDQRVLGVGPESATLRPDIVVRDEFRKRIAIVDVAVPFENTIEAFDAVREEKLAKYSNLAEDLRRAGYTVELEAFLVGALGGWDHRNERTIRLLSVNPAYATRMRRYMVSDCIKWSRDVYVEHVSGVRQYAPDEGLLPLGARADPVVYKNVYSAHKH

SEQ ID NO: 18129 - protein, 1170 aa, Anoncus sp.
MDMATNRLVHGPNGHRANTRKTTQNTKTESKMTDTTTGRAPDEGEQGPASPGNGQRANEDEPASPRTMRSWEIRVPLRGLTHCEPCRLNNRNMGFLQLKDLVKHLEEQHWQTAVSMRCNQCGKVFPGLRNWWGHKRHCKGPQDRQPLAFPCDHCDLSFGTLIGRSQHERWAHEAVRNEKRREALTREGVPGRRAHVWTEEETVQLRQLNEQYKDFRDVNKQLEPFFPGKTAKQISEKRRQLSREAARVAEVARAAEAAAIASETSDEEEWQEAREEAIPEREMEESQWAETMRMAITNEDSPRDGQLREWAEELRLAWQELQEEPARLRAKVDEMVANLAGLLVPQEEQEVREATTINTDGRNVETRRRRRKKKVVPANSSRRRKFAYARCQELFDKCPAKLAEMAVQGDFSFAEIRKEPPRAVDIERLYTELWGVAGPAIQMNDEVDVADIDTVFRPITAEDIKKRVSKLKNNSAAGLDGIKKSHLRKGGVAGVLAILFNLLLREGHYPAIWKKNRTTLIPKAGKDTADVKNWRPITVSSMLARTFSAIIDQKLRAFVTQSPRQKGFTAEDGCSLNVLIINEALTEMKGKSGGVVTVLDVSKAFDTVPHSSLQPALERKGVPKELSTYIPKMYEGCTTSIKGRDRTVEIELKRGVKQGDPLSPLLFNLAIEKLVSKVEETTEGPEIGEAEVSVLAFADDLVLLAKDRPEAQRQLNIVGKGLDKMGMSLAANKCSSFEITSKTRTWYISDPGLQVGEERVPGLASDESIKYLGVKIGPWQGLVKGAEVPVIVQAVKNVRHLKLKPHQKMELLQTFILPKFIHSLSNNKPCQGTLRMLDQKIRQEVKEILHLTQSTAKGFFYTTKGRGGLGLIQFERTIQLSKMSHYIKASASSDPVVRETASRGKLAKISQDAARSFGCNQPTNAEELKEVKRRTAARVVGDWENLITQHGVKDFKNDKLGNAWLQNPSLLLGSRYLDALRLRTNTFGTRDVLSRANPRIDATCRRCKRQRETLGHILGMCIHTKPERIRRHDEIKNFVADKVGKRYTVMVEPTINELGELKKPDLVIKFGNEAIVADVTVRYENKSYLSEAATEKVNKYIHTAELVRIITGCETCSVMPLVVGSRGAIPRQTRISLTKLGLTKQDIITISMLALRSSIEMACSFLDYDE

SEQ ID NO: 18130 - protein, 1149 aa, Euura saliciscinereae
MDHNEDTASDADDHSPRSSVADSAEDVGLLDDDPSMLSDDDLEKVTIDVPIPEEGTLCQPCLNKGQRHGFLTLRNLSDHLTWQHPNTQTEFKCTRCLMSFPGIRNYEAHKGKCKGAPPPPQAPLPFPCNNCDLSFETQIGLSQHERHAHPNVRNLARQRIPQRPVVDPDLKHVTPLWTLDEIKTIRELEERFKGKRLINTLMQQHIPNKTNKQIGSKRATMAAADERQRQKEREEANQSSSDEDEIEELIEPLTEPEVNTESVQAQSWKDPIKRFIKSIKIPNESDYAEDGRVLMELWESNRDDQFPHKLNAWIDIFTELLAQTQPSETNRNQKRARNTKNKRRQNNTRDNRPLNHGQRKRLNFARSQELFNSCPGKLVDVVTTGDFSIVEGRKQPPDKQVVSDFYNTIWGLEGPNIALGGRYPEPIKMEEAFKPIRPQDVKDRISRITGSSASGPDKIKKCHLAKRGTSEILAILFNILIIEGLYPQAWRKNRTTLIPKPGKPTEDVKNWRPITIGSMIARIFSGMIDNKMRSFVKQTLRQKGFNNENGCLQNITLLQEGIERMKSGEGGVVTIVDISKAFDTVPHSAIRHGLRLKRVPEPLIGLVEEMYRGCTTTIQAANKDTVEIELRRGVKQGDPLSPLLFNLALESIIDRLDMNTDGVPIADNNLSIMAFADDIVLIGKNRRVASRQLKDLDRYLTSLGMELSVPKCQTYEIVPIPKSWYIRDPGLRIRGQDVAFIQPDEAYRYLGAKLSPWKGYQKEQLVPKVVTMMKNVRKLKLKPWQKLELLRVYVFPKFIYELTLTQPSKGTLQLLDSAVRQEIKEILHLPTSIATGFLYTPVRDGGLGLMRFERTVRYASLKGCIIMSESEDPILRESIRRKEGQNKKLAESLGLQWPLTLEAHEKAKGEARNAESRSWERLTSQGHGVRDYRKDKIGNRWLAKPDLLSGSRFINAIRLRTNTLGTKVALARHTKQDNVNCRRCKEAIETLGHVLGQCIHTKNARIRRHDSINEFIKKKLSTRYTVFDEPTINELGELKKPDLVVCSQDAVTVIDVTVRYETGNRLQEAATEKRQKYTEVAELIRIRTGRARSEVIPIVVGSRGVMPKATTDKLKSLGIGKNDQLTISLMALRSSIEMATAFIDYDRAL

SEQ ID NO: 18131 - protein, 1073 aa, Lordiphosa collinella
MPRGGWKQALEIYNMKFSAAATVENFKLIAQKVLVTESGKRCGVRDFAENPSKRMRVENDMNNITTLQESNNKIRIKLELTSNWIATANRRIEDAPSTKKIPRDRLNMNILDAINEAVGELAAENVPETMEDLARLIYSAQATYQKCTVKESKPSNWVENIEKKIKIIGSKISVLKSTQNKVKLTKDDTSLLKRVMHEHKLDLSKPRSVTEVIVGLEDQVKAHTKRLNVHLQRKQFQKDNRCFELYRSRFYRDLSEDKVGQDVGVPEEEIKDFWSTMWTKNGKNETTIDSSHSFYPGDDSQVPFPTKSEFDLILSKLPNWKAAGIDKIFNYFIKKLDSLHNYLYKIVCDICIHGKSEKDWFYKGLTYLIPKGTPKSGSDFRPITCMSNLYKLTTKCVTESLQLEVERRQLIAENQMGTVRRVQGAKEHALLNNAINRKYNNELKTMWIDVRKAFDSVDHLYLLKCIKSLNLNTWLEKFLEHIISRWTLEIMSNGKKVLDKKIERGILQGDSLSPLLFVLCMDPLSRTLNSTFPKVSLPVKNTSEFFTTNHLLFIDDLKIFAENDDVLVKMASEVNKFFNMTGLEMNREKSATNTMACEDLAVCLSPEQGYKYLGVTEDRTSKHTKESFQRLKSEIIKRTSKLCKTKLNGRNLYHAINEHGTSLLNYYIGVLDINPEEYEELDRNVRMVLLKNHVHYQPASSDRLYLPRKELGRGLFNMAHRSERVLLQFNTCLANSHSLRRRAIAYEEEIAKTNLSLIHNYLAIKYNLNEELNVLKLMNAQRDALYSNINKKILHQKLYNSPDKEIINIAGSALWLRKGNIRPREEAALCNLQDRNLFIGDKSKCPHCRKCAKSVDHLASRCEKLLGHDYTRRHNEVVRCIHLFLCNKYGLTSSKHIRLHSVQEIVASDSVEIRVDTRVKTDVKMEHDRPDILVIDKKRKEAIIIEIGITSQDNLKQVETEKLHKYDLLAGEISLLHKCNVRIIPYVMTWDGMVTYCHEKYIKNLGLPTNVESYIQMRVLKKTLETVSLEARRSVFDNAGDAEKIEEAVSQLLETANHKAKVESHDVKRNPTN

SEQ ID NO: 18132 - protein, 1111 aa, Papilio phestus
MIPNQENNTQMPCPVPGCNEDALFNGLQGIRVHISRKHTELSSHMRENHIKTATLINQINECSQGPIQPAFNTNSTPHINDITNHDQTEELSLQCTTCHRQCESIQCLRVHRLIHDKEANISQTPSYPTSSRQETFVPANGFTCHECQQTFSTNQGLSVHRNTHAVEANEARTEAYMNTRTRRSFAAVIPQENTITNARPEHAVALTRKRDQWESELAGFASCSDAINKAHFHQQITGFLKFLARAPNQLTGPKIQNGEHNKQNFHQRQRQKEQVNQQSNDQNAASQRTEPQYSRTTNPQRTNQRIRESKKRNMNYERIQALYQFHRRRAADYIIRDESNAKCKIDPEKLYEHFEPIFETANYNLRTDDYPTRDPQMNISISREDVEKAIKAMNIDTAPGHDRIYVKTIKDLKISRCIKSILDVMLATEEVPKELLKGLTILIHKGGDEENPSNWRPITIFSTIRRIIDRVLDNKLRQQVDISANQRGFVTGMPGCHVNANLINGALLHAKENRKDLVVVFLDISKAFDRIGHDHIEKCLASQGTSNNLRNLIVKLLRKSTTEIITENQNQPNRTITFERSVPQGSPLSPLLFNIAINHIFEEICEEKYANRYGYKIHDDLPALILSGFADDLAVSAKSIEDARNVIDLIQLRFQEIGLEVNPKKSMAINIVQGKMIEGELPLYDNQSIKCINEDERIRYLGCNFKSELIFDHGVVQKISNAANKLIKTPLLHKDQKLNILNQYLLPILTYPLQAAPRRKVPKEALQNIDRTIRQTVKKIIGLPTSSSTAMIYASRKNRGLGILCANWELFLQHFNLAKRLSRVDDQLLHRVYDHDGEMKICREELENLAKIKIDGSTAQQMRRTLRDNAFTKWTTMEYQGVGVKHFAIHPKANRLMYNKHTLSSSEWTAALKLNVNYANLAGVPGSDIYTASNRCRRCGDEKETPAHVIGACKFGNHRRIARHDEIKYQLADLLRKKGFECIIEAQCVDQRGDNRRIDILAFDPKSEHAYIIDPTVRYETNQDMDDIVQKEKADIYLSCGQDLNGRYPQYGARNFEVIGLWFGARGTIGKSVLNFFDKFKLDKKILPELAETTLRATIHMLYHHMNQTCH

SEQ ID NO: 18133 - protein, 935 aa, Graphium evemon
MNTRTRRSFAAVIPQENTITNARPEHAVALTRKRDQWESELAGFASCSDAINKAHFHQQITGFLKFLARAPNQLTGPKIQNGEHNKQNFHQRQRQKEQVNQQSNDPNAASQRTEPQYSRTTNPQRTNQRIRESKKRNMNYERIQALYQFHRRRAADYIIRDESNAKCKIDPEKLYEHFEPIFETANYNLRTDDYPTRDPQMNISISREDVEKAIKAMNIDTAPGHDRIYVKTIKDLKISRCIKSILDVMLATEEVPKELLKGLTILIHKGGDEENPSNWRPITIFSTIRRIIDRVLDNKLRQQVDISANQRGFVTGMPGCHVNANLINGALLHAKENRKDLVVVFLDISKAFDRIGHDHIEKCLASQGTSNNLRNLIVKLLRKSTTEIITENQNQPNRTITFERSVPQGSPLSPLLFNIAINHIFEEICEEKYANRYGYKIHDDLPALILSGFADDLAVSAKSIEDARNVIDLIQLRFQEIGLEVNPKKSMAINIVQGKMIEGELPLYDNQSIKCINEDERIRYLGCNFKSELIFDHGVVQKISNAANKLIKTPLLHKDQKLNILNQYLLPILTYPLQAAPRRKVPKEALQNIDRTIRQTVKKIIGLPTSSSTAMIYASRKNRGLGILCANWELFLQHFNLAKRLSRVDDQLLHRVYDHDGEMKICREELENLAKIKIDGSTAQQMRRTLRDNAFTKWTTMEYQGVGVKHFAIYPKANRLMYNKHTLSSSEWTAALKLNVNYANLAGVPGSDIYTASNRCRRCGDEKETPAHVIGACKFGNHRRIARHDEIKYQLADLLRKKGFECIIEAQCVDQRGDNRRIDILAFDPKSEHAYIIDPTVRYETNQDMDDIVQKEKADIYLSCGQDLNGRYPQYGARNFEVIGLWFGARGTIGKSVLNFFDKFKLDKKILPELAETTLRATIHMLYHHMNQTCH

SEQ ID NO: 18134 - protein, 1191 aa, Cloeon dipterum
MAEMSDAQASDALDYGSDPVLNVQLPHTSGTSDDDFSRKLIRIVLPLAVNGVTCGACSGRGKGGRYLALTVADFERHARQSHHDWRVVYECVKCSREWPKRHPVDCHMPKCKPRDPAEGGSSVLAYSCPGCARSFSTSRGRSLHIRSAHATLANSAPAPVRFFLSGIKETALWSMGELESLIKWEFRLSRRGVKKDINKQLAGKLVGKTDRQVKEKRGLASYKNAYREYELSREGVPGTDSESEDEAASAVESEDEEFLSGLSDTSLNGSGDVFEDPPADDGADASVEPSIEAPASDPGEEGELPGCDDPPLGCVLARDYDWESSLDRALTGWEVPRQIQDTPLANALQTLVTECTQTELDLAYQLLVDFIRDGIGQRAQVNVKKKSLGKTRKRRANAATRRASEYARTQQLFRENPGLLAKHVRMGTNHVNSNDVKVPRDEVVHLYSNLWGKEPTGVVFEQGLVEPAVETFIVLGPITAVEVAKRFARIARNSAPGVDGLKRADLSGEHKFKILSHFFSICLRHSVIPNAWLHNRTTLIPKEGKDPSRVTNYRPITLSSIISRVFWGVIDRRLRSVVQLFPRQKGFVSEMGCFNNVQLFSDLLRHMKGAAGGVAIQLDITKAFDSVPHCAIQAALARKGVPDHLANFIAKSYEGVKTSIAHPDGAIDIVLKRGVKQGDPLSPLLFNLLIEPLLIRLESMKGYNLGGQSISSLAFADDLLLIGEDKNKATALLEETVRYLGKLGLGIAPDKCFAFQVVTTRDSWLLRDPQIRVGMDPITFCDASMNLTYLGVKVSPWLGVNISEVGSHLEQVLRRVGELRLKPFQKLTLINKFLIPHFVHQLVISIPSRALLRKLDTSIRAWVKEYLHLPASTSNGILYATNRDGGLGVPVLEDLVGRVALRAGVKYLLSEDPAIRAMATHSVLQGKLEKLADSLGVKWPCSLTDLKRVRKQQKSNILRAWAAQKVQGATVDIFKGDSVGNSFLRQPSLLKPTRFKTALQFRTDTAATRASLRRAKIVKPGEDTCRKCGETQETLGHVLNKCRSMHERIIKRHDDIVKILSSESLRQDQLTTEEAMLGLTGENLKPDLIVLSQEAVFVVDVTVCYEHKGFVGMARQNKIARYTELQRQLKSRFNVTHGEVIPVVIGSRGAMPAETIKGLKKIRLASKGLLKTLSLSALRGSLELYHSFMDR

SEQ ID NO: 18135 - protein, 1042 aa, Ophraella communa
MIIIIIIIIIIIIIIIIIIIIIIIIIIIIIIIIIIIIIIIIIIIIIIIIIIIIIIIIIIIIIQETEITQRKGINKPQLNNEHQEKIKKANKAIKNICREIKNLTIIEINHLIYAAAAVITDNDSSKKSKPTQYPKWKMRIDNQIKSLRREISVLSELNKGVASYSVHQKAKRIQSKYEHTDLSDLINTLKMKLTAKAQRLRRYTKRANQFHQNRMFQNDCKKFYRDLNKKETRETNPPIQDEIECYWRAILEDEKIHNNEAHWIALEQQKYNKITPTVWKEYTIDEIRSVTKSLHNWKAPGPDKVQNYWIRSFSELHSHLARVFSDVTSNPNMLPKWFTTGVTYLISKGKDAKNPKNYRPITCLPTMYKFLTRLITNRLYEHLSNNNIIPPEQKGCNRFSQGCKDQLLVDKMIIDHAKKQKRNLAMAWIDYRKAFDSVPHSWIITSLKTYKVNPTIITFLENTMKNWTTELQLYHTEGHIRTDKIKIRRGIFQGDSLSPLLFCVALIPLSNMLNRNKLGYEIERGVYINHLLYMDDLKLFATNSKQLDQEINIVKMFSDDISMEFGLDKCSKIIINKGKIAHGPNTKLNDGKEIENLNEDQAYKYLGVEQSNEVQHEKMKETIRKEYYRRLRLILSTELNAKNKAQAITSLAVPVVQYSFGIINWKEQEIQQMDRKTRKLLTIYKFHHPKADKDRLYLPRRVGGRGLLQLETSYKSTMVGLYEYIKEPKDKLIKLVAKYEEKKANYSITTIGKKLINGYVQTEQKGSTTDNTKMKIRKALIDEKIANLKSKPLHGQFYKSLDKNHIDSEMTLKWMKYAGLKAETESLIIAAQDQALNTRYHQKRILGENVDSKCRMCHQHEEHISHIISGCPILASTEYTQRHNKVASYLHWSMLKYNNLPTPEHWYDHIPERVTETEQVTILYDKSVITDRKITANRPDIIYYNKIENQCLLIDVSVPEDNNIAPKETEKLNKYIDLQIEISRMWSTRTKVIPVVVGALGTIKKGFQDKVDDLPGEINSAQIQKIALMGTAHIIRKVLCIQ

SEQ ID NO: 18136 - protein, 1216 aa, Trichogramma brassicae
MTTWRRDELDVAEAYRLEHPGVLTVADYEEVRDRSAGAVKTKLNAIKRARSNPETAASAPERWTEQDVERLAARYAEVAGNTKAAKIRALITEFPGRSEKAIATLLRERFPVLYHRREHLQQPQTQIITPEPATYSITTEEAVSTSAQSNIQAAIIITEESMPTSTQPIIQPLTDAEDPVMLSPPSALEVPSSLRAKFLAIYKAAARTRRKIARPRGFVQHGIIAAINELLKEQLETINATTTSAVRRRKKAKQAIYASAALLMSEHRRRTANKLPQNFEYTKRKIRKTQRQLERSRRLRSFVGGQRLSRELKQHARELRRLKMTPTQAIRLGEERLQALECKYEVQLAKAEALGVRTQFIGKPSMSVITRVSERACPDLKRTEDYYRALFSENNERDKQDTPVFSEWLQRMHTHRDAMDLGYHLSEQRLRVLIGGHIDRSPPWKACGLDGIPTAIYKMLSSARNYLATFIIDAITGRERIQETDVRARVVLIHKAGDLSDPANYRPIAVLNADYKILTACVAEIISEGLADWMIPKQQLARRDVWGTTHGLLWDKACTQAARLSRRKNYSSWFDYAKAYDSVSHVQLKRLIAALPVHQQVRNLTKALVSKWAITVQLNTQQTAPIRVKRGIYQGDSMTPLLFVLVTACIIPAIEEDAGITSASRGRHRIAAFMDDIKTHAPTKKAAELIKIKLEKTSGELGLLLNVRKCGIYASQTTEEEAEEDVPFLPTVRDGNKYLGLHQTERDTPVNMVTLTNKLEQKLAEILTSKLAPSQKVTLINNTLIPAAVYVTGNLYPNEARATTLKKCADVDKSIRKALIHHNLLGKTSTRALVYVPTSLGGLGVKSLVSETEAQYVRKYIYLQHHPDMKETEAEYERLAAAGWRNPITDAMHVIRTYELEIPPKEEPSEPLNAYCRRVVGKLHRAQESRTLQSWTTSSHYARLATKAAPKIRLPALADYRSESWMTTIARTAAEEQVHGLGANPARRRRCRRGCNADETAYHVMSACVTQDYTTRHDAAVHHVLYRILKSTQAPEHITSQLRHGKAALVVEYTWGQRQIKIRAGTKVQTDPELYHNRPDIIVIATNPDIVYVFEIAILHLQNIHRQEKIKEARYGKNSTLHVTEKNCDTVPRDYNLVEALARIYKAPVKLSVIIIGALGEILETPGLAGAYRHLQQLGATRDDLRDLENRCSRSVCVATAKIIIRRLTMRPHDSA

SEQ ID NO: 18137 - protein, 1034 aa, Pachyrhynchus sulphureomaculatus
MRQHMRKAHPREYNERLQDEDRRVHRPWAALENLELARAEISYTGYNINQHLLTLFPDRSLDSIKSHRRTLEYKMLRDRVRAELEEAVEDGHDADEALAAVLTPNITVNLEDPPNVDTGPELFTAGPSDEPLDPGAAPGLVSAVNETEVPMGLNDAPPSPSPPSSPLPVPLLPETDPVREYIEHLLSVTALDPTYLDYINRLLEPAVTCEEQREALTRLWQLTVARGNTGTNMPRSTARRVAPAPRNRRQRYAFAQRLYKADRARLAEGLISGSLYTNTAPTFTAEEAFTAYNAILGTESPVDNEDITDRVQHNIKLYEPIFIEELKSVLNARQSNARGPDGLRHTDIKMVPITILALLFNLILFSATIPDEWRVNRTVLIPKAGCDNADVNTWRPLTISSIGLRVFNKILAARFSRLPLNIEQRGFRSMDGTLANTLTLQSIIKDCRAGAKPFSITTLDLRKAFDTVGHGSLLRALDRFSVDPKIRRLIADNYNNCITTIDVNGVRTRGIPINRGVKQGDPLSPVLFNMVVDEAIALLKKSGAGLTVGDCRHTCLAYADDLLLFAHSKQEMQIAVRLLERNLRRRGMTLNPLKCANITCNLLPSRSKLYLATRGSIVVDGGLIRQLNVEEQFKYLGFNYGFMGARESSVDGLSAELGRVVGAPLKPQQKLCIIKQFLIPRYTYLLQNPSITLKTLSSIDRQIRIAVKKALHLPQQTPNCVLYAPPKQGGLGIMSYRCRIPGILSNRMESLAAAYADDALISSLAASDYFVTLYGKLTTWCRTYGQKPAQVGSYWASKLEVSASGGGLWQVGTDGSGSNWIDRPPLYWNGEEFIKNVQLRFNLLPTKGGLHNRSGDTACRAGCKRRETVCHVLQACPLMHYDRIRRHDKVVQRLAKFAGDKGLQVEVEPRIRDASGTLHKPDLLIKRDNDILVADVAVHWEGPDVLPVSAGHKVARYSGPLFLEAVSARYPDCSLTIAPFIIGARGGWCPSNRTVCDFVRITRPQVDMLTFLVLKGGWLIHSSFSARIWADARR

SEQ ID NO: 18138 - protein, 1144 aa, Listronotus oregonensis
MSSKYQNFKIFEIIGDGNCLFRAVSLFLYKTQEKHAEVRSKTSKFILNEWEKLKNYILDENISKDEYYKKINAPGTYGTALECFALSEIYKLNFNVFTFVENLPLSQILSRKAMVLSDCLKKHTSTINLLFRGNPNNGHYDLIQKYNLDNDEQKTSCSICQKSFKNINGLKIHNVKMHQKTNVKKNLENTKSKNNMSDVINVTFEKFNEVSTNQIANKTPENLINENPNLNGEFLIKAFAELKSSTPIIKIIPKGARPSISDELSFLLEKCVSKNDFHSWISLFLFPYAVLAIPVNSKHNRKSSLTTLIKNNLTSWLKNKFLQTNDLLELYIKISETSKKPSKKKDSKKFNENRYISKKIKAKIADGDIRNAIRILTSDDTIAPRNEETFEKLKKKHPVSEQDNDLDYSFKNIDFNFNLSENEIKSAISSFRPGSSGGIDSLRPRHLKDLVSDEHGNHSFKLLSSIKSFITHLFKGSVPKDICKFFYGANLCAFNKKDGGIRPIAVGICFRRLASKVICSRIYEKLGNLFRPYQLGFGTKCGAEAAIHAIRRFLLYPHESDKVILKIDYQNAFNMVNRKTILSRVSEYLPEFLPFIAQCYDNPSLLSYGDQYIFSQRGVQQGDPLGPALFSLAIHPLILSLNTEINLWYLDDGTLAGNPKSVLDNFHKIIRGSKDLGLNLNFDKCELTVLSKDHSNILSNFLSVVPNLSVIPISNFNLLGSAFSPNEIEYSINKKTEFLKSLSTKLKFLDSHISYYLLKYSFAIPRMSYLLRCSPCWKSPELLCNFDNVLQSLVQDITNCDIKLNSWLQSTLPVKLGGLGIRDTSTLSISAFLGSINDVSGLLSKILPSNILATVDNDFSNCFVKWLSICNLQNQPQELPKKQKDFDFFICQARHKYITNMCQTSEDKARLLALEAPESNAWINALPSSSLGNLLDNKTFHISIALRLGLPVCGEHTCVCGENADIYGLHGLSCKKSAGRSSRHSQINDIIKRALISAENPSVLEPLGVCRSDGKRVDGMTLIPWKYGKQLLWDATCSHTLAKSYLDKTSNFVGAAARIAENKKHLKYKELEERFIFIPFAVETFGPLGDEAKGFINEICKKINCKKSRSFIIQKIGLAVQRGNAASVLGTIQGDLGLDEVHNF

SEQ ID NO: 18139 - protein, 947 aa, Paramacrobiotus metropolitanus
MAAATTSNLHYKKDGTLDLRFKTSRAARGAQQGPPMPTGSSAAPVFLSQLQTHPPMPSRLPKNARFVCAQAFGHALRKCCSQNVFESWRELLLFPKKAFVLPATRQLRKESLTTVIKRNVSSLSATTPLMAQQQRRGSRSTSQFDAERMWRQVASAFQCENTKGAIRAVISQDSVAPLNQATITALQEKHPPRPAAAQLPLPPHAETPFPVSPKEVMNSVYSFPAGSAGGYSDLRPQHVKDMLGRRDDVESDLCSTLMQFMDLILSGGVPDDVCPYFYGAKLIALSKPDGGIRPIAVGDTLRRMASKIVAARCQDEIGRLLKPIQLGFGTKGGAEAIVHATSRFLQFNHGGVRILVKLDFRNAFNMIGRDVVLRAVSKYIPAYFNYFMKSYGEWSHLLCGDELLMSQWGVQQGDPVGPLAFCLAVLELLRKLKSILKAAYLDDVTLGGTEEQIIEDIETVIQEGAELGLVLNFSKCEVFIFGGDENERSQAKENLLRKWPQLIILEQDNFSVLGAALNEVSVPVYLKTKIQDLKVMVERLQFLPSHHALYLLRNCFAIPKLIYLLRTSPCYECPDMLRSFDEILRGAVQRITNADISDILWLQMNLPVGRAGLGIRSADMLALPAFIASAYSVQTLASGIFPAYDGDFIDAVVQKWVDRYACTPPDELARKHQSAWDEPGIELMYSFARLHAYSDNVKRAVFLAASEPESGAWLNALPVPSLGNFLNDEQLRIAVGLRFGMDIVREHQCVSCGTRVQPNGHHGLSCLYSKGRWSRHCEMNRIVEKSFSAAGVPCQLEPPGMCGLNGKRPDGVTLVPVRDGQYVVWDATCSCTVASSYVDRSARQAGSAARVAESHKRNHYRFLQPPYSFYPVVCETFGVQSESTKELFKFLGCRIFEKTGEARSSSFLKQRFSIAVVRGNAAAVLGTLPRVKQFNNANDGIGCFGST

SEQ ID NO: 18140 - protein, 1201 aa, Plutomurus gul
MSVQNNKKLILTPSRNTRIARFPGETAPAGGAVEFVCTETGCPGRYATPNGLGLHMKRAHAAVANDAIDTKRKKPRWSEEEIAIMVSNEVRLIKEGNKAPYMNMALQGIPAISASGRSLDAIAGMRRSQAYRDRVQSKVVEHNVELPTPHDTPAIEVVDARDDVTENIRGAWSEQERTNIALNEFNLTKNGQKVLHINKALYEMSDKSRTISAIIGMRTSKKYLEVLKRVSTAGDSQNPRLGEPGTSRGLVSGNGVGAEVLDPRKNIKGNESLGIKNPNGWRDIEDYLVDLCRAVKPNPQYGEDGLNRIVAEAVEGNEFITDLTAYILTAIVKKGPRQRDDVKAGASRVKSVHEICPGDRGAACRPVGLSKHKATRGENGCGKTTTTSGKTGQKKRGPRAANRQERMKSYQQRYRNNRTRLINSILDGKADDPVVKPTPSIVAAWGNSFEHTPTNIDTTNMTPKPLFKTYCWGPITCGELDEARSRMKESSAGPDGLSIGQLKSIPTPILSKVLNLIMLHGRLPEFHELSRTTLIPKVPEPKAPSDYRPISVASVLVRLFHKILAKRVSDSVDLDVRQRGFIPVDGCAENIHILEGIISNAKQHCRSAYILSLDIRNAFGAASHHAITSALRYAGAPDPFVDYISDLYSGSKTLITSGKESVKVNINRGVLQGDPLSPMLFNLVIDQLLRALPTEVGASVNREVRTNGQAFADDMNLCSHTLPGAKLLLATVEGIAPTWGLEFNPKKCSYLALVASGKEKKLKVVTDLELKLHGEVLRGVDVDETWKYLGAYFGPNGINATETKLSTYLERIRKAPLKPQQRMYAIRVHLLPRLLYSLVMAPLRITNLNRLDRMIRASVRDILKLPHSTPRAYYYANRAGLGLLHLRAAVPSMTVARFDRMIKSKSEIVVAATDSSAYKNRLANARKALIVHEGVLMNSASKLQKYHQEKLYEMVDGNDLRETNSVPGVHSWMTDGTTMMSGQTYIEAVKIRVNAMPTKSRRARGNTQPRNCSAGCQRQETLHHTIQVCHRTHGGRIKRHDAVAKGLGQFLEGLRFQVVHEPHIRSGNTFFKPDLVCLKNNQAVVIDIQISGSYPLDSYFMNKASYYNNIAVEQYAKSLGAETVIYGALIISYKGLVSPMSYELLKSLGISSAKLKVLVVRSMELTTYIWHIFNRSTAYACDIKKARGKGKKRAAETLQIS

SEQ ID NO: 18141 - protein, 776 aa, Belonocnema kinseyi
MNKYSAPGPDCIKTFWWKKFSSTHQHLARILTLYLKSEEPIPEWLVEGRTILLPKIGNLADPKNYRPVTCLNTLYKIFTAILNDRIVRTIEPVWQEMYEQRGSKKCVAGCRENLLIDRCVCKDAKFYQRDLSMAWIDYRKAFDSTSHRLTICLLEMLKVHSQIIGRVKRLMPLWKTRFTISSGKNRVTTNKVTFQRGVFQGDTMSPLLFCLTLLPLSLALRHFNGYLCGKAADRKYKVTHVFYMDDLKIYAKNKEQLHLDLGIVERYTKEIGMEFGLDKCAKIYLKRRKLNGIPEDSELVDRSAIRHLCAGETYTYLGVPHSCIQDVTSIKDTLRSTYKRLIRQIWSSELLARNKVSATNMLAVPVVLYSFGVVPWTKNELRSLDIGTRKVMHMNNSMHLKSSVPRLYISRRQGGRGILSLECLHNRIILVTAHRVANGRDLLLKMVRNHEKVCKGAFLYKASEEAAETLGLDFSIRGEQNASNPIYLEYSLLKARIKKAQEKNFCEQLLDKRMHGIFHRNVKDQSMSCELTFAFLKLPGLNSGTEGFILACQDGVISTLTYHRHILSQDILDDSCRACHAHLEHLAHILSSCPTHAGTTYIQRHNAALRVIYYHLCHFYGINLNIAPINAPREIESIVENGKCRIYWNFTFSTIVSVAYSRPDMVLLDFEKRTMFVIEFSAPADKNIITKENEKKERYRDLIRELQRLYSEYSVKLIVFIIGALGGTKLSLANGLKSIPACQQYAKTLAGKMQKAAVLGTLCVLRVHEAFAGSSY

SEQ ID NO: 18142 - protein, 940 aa, Belonocnema kinseyi
MQQLAIKIGWARQDASCIQRVIDYITSGRNFTAKVRKFTRELQTRYHTLNKSKLLTIRKHIVERIRILSDAKRSLERRERWVRENQQFLSDPSRLLQDPPVTVEHPPKPEEVEVFWREVYEVQYRLEEDSENINSFKELCVALITPDKECPPIAAEEVKKVLSGMKNYSAPGPACIKTFWWKKFSSTHQHLARIFNSYLNSEEPIPEWLVEGRPILLLKIGNLADTKNYRPLTCLNTLYKIFTAILNDRIFRTIEPVWQEMYEQRGSKKGVAGCGEYLLIDRCVCRDAAFYQRDLSMAWIDYRKAFDSTSHRLIICLSEILKVHPQIVGCIERLMPLWRTRFTISSGKNRVTTNKVTFQRGVFQGDTMSPLLFCLALLPLSLALRHSDGYLCRKPGDRKYKVTHVFYMDDLKIYAENREQLHLALGIVEQYTKEIVMKFGIDKCAKVYLKRGQLNGIPEDPELVDRSAIRHLCAGETYTYLGVLQSRIQDVTSMKDTLRSRYKRLIRQIWSSELLAKNKVSATNMLAVSELLYSFGVVPWTKNELRSLDIGTRKVMHMNKSMHLKSSVLRLYISGHQGGRGILSLEFLHNRIILDTAYRVANGRDILRKIVRNHEEVGKGAFLYKAAEEAADTLGLDFNIRDEQNALNLIYLEYSLLKSRIKKAQEKNFHEQLLDKEMHGIFHRNVKDQSMSCELTFAYLKSPGLKSGTQGFIFACQVGVISTLTYRSHILSQDISDDSCRACHAHPEHLAHIVSSCPNHAGATYIQSHNAALKVLNYPLCHSYGNNLNIAPLNAPREIESIVENGKCRIYWNFIFSTIVSGAHSRPDMVLLDFEMRTMFVIEFSAPADKNIITKENEKKERYRDLIRELQRLYPEYSVKLIVLIIGALGRAKLSLANGLKSIPACQQYAKTLAGKMQKAVVLGSLRVLRVHKAFAGSSH

SEQ ID NO: 18143 - protein, 1045 aa, Belonocnema kinseyi
MTTPNIVVVSAVQNNRRRRAPDNGSANSADQSRAGGANENGFNAMDRRDLVTFGWTEQLIHDLLDYYDASVAREQGCMARLHALWCEKHPELSHFSQQRLRNHATLLRKWGYVSGTPTLPLLEQAGKKKREATLRPTAGRHPIDEERCFTTRRNINTKVSLKPKDLAEMDDELRGHFYGESDLWAINYCVYNAARALADANRKTKPTADHKTKRRMHQLAIKIGWARQYASRIQYVIDYIISGRNFTAKVRKFARELRTRYHTLNKSKLLTIRHRIVERIRILSDAKRSLEPRETWIRENQQFLSDPSRLFQDPPVTVEHPPKPEEVEVFWREVYEVQHRLDKDSENINSFKELCFALIIPDKECPPITTEEVKKVLRGMKNHSAPGPDCIKTFRWKKFSSNHQHLARIFTSYLKPEVPISEWFLEGCTILLPKIGNLADLKNYRPITCLNTLYKIFTAILNDMSVRAIEPVWQEMYEQRGLKKGVAGCRENLLIDRCVCKDAAFYQRDLSMAWIDYRQAFDSTSRRLIICLLEILKVHPQIVGCIERLMPLWKIRFTISSGKNRVTTNKVTFQRGVFQGDTMSPLLFCLTLLPLSLALRHSDGYLCSKPPDRKYKVTHVFYVDDLKIYAKNREQLHLALGIVERYTKEIGMEFGVDKCAKGYLKRGKLNGIPEDPELVDRSAIRHLCAGETYTYLGVPQSRIQDVTSIKDTLRSRYKRLIRQIWSSEHSARNKVSATNMLTVPVLLYSFGVVPWTKNELRSLDIGTRKVMHMNQSMHLKSSVPRLYISRRQGGRGILSVECLHNRIILGTAHRVANGRDPLLKMERNHEEVGKGAFLYKAAEEATETVGLDFSIRGEQNASNLIYLEFSLLKARIKKAQEKNFREQLLDKRMHGIFHRNVKDHLMSCELTFAFLESPGLKSGTEGFIFACQDCVISTLTYRRHILSQDIPDDSCRACHAHPEHLAHILSSCPTHAGTTYIQRHNAALRVLYYHLCHSYGIHLNIAPLNAPKELESTVENGKCRIYWNFILSTIVSVAYSRPDMI

SEQ ID NO: 18144 - protein, 1073 aa, Belonocnema kinseyi
MTTPNIVVVSAVQNNRTRRAPENRSANNADQSRAGGANENGFNAMNRRDLATSGWTERLNRDLLECYDESVAPERDYMARLHALWCEKLPELSHFSQQRLRNYAELLRKRGYVSGTPTLPQLEQAGNREREATLRPTAGRHPVDEERCFTTRRNINTKVSLKPKYLAEMDDELRGHFSGESDFWAINNCVYNAARALADANRKIKPTADHKTKRRMHQLAIKIGCARQYASRIQCVIDHITSGRNLTAKVRKFARELRTRYHTLNKSKLLTIRQHIVERIRILSDAKRSLERSERWVRENQQFLSDPSRLFQDPPVTVKHPPKPEKVEVFWREVYEVQHKLDEESENINSFKELCVALITPDKECPPITTEEVNKVLRGMKNYSAPGPDCIKTFWWKRFSSTHQHLARIFTSYLKSEEPIPEWLVEWRTILLPKIGNLADPKNYRPITGLNTLYKIFTAILNDRIVRAIELVWQEMYEQRGSKKGVAECRENLLIDRCVCKDAAFYQRDLSMAWIDYRKAFDSTSHRLIICLLKILRVHPQIVGCIERLMPLWKTRFTISSGKNRVTTNKVTFQRGVFQGDTMSPLVFCLALLPLSPALRHSDGYLCGKPADRKYKVTHVFYMDDLKIYAKNREQMHLALRIVERYTKEIGMEFGLDKCAKVYLKRGKLNGIPEDPELDNRSAIRHLCTGETHTYLGVPQSRIQDVTSIKDTLRSGYKRLIRQIWFSELSTRNKVSETNMLAVPVLLYSFGVVPWTKNELRSLDIGTRKVMHMNKIMHLKSSVSRLYISRRQGGRGILSLECLHNRIILGTAHRVANGRDPLRKMVRNHEEVGKGAFLYKAAEEAAETLRLGFRIRSEQNASNLIYLKYLLLKARIKKAQEKNFREQLLDKRMHGIFHRNVKDQSMSCELTFAFLKSSGLKSGTEGFIFALQDGVISTLTYRRHILSQDIPDDSCRACHAHPEHLSCILSSCPTHAGTTYIQRHNTTLRVLYYHICHFYGINLNIAPLNASREIESIVENGKCRIYWNFIFSTIVSVAHSRPDMVLLDFEKQTMFVIEFSTPADKNIITKENE

SEQ ID NO: 18145 - protein, 969 aa, Galendromus occidentalis
MSASDQPSTSRTHSQPDHQCPWCSFVTKYPVGLKKHISRMHKVEKARAEDAAAVAAVDADAASFDPTSYNIAAPPDAGSSRAMCPYCKRICASEKGLKTHIGHMHSRERSAALEASHQRGLHQSASSPLQSSPMSAPVPAVDPSPALSSLKQSLRVLPRIPQAARVSAARKFIHLLDDVASRNDLHSWTRLSEFSYRALNVSSHDRSKPLYVCVKNNIAAFDRRLTLPALSAGPRRLDLSDAQRAKAAEHRLAPRSDLRGAVRMLTSSESLVSPDDSRARAEMVAKHPLPHQDDQVPMLPLTPMPKAISSDCVLQALKSFPVSSSGGLDGLTVQHILDMLSVGGELRRLLLLNLARVCDVLARGLIPAEARDIVFGSWLIAAAKPSGGLRPIAVGSTLRRLAAKILLARVRGLLSAVLRPRQLGFATRGGTEIAIHSVRSFSHSTEKSVLLKVDFKNAFNSHRRDTMLRRTHELAPEIYRMVAQTYTSPTPIFFGDARIESTTGCQQGDVFSPALFCLVVQSTLESLQSELAVAYLDDFTICSQNPRDIVDDIKRIRANHSVHGLDVNPAKCEVFVRGFSQSESADIHRQISQALPGCRLLADESAVELLGAPVFETGIPRALETKSSVYETIFRRLQHMGSHVATYIMQRATGVPKLTHLLRASPAYKMNSLLDRLDDQFVSAFESILKISLTGDALTQLSLPTSLGGIGIPTPSRIALPAFAASCHAAEPEVLDILGRQSARVHLREEATAEFMTTYGSAPEDDDRCRQGVWTRVASESIMTELRLRLAASEVDSIRLGNAALPESGWWLQAIPSQNLGTLLSDVDFVRAVSLRLGLPIVEECACVCGSQIDRLALHRLSCYKLASGRLARHAAINDLLARALRQAGVPCSKEPQHLSPNDALRPDGMTMEPWTRGKRVIWDVTVKDSFAPSYRGIARNVRAVASRGEQDKRAKYESLRGEFLMILS

SEQ ID NO: 18146 - protein, 1191 aa, Caenorhabditis elegans
MAGGKWHSEEDVRNFRKRLKKTLQEEGYELYSVNSLAIPFQAPTAEPMDYKETRCKRSYASVQISPPAKRPDCKPDNISVPTKDCAANGSPQENGLNESPEEINTEHVVVAEKPANNISPRCRSTSELLFEMVKATASSGRSSLVSMTQDEFIRTSTIAEAVPLMSIKLPPRELPRKILPPIPPRKPTQTNGGQQGKQQKVPIGKPDTLIANVRNWFNNQLESYAMEGRSFQRLEWLTEVLTAAIQKTAAGDEGIVDTICKRNPPLEVAKGEMCTQTENKRKMTNNAARIADPIQSSKGAGDVKASYWKERARTYNRIIGSKEELCKIPIDQLEDFFRKSTSRTNVQESIMKEKSSKIPALEIGNWMEKKFTGKEVAFALRKTKDTAPGADGLRYHHLQWFDPRGELLAKVYNECQRHRKIPNHWKEAETILLYKNGDQSKPENWRPISQMPVIYKLYSSLWNRRIRAVPNVLSKCQRGFQERKGCNESVAILRTAIDVAKGKRRNLAVAWLDLTNAFGSIPHELIEYALTAYGFPQMVVDVVKDMYRGASMRVKNATEKSDRIPIMSGVKQGDPISPTLFNICLETVIRRHLESANGHQCLKTRIKVLAFADDMAILTDSPDQLQRELAKLDKDCTPLNLIFKPAKCATLVIQKGAVRSASIKLKGNAIRCLDENTTYKYLGVQTGSSARISAMDLLEKVTKELECVVKSDLTPPQKLDCLKTFALSKLTYMYGNSIPLITEMKMFANIVMRGVKVMHGIPVRGSPLEYIHLPVKDGGLGVACPKTTCMITFLVSTLKKLWSDDEYIKTLFTSLAEEVVKKESKKSTVTMDDIADYLNVEERINRSEFGYNSITRLRDVMRNLAITGDSPLHKLKMVAKNGKIALLVQATSENTERIYTEEDAKKLQRSLKDQVNKALKHRFNTTKVVKSEVVRVVQQHPASNRFVTKGGNLSLACHRFVHKARLNLLACNYNNYDKSKPKVCRRCGKDLETQWHILQNCPFGFSKKITERHDAVLHKVKTLIENGGKKNWTMKVDEELPGFSRLRPDICLKSPDGKQVILADVACPYEHGVEAMERSWQGKIDKYETGFAHLRKSGTKLTVLPIIIGSLGSWWKPTGDSLKELGIKGSVINSAIPELCATVLEHSKNTYWNRIFGEAYIPNPMRNGHAKPAGNGWKKERMQKAPVRATN

SEQ ID NO: 18147 - protein, 1687 aa, Caenorhabditis elegans
MLRRKGRHRMVMVNSVKWQPSAHAEAIGTGKSWAPQRSQASEHGWQSNAMFDPPNRILFARDSWSLNQSTHLQNQRSGSGLGIRPGQVRNNMVGGGPHRAGDPKRRVELVSIQGSEVTVRTIYPSDEIFSCYSKSCDIKTKAGYGPEDLKHLTRHIKNEHGLKARWAYQCGLCNEKSDPSVSEGHKWMEAHMVAVHQSSAEKRIKSYQKCTGARVAEQLQAAAPSLTVPGKHKSGSRDAAKDSMTPTKDDDPKTRIYQTRSVVKKSTQKTAEPTDEGSRGPKYASIFQKSVKARKSLALLCELSSPKPMNPLPTNELTLKEGNSRELAKEEAPSEGIDDIVIIDLDESEESPPRRKRFNTWCLDHESSREAWLDDTAIFWYISYLCRGSTKYSALDPCLWSMYKVKGSRYILDRLESSITYFFPICEEDHWTLLVLKDNSYYYANSLHQEPRGPVRDFINDSKRARKEFKVQVPLQRDSFNCGVHICLMTNSIMAGGKWHSEEDVRNFRKRLKKTLQEEGYELYSVNSLGIPFQAPTTEQMDYKETRCKRSYASVLTQISPPAKRPDCKPDNNIFVPTKDCAAEGNPQEKGRNESPEEINTEHIVVAGKPANNISPRCRSTSEMLFEMVKATTSSGRSSLGTMTQDEFIRTSTIAEAVPLMSIKLPPMELPRKILPPIPPRKPTQTNGGQKGKQQRVPTGKPDTLNAKVRNWFNNQLESYAMEGRSFQRLEWLTEVLTASIQKAAAGDEGIVDIICKRNPPLEVAKGEMCTQTENKRKTTNNAARIADPIQSSKGAGDVKASYWKERARTYNRIIGSKEELCKIPIDQLEDFFKKSTSRTNVQESIMKEKSSKIPALKIGNWMEKKFIGKEVAFALRKTKDTAQGADGLRYHHLQWFDPSGELLAKVYNECQRHRKIPKHWKEAETILLFKNGDQSKPENWRPISLMPVIYKLYSSLWNRRIRAVPNVLSKCQRGFQEREGCNESLAILRTAIDVAKGKRRNLAVAWLDLTNAFGSIPHELIEYALTAYGFPQMVVDVVKDMYQGASMRVKNATEKSDRIPIMSGVKQGDPISPTLFNICLETVIRRHLESANGHQCLKTRIKVLAFADDMAILTDSPDQLQRELSKLDNDCTPLNLIFKPAKCASLVIQKGVVRSASIKLKGNAIRCLDENTTYKYLGVQTGSAARISAMDLLEKVTKELECVVKSDLTPPQKLDCLKTFTLSKLTYMYGNSIPLITEIKMFANIVIRGVKVMHRIPVRGSPLEYIHLPVKDGGLGVACPKTTCMITFLVSTLKKLWSDDEYIKTLFTSLAEEVVKKESKKSTVTMDDIADYLNVEERINRSEFGYNSITRLRDVMRNLAITGDSPLYRLKMVVKNGKIALLVQATSESMERIYTEEDAKKLQRSLKDQVNKALKHRFNTTKVVKSKVVRVVQQHPASNRFVTKGGNLSLACHRFVHKARLNLLACNYNNYDKSKSKVCRRCGKDLETQWHILQNCPFGFSKKITERHDAVLHKVKTLIESGGKKNWTMKIDEELPGFSRLRPDICLKSPDEKQIILADVACPYEHGVEAMERSWQAKIDKYETGFAHLRKSGTKLTVLPIIIGSLGSWWKPTGDSLKELGIKGSVINSAIPELCATVLEHSKNTYWNHIFGEAYIPNPMRNGHAKPAGNGWKKERLQKAPVRPTN

SEQ ID NO: 18148 - protein, 1278 aa, Parastrongyloides trichosuri
MSSNLKSSNKDNNLNNLDLGEIHQILKLLPKCRITEDWKVIIDAENFNQVEEISKKIKKPVQSIMKYLDFEFKNRMMLDLPITTLPIPKEDVTKKRKAVLEKFQLKHRELPQSINDPPINEDVLSRSCIPNQLRSLNDEKFSHHRRKRLSTYETLISALNNENPGKDLCSPIKKTRMSEHLLDNTTIDTSFDVEMHWDKIENEIIPKETYADKLKKNLNSGNKKLQTKKKNKNNTKLRKPFKDLNPEERWKILEKSKGPIFRYRVNKWTPIDTIDRLLNTKLEKYNELWKQPSVSEKDASTNWRKAVEQLKIAAKLLKSYDNTKIDIDGMKIDNIVKIKRARNKTMRFINRVNNLIHQRNSTNRKEKASANFKIRRIIQTCRKKRKDVKMENIEQILHFNNDKVKNLDKRTEIVQKKNDDQKVRFKFNLKPSLKSLGPSIQQKVDIPNKKLEDFLIDLFKEENTKDNGLLQQWIEETNFEQQKRTFMWNEELFENTLKYSRGWKAAGLNKIYLSIFKQLNSAKTFLKNWCFGILNNTIKLSKYDVAGKAFPIYKSGDRMLPQNYRFINVLNCHFKILSKMMNDMIREHLINILPFEQQANQKGKDGLLDGIIINRILQNSSGSDGSQLNQAWIDFKRAFDTISHSKLKLILTKVGIDKRLLDIIFTSMKHWSFKINSSKSKTWIKLHKGIYQGDSMSPTLFILSILPLSHILNKEATIALSPNIKLNHIKFYDDIKLFAKTPEHLSTLVSRVEKFGEEIGLLTNAKKCAYTIDNKENNISTDEMAYSDYNELKATYKYLGIEEDQYGSNTKENINKLYESLKKSLDLVLSSPLSVGNMVRAINTCILPKVLFVFSHQGEPTIRNRIADKIDSMIRKHMNEHKVKMDSISNARLYLSKQHMGLGLKNTHLELDKINLKNYVHIHYTKFFNELRDKLAGFKKLFEELTRKYGLKIEYLENQLKVNDLYFESEKECKRYITECLDKIDEELWLKRYSQKRIFPATVVEQKLFSPWTWHNDLSPKMYKNIIMIQEAVHPQLNGPPNPNSKCGLINAEGHRCNKYDHPKHVLSECEQNNGNKKIRHNQVLYEITKQIAMVKLMKYISFEDSRNEMKFKNFTMTVDQPFSFNITLYHSRPDLIFYFKDKIIVAELSISSYENLDVAANLKRQRYTLYGEKELRAPIPREKEHEYIGKNNFVKSLRIRENKEVDFIPLIIGNFGELNSSRYEDWKRLFEALEIKGFDKIISKISRRTAIESEFLIYKYLKTTNRIIKKQDEEELL

SEQ ID NO: 18149 - protein, 949 aa, Copidosoma floridanum
MEETSLLARREAELTIQGVRFVNQALHESFPHRTIESIKGHRRPQDYKALVQQYIVEQHDISQLEEEDSSDDQQAARGTTTPSTTPSPHPLIEYLGSLPEMPPDTGYQSERLDEIVRSASNGASNKTVAERLSLYLRDILPRPHTTRAARHLPPPTTLTNRQKRRKDYAATQRHWKTNRSRCINAILGNIEDARQPEQARMEPYWTTVFTQPATNAEPKCEDRPVQEDIMAPITSSDIKEARPLLAVAPGPDGLTARQFRAIPAAVLTRVYNLILWSRTMPSHLACSRTIFIPKKDGASEPGDFRPISVTSVLCRVLHKILAQRIDRLVSLDDQQRAFRAGIDGCRDNTTLLDALLRSRFTEHRSTFLATLDLAKAFDSIEHTALMAAAKAAGLPPSLIEYLRHFYNNATTTLSGEGWTSEPIRVTRGVKQGDPLSPVLFNIVVDHLLRSLPQECGSTFAGKTTRAMAFADDMVLLADSPIGLQHLLDRTNTYLESCGLRLNIGKCHTVAVVADGHLKKTVIDARRTFRINGQPLRALTREDSWKYLGLEYTPEGRKREKLTTTLCPLLERLSRAPLKPQQRLFALKVFALPGIYYRMSLGRVNISELKAVDRAVRAFTRQWLALPNDTCTGYFHAPTSEGGLGIPSVRWMAPLHRQQRLLGLVPGNQAENCTSPYINKELDQCKRRLTERGTTYLSFNDIKKRWANLLHASIDGVALKESHHVPEQHQWISDGTTLLTGKDYVACHKVRIGALPTRSRTTRGRHGERLCRAGCLRQETNNHVLQQCPATHKQRIDRHNAVLAYIGKNLRRQGFNVTSEPHIKTREGLRKPDMVATMGRLGLVIDAQVVGEQTNLGSAHAAKHRKYANNPDIDPAIRQETGVNTIRHMPVILSSRGIWCKKSASELLAINIITKRDLAIIATRVLLGGMIAHRCFSRTTTAVQEAEGIG

SEQ ID NO: 18150 - protein, 1725 aa, Caenorhabditis latens
MTNVYFKPVNTDQTNKTGDNSRNTMSNSQCEMTWNPAARTYAQAASTNPADDKTVTVLGYKYNLLKLGNAPQTTKRSPPKPSRGGARISSVYTLTDELEITHREEGKITLVIDLPNKNNILCPLCRGCTQRRLRGAHHHKHMKEHMKNEHQLEAKFIYKCTMCNEYEPENKQGAKWIVKHLEKVHNYKYDESEVIQKVEPLTTRQQIANDFNNAAPFIDIRKPKETVVEEKKTENGALLKFLTTSKKDDQVKSPSEDIPDMESPEKETQVPTIDPKGNNSPSKSSRKSSQSSASSVCQELQEIITLSEDEDPKGARPKPGINVWSLINETGKDAYIDTDIMMAFLMMRAENYDSVNIIDPLNYQFPARVDLVPLIQRNLEDGKKRVVFPICSDEHWTLLTISNGIAVFYDPTGSRMSNSIEELVNELGLIIPTEEDEKPRQRDGYNCGVFVMKMAEAFIHDTEWEMEEVEEDVKNFRRNLLEELKPKYEIFAEKIKYYNSPGKSFTQSRSTSRSSQCVICPTCSRSATPVMDVGNMEVDPAPLHQETPKSREPKKEEEGWTLVGKNRKRGVVTERSPNISPEPKRQFTGPEITVSPGKFLPLAGESEEMEVTTNDSPPTKEPTTEPKVTPSLPARRIVSPELTKKQTSKKKGKHGKRNQQPKNSQPPKGEPTKKAQPKGEPAKLIEQVRSWFDKQMKSYQEQGSNIQTLTWIADSLTAAIFKANNGNKYLVDKITARCPPPLLNEGEMATQTSRRTETVKPKDRFVKESNEPLRKQYAKNRAKTFNVIIGKHSARCEIDINVVENHFRKTLKAQPVTEEALNTVCSGIRKANVDPSIEGPISSGEVKAILAKIKDTSPGTDGVKYSDLKWFDPEGERLALLFDECRQHGKIPSHWKEAETVLLPKDCTEEERKKPENWRPISLMATVYKLYSSVWNKRISSVKGVISKCQRGFQAIDGCNESIGILRLCIDTATVLNRNLSCSWLDLTNAFGSVPHELIRRSLASFGYPESVINIISDMYDGASMRVKTAEQKTQNIMIEAGVKQGDPISPTLFNICLEGIIRRHQMRKIGYNCVNKEVRCLAFADDLAILTNNKEEMQDVLSQLDKDCRSVALIFKPKKCASLTINNGSVDKYARIKIHGTFIRTMSDGDTYKYLGVQTGNGGRASEAESLTLIAKELQMVHETDLAPNQKLDALKAFILPRLQHMYRNATPKLTELKEFENTVMKSVKMYHNIPIRGSPLEYVQIPVRNGGLGVMSPRFTCLITFLASTLFKLWSDDQYISTIHKKALSRIAAKVMGLKTQTATLQEQCDYLNTKKAITKGGYSLFSRMNEAIRTLSVNLGAPLKSMQFIPENGEIALEVQASENSQIKVFTKADSMKLVTKLKDLVRAAMLKNFLENKKVKSKVVQALQLHPQSNKFVNDGKNISISSQKFVHPARLSQLICNGNSYGKDHVKDCRWCGYECESQAHILQHCKYNFSSGITRRHDRVLNRILHEVIKGRKNNEYYDIMVDTEPGPTRERPDIIMIQKDGPEVLLADVTVPYENGVVAMEAAWEWKIEKYSHFIEYFERLGKRAVILPLVVGSLGTYWPDTSNSLRKLGLSDGQIRNVIPDISMIALESSKQIYWRHIFGDSYRIVTELYCTKDEQEVRFGDEPMENVKVSDRFQPLKTREHEKKSEEEIKRRSKSKKGKHWRRSKKQTDSRQSGKSYQNQGFQESVGQGGSR

SEQ ID NO: 18151 - protein, 1720 aa, Caenorhabditis remanei
MTNVYFKPVNDNQTNKTGDNSRNTMSNSQREMKWKPVARTYAQAASTNPADDKTVTVCGYKYNLLKLGISPQTTKRSPPKPSRGGARISSVYTLTDELEIKHREEGKITLVVDLPNKNNILCPLCRECTQTRGRGSSFTKHMKLHMKDKHQLKATFIYKCSMCNEYEPKDKCGTKWIQTHLQKVHNYKYDESAIVVPAPPNTRQQIANDLNDAAPFVDIRKPKAVVVEEKKTENGALLKFLTKSNKDEQEHSQSNDSPNVESPEKETQALTIDPKGNNSPSKSSTRSSQSSASSICQETQEIITLSEDEDPKGARPKPGINVWSLINETGKDAYTDIMMAFLKMRVENYDSVNIIDPLNYQFPARVDLVPLIQRNLEDGKKRVVFPICADEHWTLLTISNGIAEFYDPTGSRMSNYIEELANELGLIIPKEQDEQPRQRDSYNCGVFVMKMAEAFIQDTEWEMEEVEEDVKNFRRNLLEELKPNYEIFAEKIKYYNSPGKSFAQSRPTSRSSQCAVCPTCSRSATPIMDVGNMEVDPIPQHQDTPKSREPEQDEGWKLVGKNRKRRVVTERSPNISPEAKRPFIGPEITVSPGKFLPLAGETEEMEVTNDSPPVKEPITEPKVTPSLPAMKIASPEVTKKQTSKKKGKYGKKNQQTKKAQLPKGESTKKAQPKGEPTKLIEQVRSWFDKQMKSYQEQGSNIQTLTWIADSLTAAIFKANSGNKYLVDKITARCPPPLLNEGEMATQTSRRTEAVKPKDRFVKESNEPLRIQYAKNRAKTFNVIIGKHSARCEIDINAVENHFRQTLKAQPVTEEALNTVCSGIKKVKVDPSIEDPISPGEVKAILAKIKDTSPGTDGVKYSNLKWFDPEGERLALLFDECRQHGKIPSHWKEAETVLLPKDCTEQERKKPENWRPISLMATVYKLYSSVWNRRISSVKGVISYCQRGFQAIDGCNESIGILRMCIDTATVLNRNLSCSWLDLTNAFGSVPHELIRRSLAAFGYPESVINIISDMYNGSSMRVKTAEQKTQNIMIEAGVKQGDPISPTLFNICLEGIIRRHQTRKIGYSCVGNDVRCLAFADDLAILTNNKDEMQDVLNQLDKDCRSVALIFKPKKCASLTIKKGSVDQNARIKIHGTPIRTMSDGDTYKYLGVQTGNGGRASESESLTQIAAELQMVHDTDLAPNQKLDVLKAFILPRLQHMYRNATPKLTELKEFENTVMKSVKMYHNIPIKGSPLEYVQIPVKNGGLGVMSPRFTCLITFLASTLFKLWSDDEFISSIHKKALSRITAKVMGLKTQTATLQEQCDYLNTKKAITKGGYNLFSRMNEASRTLSVNLGAPLKSMQFIPENGEIALEVQASENSQIKVFSKADSMKLVTKLKDLVKSAMLKNFLENKKVKSQVVQVLQHHPQSNKFVNDGKNISISSQKFVHPARLRLLVCNGNSYGEDHPKDCRRCGYECESQAHILQHCTYNFSTGITQRHDRVLNRILHEVIKGRKNNDYYDIMVDTEPGPTRERPDIIMIQKDGPEVLLADVMVPYENGVVAIEAAWEWKIDKYSHFIEYFARQGKRAVILPLVVGSLGTYWPDTSNSLKMLGLSDGQIRNLIPDISMIALESSKQIYWRHIFGDSYRIVTELYCTKNKQEARFGDKPMENVQVSDRFQPFKTREREKKSEEEKKRRSKSKKGKTWRGSKKQTDSRQSGKSYQNQGFQRSVGQGGSR

SEQ ID NO: 18152 - protein, 1700 aa, Caenorhabditis remanei
MTNVYLKPVNDNQTNKTGDNFRNTMSNSQCEMMWNPVARTYAQAASTNPADDKTVTVLGCKYNLLKLGNTPQTSKRSPPKPSRGGARISSVYTLTDELEITHREEGKITFAIDLPNKNNILCPLCRECTQTRGRGSSFTKHMKLHVKEKHQLDATFIYKCSMCNEYEPEKKCGTKWIQTHLQKVHNYKYDESAIVVPVPPNTRQQIANELNNAAPFVDIRKTKAAAVEEKKTENGALLKFLTTSKKDNQVKSPSEDIPDTESPEKETQALTIDPKENNSPSKSSIKSSQSSASSICQEIQEIITLSEDEDPKGARPKPGINVWSLINETGKDAYIDTDIMMAFLKMRVENCDSVNIIDPLNYQFPARVDLVPLIQRNLEDGKNRVVFPICADEHWTLLTISNGIAAFYDPTGSRMSSYIEELVNELGLIIPKEQDEQPRQRDSYNCGVFVMKMAEAFIQDTEWEMEEVEEDVKNFRRNLLEELKPNYEIFAEKIKYYNSPGKSFAQSRPTSRSSQCAVCPTCSRSATPMMDVGNMEVDPVPQQQETPKSREPEQDEGWKVVQKARKRGVVTERSPNISPEAKRQFTGPEIKVVSPGKFHPLVGETEEMEVMCDSPPTKEPNTEPKVTPSLPAMKIASPEVTKKETSKRKGKYGKKNLQAKTTQPKGESSKKAQPKGGPTKKAQPKGEPAKLIEQVRTWFDRQMESYQEQGSNIQTLTWIADSLTAAIVKAHNGNKYLVDKITARCPPPLLNDGEMATQTSRRTEAVKPKDRSVKESNEPLRIQYAKNRAKTFNVIIGKHSARCEIDINVVENHFRQTLKAQPVTEEALNTVCSGIKRAKVDPSIEDPISGGEVKAILAKIKDTSPGTDGVKYSDLKWFDPEGERLAMLFDECRQHGKIPSHWKEAETVLLPKDCTEEEKKKPENWRPISLMATVYKLYSSVWNKRISSVPGVISRCQRGFQAIDGCNESIGILRMCIDTATVLNRNLSCAWLDLTNAFGSVPHELIRRSLASFGYPASVINIISDMYDGSSMRVKTAEQKTQNIMIEAGVKQGDPISPTLFNICLEGIIRRHQARKIGYSCVSNDVRCLAFADDLAILTNNKEEMQDMLNQLDKDCRSVALIFKPKKCASLTIKKGSVDQFARIKIQGMAIRTMKDGDTYKYLGVKTGNGGRASESESLTQIAAELQKVHDTDLAPNQKLDVLKAFILPRLQHMFRNATPKLTELKEFENTVMKSVKMYHNIPIKGSPLEYVQIPVKNGGLGVMSPRFTCLITFLASTLFKLWSDDEYISSIHKKALSRITAKVMGLNNQKATLEEQCEYLNTKKAITKGGYSLFSRMNEAIRTLSVNQGAPLKSMRFIPENGEIALEVQASENSQIKVFSKADSMKLVTKLKDLVKAALLKTFLEIKPVKSKVVQVLQLHPQSNKFVNDGKNISISTQKFVHPARLSQLVCNGNNFSKELPKNCRWCGYECESQAHILQHCTYSLSSGITQRHDRVLNRILQEVIKGRKNNNFYDIMVDTEPGPTRERPDIIMIQRDGPEVLLADVTVPYENGVVAIEAAWDWKMKKYSHFIDYFARLGKRAVILPLVVGSLGSYWPDTSNSLRMLGLSDGQIRNLIPDISMIALESSKQIYWRHIFGDSYRIVTDLYCRKDQQEIRFGDEPMENVQVSDRFQPFKTREREKKSEEEKKRRSKSKKGKT

SEQ ID NO: 18153 - protein, 1055 aa, Caenorhabditis remanei
MEVTCDSPPAKEPTTEPKVTPSLPAMKIASPEVTKKQTSKKKGKYGKKKQETKKAQPPKGEPTKKAQPKGEPAKLIEQVRTWFDRQMKSYQEQGSNIQTLTWIADSLTAAIFKANNGNKYLVDKITARCPPPLLNEGEMATQTSRRTEAVKPKDRFVKESNEPLRFQYAKNRAKTFNVIIGKHSARCEIDINVVENHFRQTLKAQPVTEEALNTVCSGIKKAEVDPSIEGPISSGEVKAILAKIKDTSPGTDGVKYSDLKWFDPEGERLAFLFDECRQHGKIPSHWKEAETVLLPKDCTEEERKKPENWRPISLMATVYKLYSSVWNRRISSVKGVISDCQRGFQAIDGCNESIGILRMCIDTATVLNRNLSCSWLDLTNAFGSVPHELIRRSLAAFGYPESVINIISDMYNGSSMRVKTAEQKTQNIMIEAGVKQGDPISPTLFNICLEGIIRRHQTRKTGYNCVGNDVRCLAFADDLAILTNNQDEMQNVLNQLDKDCRSVALIFKPKKCASLTIKKGSVDQYAKIKIQGMPIRTMSDGDTYKYLGVQTGNGGRASESESLTQIAAELQMVHDTDLAPNQKLDVLKAFILPRLQHMYRNATPKLTELKEFENTVMKSVKMYHNIPIKGSPLEYVQIPVKNGGLGVLSPRFTCLISFLASTLFKLWSDDEYISSIHKKALSRITAKVMGLKTQKATLQEQCEYLNTKKAITKGGYSLFSRMNEAIRTLSVNLGAPLKSMQFIPENGEIALEVQASENSQIKVFSKADSMKLVTKLKDLVKSAMLKNFLENKKVKSKVVQVLQHHPQSNKFVNDGKNCIISCQKFVHPARLSQLICNGNSYNKDLPKNCRWCGYECESQAHILQHCTYSLSSGITQRHDRVLNRILQEVIRGGKDNNHYDIMVDTEPGPTRERPDIIMIQKDGPEVLLADVTVPYENGVVAIEAAWDWKMQKYSHFIDYFARLGKRAVILPLVVGSLGTYWPDTSNSLRMLGLSDGQIRNLIPDISMIALESSKQIYWRHIFGDSYRIVSDLYCRKDQQEIRFGDEPMENVQVSD

SEQ ID NO: 18154 - protein, 1763 aa, Caenorhabditis brenneri
MASKSMHNNLSKSISYHVNRSMTLKPNDMRYHSSNHPAPCTSDNHWRSIQKDVRRPDSSTIEEKSRYNRSIGIPDSLKERSNGNTVCNRSSQPPSGPQDVRLTNSPFLDDRRRLVNCETTLGSYREWTDKPTMGKMTYAAVTKGAPPRPQTGGARLSTNLLADEMEIKYRDTNDIRLVIDLPNPHLIKCPLCKSCISARGRGANALKYMKRHIADAHHLNADFNYKCSMCQEHEPEKGCGAKWIVSHLKRVHGYTLEDTPSTAKPSTRQQIANVFNDNAPFVDSRKTSDAPEKKSREAGLGKFLAPTKSEDTREKTPPSTRKSSESSEASIQSTIQETLSESSDTLTVQEIVNISSEDEMDEETPKRRVNVWALINENGKDAWIDSDLMVIFLESRARGYESCSIIDPLNFICADMSYLTTIVRRRMEEGYKKIIFPLCANDHWTLVTITGSTATFYDPMGNEPTETVKKMIDELDLEMQLAPSNSPRQRDSWNCGVFVMKMAEAYIKDTQWDLTDVDTDVKTFRRSLLTELKAKFNIFAEDIQTYRPPSRKALKRNSQSPVVVCHKCSRPATPIQDVSRMEVEEAPVLVPTPEELPQEWTFVGKNRKRGVTSRTPNTSPEAKRPAFPPVPLKSANRWHFPEDEPENMEVSCTEEVKSSIPPKPPKIPNLLAMKIASPVPLKRGNPSKKHGKGHMMNTARKGPTKKEMPKGEPAKLIVKIRNWFDEQLKMYKDEGSNLQRLTWLSDSLTAAIGKAFNGNKYIVDQIIKRNPPPLVEKGAMSTQTSRKRDEFKPRERMAQEPNEPLRIQYAKNRQKTFFKIIGKQSEQCTINIETVEQHFRKTLKAPVVSENAIKTVCGSIKKVLMPKTIEDPISSVEVESILTKVKDTSPGTDGVKYSNLRWFDPEGERLAKLFEECRKHREIPSHWKEAETILLPKDCSDEEKKKPENWRPIALMATIYKLYSAVWSRRISGVQGVISPCQRGFQSLDGCNESIGILRMCIDTASVLNRNLSCSWLDLTNAFGSVPHELIRRSLESFGYPQSVIQIVTDMYKGATMKVKTADQKTQSIKIEAGVKQGDPISPTLFNICLEGIIRMHQMREKGYDCVGHKIRCLAFADDLAILTNNKDEMQEVIEKLDADCRSVSLIFKPRKCASLTIVRGSVDKYAKIRINGDTIRTMSDKDTYKYLGVKTGVGGRASETEALIQVVKELQKVHETDLAPHQKLDILKTFLLPRLQHLYRNATPKLSELREFENVVMKSVKRYHNIPIKGSPLEYVQIPVKKGGLGVLSPRLTCLITFLTSTLCKLWSDDPFISSIHKDALSRITVKAMGLTTQSATIKETCEYLNTRKAVTKGGYSLFCRMNESLRTLSVIQGAPLKSMEFIPVNNEIGIAVQATKDSEIKVFTKADSLKLMSKLKDLVRSAMLKRFLEEKSVKSRVTQVLQHHPQSNRFVRDGRNCSIAAQRFVHPARLNLLSCNANTYDVNHPKGCRRCQADFESQQHILQNCHYSLAGGITQRHDRVMNRILQEIGNGRKAHYKIMVDMETGATRERPDIIMEERDGPEVLLADVTVPYENGVQAVERAWDKKIEKYKHFLDYYRKIGKKATILPLVVGSLGTYWPDTSHSLKMLGLSDGQIRNVIPEICQIALESSKNIYWKHILGDSYKTVEELFCQRNNKEVRFEGKGEKHHVSQRFQPLKCEKVRTMKSTKEEGRSRSNAKKGPNWRRSKSESDGRSVSKGRYWRDPSNKPPHSKMTQSALAKR

SEQ ID NO: 18155 - protein, 1760 aa, Caenorhabditis brenneri
MATKSMHKLLSNNSHPVNSSTTRKTNDMRYHRSNNPVARTSDNQRSPIPKDIRRPDQSTIEEKNRFTRSINAPESLNNQNSVRSMSNPSPSGPQDVHLSNLPSLDDRRRLVDIETTLGSYREWTDKPMMGKVTYAAVTKRTPPRPQTGGARLSTNLLTDEMEIKYRDTNDIRLVIDLPNPHLIKCPLCKNCISARGRGAGALKYMKRHIADAHHLNADFVYKCSRCQEHEPESVCGAKWIVNHLKRVHGYTLEDAVSTAKPSTRQQIANAFNDSAPFIDARKTSDVPEMKSREAGLQKFLAPTKSEDTREKTPPSTRKSSECSEATNQSTLQETLSESSDTLTVQEVINISSEDEMGEEPPKRRVNVWALIHENGKDAWIDSDLMTIFLESRARGYDSCSIIDPLNFICTDRSYLTTIVRRRMEEGYKKIIFPLCANDHWTLVTITGSTATFYDPMGNEPTETVKKMIDELDLDMQLAPSNSPRQRDSWNCGVFVMKMAEAYIKDTQWDLTDVDTDVKTFRRSLLTELKAKFNIFAEDIQTYRPPSRKALTRKSQSPVVVCHKCSRPATPILDVSRMEVEEAPVPVPTPEEPPQEWTFVGKNRKRGVTSRTPNTSPEAKRPAFPPVPLKPPSNRWNFPEEETEKMEVSSADEAKNSTPPKPSQIPSLLQMRISSPVPLQRGNPSKKHGKGHKKNTARKGPTKKVMPKGEPANLIVKIRSWFDEQLKMYKDEGSNLQRLTWLSDSLTAAIGKAFNGNKYIVEQIIKRNPPPLVEKGAMSTQTSRKRDEFKPRDRMAQEPNEPLRIQYAKNRQKTFFKIIGKQSEQCTINIDTVEQHFRKTLKAPVVSENAIKTVCGSIKKVLMPKTIEDPISSVEVKSILTKVKDTSPGTDGVKYSNLRWFDPEGERLAKLFEECRKHREIPSHWKEAETILLPKDCSDEEKKKPENWRPIALMATIYKLYSAVWSRRISGVQGVISPCQRGFQSLDGCNESIGILRMCIDTASVLNRNLSCSWLDLTNAFGSVPHELIRRSLESFGYPQSVIQIVTDMYKGATMKVKTADQKTQSIKIEAGVKQGDPISPTLFNICLEGIIRMHQMREKGYDCVGHKVRCLAFADDLAILTNNKDDMQEVIDKLDADCRSVSLIFKPKKCASLTIVRGAVDKYAKIRINGDAIRTMADRDTYRYLGVKTGVGGRASETEALIQVVKELQKVHETDLAPHQKLDILKTFLLPRLQHLYRNATPKLSELREFENVVMKSVKRYHNIPIKGSPVEYVQIPVKKGGLGVLSPRLTCLITFLTSTLCKLWSDDPFISSIHKDALSRITVKAMGLTTQSATIKETCEYLNTRKAVTKGGYSLFCRMNESLRTLSVIQGAPLKSMEFIPVNNEIGIAVQATKDSEIKVFTKADSLKLMSKLKDLVRSAMLKRFLEEKNVKSRVTQVLQHHPQSNRFVRDGRNCSIAAQRFVHPARLNLLSCNANTYDVNHPKGCRRCQADFESQQHILQNCHYSLAGGITQRHDRVMNRILQEIGNGRKAHYKIMVDMETGASRERPDIIMEERDGPEVLLADVTVPYENGVQAVERAWDKKIEKYKHFVEHYRKLGKKATILPLVVGSLGSYWPDTSHSLKMLGLSDGQIRNVIPEICQIALESSKNIYWRHVLGDNYKTVESLYCQRNNKEVRFKGEGEKHHVSNRFQPLKSEKVRTMKSTKEEGRSRSNAKKGPNWRRSKSESDGRSVSKGRYWRDPSNKPPHSKMTQSALAKR

SEQ ID NO: 18156 - protein, 965 aa, Cryptotermes secundus
MSERRRLPKLEENKKLVCLKEQVNGIIKELLEENQINITEVNHLIYAAATVITETTIKPRKTMTTGRFKDAWKLRIQKQISKWRKDLSILTESGSGSDNIKLNTKKRKIFQKYKMTNAREVAELIEKLKQKIQAKAQRIRRYEKRKNQYIQNKMFKENANRFYRHLGAKAIEVTAHPNMQEVEFYWQAIWEMETRHNEKAEWIRREEKGREGTSNMKWMPIKTTEFTLVLAKTHNWKSPGSDQIQNYWLKAFPVTHSYIVEAFNKIIEEPQQMPEWLTTGITCLLPKSKNTMDPKNYRPITCLSTMYKMLTGIIARRISVYLEEHNLLPEEQKGCHQGSKGCKDQLLISKAILEDCRRRKKNLNMAWIDYQKAFDRVPHSWIEKSMELVGVNDRIVKFCKHSMEKWNTRLQLRTNQELMQSQPIKINRGIFQGDSLSPLLFCIALTPLTHELNRSGCGYQVHGSERKIGHLLYMDDLKLLGKSEEELRDEIKIVKTFSSDIKMEFGLEKCARISIKKGKVQRKEHVENTGENEINELETNGAYKYLGIEENHQIEHKKEKERLKKEYVRRLRLILNTELNAKNKMQAIGSLAVPVLRYSFGIINWHKEEIQKLDRKTRKMLTTYGQHHPRADIDRLYVPRKEGGRGLIQIEAAYVAETTNLAEYIEGTEDQLMKIVRTHQRNTSSSPNTACKHTNFLQKKAIAQNTKEKWEKKRMHGQYPRSLDDTLVDKEQTYRWLKFGGIKGETESLIVAAQDQAISTNYFKRKILKEEIGSKCRLCKEYEETIDHLTSGCPVLAKNEYIVRHDKVCMHLHYSICKEFGIEVPDNWYSHVPKSVCEHEDITVLWNQGVQTDREVLANRPDIIIKNKQKKTCILIDVSVPSDRNVVQKEAEKKLKYKNLSIEIQRMWNMKCFVIPVIIGATGTVTRGLRKYLELIPGKHSIDSLQKTAILGTSHILRKVLQCEA

SEQ ID NO: 18157 - protein, 1151 aa, Cryptotermes secundus
MEKNANEYMYKGRRSRAQSSNDQQGENGNRKEETQRGPPPKQPNVGEPNYEDKANIRTRWNKEEMKEVVWCFLASTGNYKEAYELWRSRNLKVRPTMNAKLLLNQKNYILKNKRLTDIEIDEIRESINAYTEDSTGDHVRWKDDNVSTKEDEMQDRSTREDAEQNVERNGLKEQLQVAWHKVRFLQMSERRRLPKLEENKKLVCLKEQVNGIIKELLEENQIDITEVNHLIYAAATVITETTIKPRKTMTTRRFKDAWKLRIQKQISKWRKDLSILTESGSGSDNIKLNTKKRKIFQKYKMTNAREVAELIEKLKQKIQAKAQRIRRYEKRKNQYIQNKMFKENTKRFYRQLGAKAIEVTAHPNMQEVEFYWQAIWEMETRHNEKAEWIRREEKGREGTSNMKWMPIKTTEFTLVLAKTHNWKSPGSDQIQNYWLKAFPVTHSYIVEAFNKIIEEPQQMPEWLTTGITCLLPKSKNTMDPKNYRPITCLSTMYKMLTGIIARRISVYLEEHNLLPEEQKGCHQGSKGCKDQLLISKAILEDCRRRKKNLNMAWIDYQKAFDRVPHSWIEKSMELVGVNDRIVKFCKHSMEKWNTRLQLRTNQELMQSQPIKINRGIFQGDSLSPLLFCIALTPLTHELNRSGCGYQVHGSERKIGHLLYMDDLKLLGKSEGELRDEIKIVKTFSSDIKMEFGLEKCARISIKKGKVQRKEHVENTGENEINELETNGAYKYLGIEENHQIEHKKEKERLKKEYVRRLRLILNTELNAKHKMQAIGSLAVPVLRYSFGIINWHKEEIQKLDRKTRKMLTTYGQHHPRADIDRLYVPRKEGGRGLIQIEAAYVTETTNLAEYIEGTEDQLMKIVRTHQHNTSSSPNTACKHTEFLQKKAIAENTKEKWEKKRMHGQYPRSLDDTLVDKEQTYRWLKFGSIKGETESLIVAAQDQAISTNYFKKKILKEEIGSKCRLCKEYEETIDHLTSGCPVLAKNEYIVRHDKVCMHLHYSICKEFGIEVSDNWYSHVPKSVCEHEDITVLWNQGIQTDREVLANRPDIIIKNKQKKTCILIDVSVPSDRNVVQKEAEKKLKYKNLSIEIQRMWNVKCFVIPVIIGATGTVTRGLRKHLELIPGKHSIDSLQKTAILGTSHILRKVLQCEA

SEQ ID NO: 18158 - protein, 979 aa, Coptotermes formosanus
MWYKVRLLQMSEREKLPKLKTNTKLIKFEEEINGVLEELLEEDEMDIADINNLIYAAATIMTQTLNEPSKRSKNRRNVNFWKIRMQKQISSWRRELSIIAETGTGSDNGKLNRKKRKIFQKYTVTNAREVAQLTETLKQKVQAKAQRIRRYEKRETQYSQNKMFKEDTKKFYRNLGMKNIEAREPPSMVEAQTYWKSLWGEEAQHNERAEWIKREEKRKINHMDWRPIQTVEITSYLAKAHNWKSPGNDQIQNYWLKAFPATHRYIAKSFNAIIEEPEKAPDWLTTGITYLIPKSGDSKEVRNYRPITCLTTMYKTLTGIIATRISKHLEEQSLLPAEQKGCHPGSKGCKDQLMVSKAIYEDCRRRNKNLSIAWIDYQKAFDSIPHSWVERSIGLVGVNSKIVRFCKLSMEKWNTRLFLKTKQEVMQSQLIQVRRGIFQGDSLSRLLFCIALIPLTNELNRADCGYQVHGTERKISHLLYMDDLKLVGRNENDLKNEIKIVQTISKDINMNFGLEKCARICLKRGRVQSKMHIESTFENDIRELEPRKAYKYLGIEENFDIQHKNEKEKFKKEYLRRLRLVLGTELSAKNKIQAIGSLAVPVLRYSFGIVNWHLEELRKLDRKTRKLLTIHRQHRPKADVDRLYVPRKQGGRGLMQLEAAYAVEITKLVEYVEMKEDSLIQVVRTHQHNTDSAVLETARCLKTEVQTESRKLKDSIVDKTKGRWHGKRMHGQLPRNLDAKLVDIEQSYHWLKSGDIKGETESAIVAAQDQAISTNYFKNKILKEEIESKCRLCKQHEETIDHLTSGCPILAKNEYLMRHDKVCLHLHYSICKALGTETTDKWYTHMPNPVCEEGDVTVLWNQAVHTDREVTANRPDIIIKNKKEKTCTLIDVAIPADKNFVQKEAEKRLKYKSLCIEIQRMWNLKCTIVPVIIGATGIVTRSLKKNLEAIPGKHSIDSLQKTAILGTSHIIRKVLQCEA

SEQ ID NO: 18159 - protein, 1112 aa, Coptotermes formosanus
MRELLWCFMYIKEKTLRENYKEAYKLWRERNPLTRMNIDAKALLNQKNYILKAKRVTAVEIDDIQESIRLQIGGDAEYYTNRENGEKMDTNVLERQDQEGINTGFGKVENNKQPSDEGEQHTVRNKLKEDVQIIWYKARILQMSEREKLPKLKTNTKLIKFEEEINGVLEELLEEDEMDVTDINNLIYAAATIMTQTLNEPSKRSKNRRNVNFWKIRMQKQISSWRRELSIIAETGTGSDNGKLNRKKRKIFQKYRVTTAREVAQLTETLKQKVQAKAQRIRRYEKRETQYSQNKMFKEDTKKFYRNLGMKNIEVREPPSMAEAETYWKSLWGEEAQHNERAEWIKREEKRKINHMDWRPIQTVEITSYLAKAHNWKSPGNDQIQNYWLKAFPATHRYIAKSFNAIIEEPEKAPDWLTTGITYLIPKSGDSKEVRNYRPITCLTTMYKTLTGIIATRISKHLEEQSLLPAEQKGCHPGSKGCKDQLMVSKAIYEDCRRRNKNLSIAWIDYQKAFDSIPHSWVERSIGLVGVNSKIVRFCKLSMEKWNTRLFLKTKQEVMQSQLIQVRRGIFHGDSLSPLLFCIALIPLTNELNRADCGYQVHGTEWKISHLLYMDDLKLVGRNENDLKNEIKIVQTISKDINMNFGLEKCARICLKRGRVQSKMHIGSTFENDIRELDPRKAYKYLGIEENFDIQHKNEKEKFKKEYLRRLRLVLGTELSAKNKIQAIGSLAVPVLRYSFGIVNWHLEKLRKLDRKTRKLLTIHRQHHPKADVDRLYVPRKQGGRGLMQLKAAYAVEITKMVEYVEMKEDSLIQVVRTHQHNTDSAVLETARCLKTEVQTETRKLKDSIVDKTKGRWHGKRMHGQLPRNLDAKLVDIEQSYHWLKSGDIKGETESAIVAAQDQAISTNYFKNKILKEETESKCRLCKQHEETIDHLTSGCPILAKNEYLMRHDKVCLHLHYSICKALGTETTDKWYAHMPNPVYEEGDVTVLWNQVVHTDREVTANRPDIIIKNKKEKTCTLIDVAIPADKNVVQKEAEKRLKYKSLCTEIQRIWNLKCTIVPVIIGATGIVTRSLKKNLEAIPGKHSIDSLQKTAILGTSHIIRKVLQCEA

SEQ ID NO: 18160 - protein, 1176 aa, Coptotermes formosanus
MVISKQNNTQSGRRKEQRSSDSTDENGNHTEETQHGPSQIPPNIGVGQKDGKKLNKRIRWSQEEMKELLWCFMYIKEKTLRENYKEAYKLWRERNPLTRMNIDAKALLNQKNYILKAKRVTAVEIDDIQESIRLQIGGDAEYYTNRENGEKMDTNILERQDQEGINTDFGKVENNKQPSDEAEQHTVRNKLKEDVQIMWYKMRLLQMSEREKLPKLKTKTKLIKFEEEINGVLVELLEEDEMDITDINNLIYAAATIMTQTLNEPSKRSKNRRNVNFWKIRMQKQISSWRRELSIIAGTGTGSDNGKLNRKKRKIFQKYRVTNAREVAQLTETLKQKVQAKAQRIRRYEKRETQYSQNKMFKEDTKKFYRNLGMKNIEVREPPSMAEAETYWKSLWGEEAQHNERAEWIKREEKRKINHMDWRPIQTVEITSYLAKAHNWKSPGNDQIQNYWLKAFPATHRYIAKSFNAIIEEPEKAPDWLTTGITYLIPKSGDSKEVRNYRPITCLTTMYKTLTGIIATRISKHLEEQSLLPAEQKVCHPGSKGCKDQLMVSKAIYEDCRRRNKNLSIAWIDYQKAFDSIPHSWVERSIGLVGVNSKIVRFCKLSMEKWNTRLFLKTKQEVMQSQLIQVRRGIFQGDSLSPLLFCIALIPLTNELNRADCGYQVHGTERKISHLLYTDDLKLVGRNENDLKNEIKIVQTISKDINMNFGLEKCARICLKRGRVQSKMHIGSTFENDIRELDPRKAYKYLGIEENFDIQHKNEKEKFKKEYLRRLRLVLGTELSAKNKIQAIGSLAVPVLRYSFGIVNWHLEELRKLDRKTRKLLTIHRQHHPKADVDRLYVPRKQGGRGLMQLEAAYVVEIAKMVEYVEMKEDSLIQVVRTHQHNTDSAVLETARCLKTEVQTETRKLKDSIVEKTKGRWHGKRMHGQLPRNLDAKLVDIEQSYHWLKSGDIKGETESAIVAAQDKAISTNYFKNKILKEEIESKCRLCKQHEETIDHLTSGCPIFAKNEYLMRHDKVCLHLHYSICKALGTETTDKWYTHMPNPVCEEGDVTVLWNQAVHTDREVTANRSDIIIKNKKEKTCTLIDVAIPADKNVVQKEAEKRLKYKSLCIEIQRMWNLKCTIVPVIIGATGIVTRSLKRNLEAIPGKHSIDSLQKTAILGTSHIIRKVLQCEA

SEQ ID NO: 18161 - protein, 1176 aa, Coptotermes formosanus
MVISKQNNTQSGRRKERRSSDSTDENGNHTEETQHGPSQIPSNIGVGQKDGKKLNKRIRWSQEEMKELLWCFMYIKEKTLRENYKEAYKLWRERNPLTRMNIDAKALLNQKNYILKAKRVTAVEIDDIQESIRLQIGGDAEYYTNRENGEKMDTNVLERQDQEGINTDFGKVESNKQPSDEGEQHTVRNKLKEDVQIMWYKMRLLQMSEREKLPKLKTNTKLIKFEEEINGVLEELLEEDEMDITDINNLIYAAATIMTQTLNEPSKRSKNRRNVNFWKVRMQKQISSWRRELSIIAETGTGSDNGKLNRKKRKIFQKYRVTNAREVAQLTEILKQKVQAKAQRIRRYEKRETQYSQNKMFKEDTKKFYRNLGMKNIEVREPPSMAEAETYWKSLWGEEAQHNERAEWIKREEKRKINHMDWRPIQTVEITSYLAKAHNWKSPGNDQIQNYWLKAFPATHRYIAKSFNAIIEEPEKAPDWLTTEITYLIPKSGDSKEVRNYRPITCLTTMYKTLTGIIATRISKHLEEQSLLPAEQKGCHPGSKGCKDQLMVSKAIYEDCRRRNKNLSIAWIDYQKAFDSIPHSWVERSIGLVGVNSKIVRFCKLSMEKWNTRLFLKTKEEVMQSQLIQVRRGIFQGDSLSPLLFCIAFIPLTNELNRADCGYQVHGTERKISHLLYMDDLKLVGRNENDLKNEIKIVQTISKDINMNFGLEKCARICLKRGRVQSKMHIGSTFENDIRELDPRKAYKYLGIEENFDIQHKNEKEKFKKEYLRRLRLVLGTELSAKNKIQAIGSLAVPVLRYSFGIVNWHLEELRKLDRKTRKLLTIHRQHHPKADVDRLYVPRKQGGRGLMQLEAAYAVEIAKMVEYVEMKEDSLIQVVRTHQHNTDSAVLETARCLKTEVQTETRKLKDSIVEKTKGRWHGKRMHGQLPRNLDAKLVDIEPSYHWLKSGDIKGETESAIVAAQDQAISTNYFKNKILKEEIESKCRLCKQHEETIDHLTSGCPILAKNEYLMRHDKVCLHLHYSICKALGTETTDKWYTHMPNPVCEEGDVTVLWNQAVHTDREVTANRPDIIIKNKKEKTCTLIDVAIPADKNVVQKEVEKRSKYKSLCIEIQRMWNLKCTIVPVIIGATGIVTRSLKKNLEAIPGKHSIDSLQKTAILGTSHIIWKVLQCEA

SEQ ID NO: 18162 - protein, 1176 aa, Coptotermes formosanus
MVISKQNNTRSGRRKERRSSDSTDENGNHTEETQHGPSQIPPNIGVGQKDGKKLNKRIRWSQEEMKELLWCFMYIKEKTLRENYKEAYKLWRERNPLTRMNIDAKALLNQKNYILKAKRVTAVEIDDIQESIRLQIGGDAEYYTNRENGEKMDTNVLERQDQEGINTDFGKVENNKQPRDEGEQHTVRNKLKEDIQIMWYKMRLLQMSEREKLPKLKTNTKLIKFEEEINGVLEELLEEDEMDITDINNLIYAAATIMTQTLNEPSKRSKNRRNVIFWKIRMQKQIASWRRELSIIAETGTGSDNGKLNRKKRKIFQKYRVTNAREVAQLTQTLKQKVQAKAQRIRRYEKRETQYSQNKIFKEDTKKFYRNLGMKNIEVREPPSMAEAETYWKSLWGEEAQHNERAEWIKREEKRKINHMDWRPIQTVEITSYLAKAHNWKSPGNDQIQNYWLKAFPATHRYIAKSFNAIIEEPEKAPDWLTTGITYLIPKSGDSKEVRNYRPITCLTTMYKTLTGITATRISKHLEEQSLLPAEQKGCHPGSKGCKDQLMVSKAIYEDCRRRNKNLSIAWIDYQKAFDSIPHSWVERSIGLVGVNSKIVRFCKLSMEKWNTRLFLKTKQEVMQSQLIQVRRGIFQGDSLSPLLFCIALIPLTNELNRADCGYQVHGTERKVSHLLYMDDLKLVGRNENDLKNEIKIVQTISKDINMNFGLEKCARICLKRGRVQSKMHIGSTFENDIRELDPRKAYKYLGIEENFDIQHKNEKEKFKKEYLRRLRLVLGTELSAKNKIQAIGSLAVPVLRYSFGIVNWHLEELRKLDRKTRKLLTIHRQHHPKADADRLYVPRKQGGRGLMQLEAAYAVEITKMVEYVEMKEDSLIQVVRTHQHNTDSAVLETARCLKTEVQTETRKLKDSIVEKTKGRWHGKRMHGQLPRNLDAKLVDIEQSYHWLKSGDIKGETESAIVAAQDQAISTNYFKNKILKEEIESKCRLCKQHEETIDHLTSGYPILAKNEYLMRHDKVCLHLHYSICKALGIETTDKWYTHMPNPVCEEGDVTVLWNQAVHTDREVTANRPDIIIKNKKEKTCTLIDVAIPADKNVVQKEVEKRLKYKSLCIEIQRMWNLKCTIVPVIIGATGIVTRSLKKNLEAIPGKHSIDSLQKTAILGTSHIIRKVLQCEA

SEQ ID NO: 18163 - protein, 1176 aa, Coptotermes formosanus
MVISKQNNTQSGRRKEQRSSDSTDENGNHTEETQPGPSQIPPNIGVGQKDGKKLNKRIRWSQEEMKELLWCFMYIKEKTLRENYKEAYKLWRERNPLTRMNIDAKALLNQKNYILKAKRVTAVEIDDIQESIRLKIGGDAEYYTNRENGEKMDTNVLERQDQEGINTGFGKVENNKQPSDEGEQHTVRNKLKEDVQIMWYKVRLLQMSEREKLPKLKTNTKLIKFEEEINGVLEELLEEDEMDITDINNLIYAAATIMTQTLNEPSKRSKNRRNVNFWKIRMQKQIVSWRRELSIIAETGTGFDNGKLNRKKRKIFQKYRVTNAREVAQLTETLKQKVQAKAQRIRRYEKRETQYSQNKMFKEDTKKFYRNLGMKNIEVREPPSMAEAETYWKSLWGEEAQHNERAEWIKREEKRKINHMDWRPIQTVEITSYLAKAHNWKSPGNDQIQNYWRKAFPATHRYIAKSFNAIVEEPEKAPDWLTTGITYLIPKSGDSKEVRNYRPITCLTTTYKTLTGIIATRISKHLEEQSLLPAEQKGCHPGSKGCKDQLMVSKAIYEDCRRRNKNLSIAWIDYQKAFDSIPHSWVERSIGLVGVNSKIVRFCKLSMEKWNTRLFLKTKQEVVQSQLIQVRRGIFQGGSILPLLFCIALIPLTNELNRADCGYQVHGTERKISHLLYMDDLKLVGRNENDLENEIKIVQTITKDINMNFGLEKCARICLKRGRVQSKMHIGSTFENDIRELDPRKAYKYLGIEENFDIQHKNEKEKFKKEYLRRLRLVLGTELSAKNKIQAIGSLAVPVLRYSFGIVNWHLEELRKLDRKTRKLLTIHRQHHPKADVDRLYVPRKQGGRGLMQLEAAYAVEITKLVEYVEMKEDSLIQVVRTHQHNTDSAVLETARCLKTEVQTETRKLKDSIVEKTKGRWHGKRMHGQLPRNLDAKLVDIEQSYHWLKSGDIKGETESAIVAAQDQAISTNYFKNKILKEEIESKCRLCKQHEETIDHLTSGCPILAKNEYLMRHDKVCLHLHYSICKALGIETTDKWYTHMPNPVCEEGDATVLWNQAVHTDREVTANRPDIIIKNKKEKTCTLIDVAIPADKNVVQKEVEKRLKYKSLCIEIQRMWNLKCTIVPVIIGATGIVTRSLKKNLEAIPGKHSIDSLQKTAILGTSHIIRKVLQCEA

SEQ ID NO: 18164 - protein, 895 aa, Coptotermes formosanus
MQKQIVSWRRELSIIAETGTGSDNGKLNRKKRKIFQKYRVTNAREVAQLTETLKQKVQAKAQRIRRYEKRETQYSQNKMFKEDTKKFYRNLGMKNIEVREPPSMAEAETYWKSLWGEEAQHNERAEWIKREEKRKINHMDWRPIQTVEITSYLAKAHNWKSPGNDQIQNYWLKAFPATHRYIAKSFTAIIEEPEKAPDWLTTGITYLIPKSGDSKEVRNYRPITCLTTMYKTLTGIIATRIPKHLEEQSLLPAEQKGCHPGSKGCKDQLMVSKAIYEDCRRRNKNLSIAWIDYQKAFDSIPHSWVERSIGLVGVNSKIVQFCKLSMEKWNTRLFLKTKQEVMQSQLIQVRRGIFQGDSLSPLLFCIALIPLTNELNRADCGYQVHGTERKMSHLLYMDDLKLVGRNENDLKNEIKIVQTISKDINMNFGLEKCARICLKRGRVQSKMHIGSMFENDIRELDPRKAYKYLGIEENFDIQHKNEKEKFKKEYLRRLRLVLGTELSAKNKIQAIGSLAVPVLRYSFGIVNWHLEELRKLDLKTRKLLTIHRQHHPKADVDRLYVPRKQGGRGLMQLEAAYAVEITKLVEYVEMKEDSLIQVVRTHQHNTDSAVLETARCLKTEVQTETRKLKDSIVEKTKGRWHGKRMHGQLPRNLDAKLVDIEQSYHWLKSGDIKGETESAIVAAQDQAISTNYFKNKILKEEIESKCRLCKQHEETIDHLTSGCPILAKNEYLMRHDKVCLHLHYSICKALGIETTDKWYTHMPNPVCEEGDVTVLWNQAVHTDREVTANRPDIIIKNKKEKTCTLIDVAIPADKNVVQKEAEKRLKYKSLCIEIQRMWNLKCTIVPVIIGATGIVTRSLKKNLEAIPGKHSIDSLQKTAILGTSHIIRKVLQCEA

SEQ ID NO: 18165 - protein, 1173 aa, Coptotermes formosanus
MVISKQNNTQSGRRKERRSSDSTDENGNHTEETQHGPSQIPPNIGVGQKDGKKLNKRIRWSQEEMKELLWCFMYIKEKTLRENYKEAYKLWRERNPLTRMNIDAKALLNQKNYILKAKRVTAVEIDDIQESIRLQIGGDAEYYTNRENGEKMDTNVLERQDQEGINTGFGKVENNKQPSDEGEQHTVRNKLKEDVQIMWYKVRLLQMSEREKLPKLKTNTKLIKFEEEINGVLEEEDEMDITDINNLIYAAATIMTQTLNEPSKRSKNRRNVNFWKIRMQKQISSWRRELSIIAETGTGSDNGKLNRKKRKIFQKYRVTNAREVAQLTETLKQKVQAKAQRIRRYEKRETQYSQNKMFKEDTKKFYRNLGMKNIEVREPPSMAEAETYWKSLWGEEAQHNERAEWIKREEKRKINHMDWRPIQTVEITSYLAKAHNWKSPGNDQIQNYWLKAFPATHRYIAKSFNAIIEEPEKAPDWLTTGITYSIPKSGDSKEVRNYRPITCLTTMYKTLTGIIATRISKHLEEQSLLPAEQKGCHPGSKGCKDQLMVSKAIYEDCRRRNKNLSIAWIDYQKAFDSIPHSWVERSIGLVGVNSKIVRFCKLSMEKWNTRLFLKTKQEVMQSQLIQVRRGIFQGDSLSPLLFCIALIPLTNELNRADCGYQVHGTERKISHLLYMDDLKLVGRNENDLKNEIKIVQTISKDINMNFGLEKCARICLKRGRVQSKMHIGSTFENDIRELDPRKAYKYLGIEENFDIQHKNEKEKFKKEYLRRLRLVLGTELSAKNKIQAIGSLAVPVLRYSFGIVNWHLEELRKLDRKTRKLLTIHRQHHPKADVDRLYVPRKQGGRGLMQLEAAYAVEIAKMVEYVEMKEDSLIQVVRTHQHNTDSAVLETARCLKTEVQTETRKLKDSIVEKTKGRWHGKRMHGQLPRNLDAKLVDIEQSYHWLKSGDIKGETESAIVAAQDQAISTNYFKNKILKEEIESKCRLCKQHEETIDHLTSGCPILAKNEYLMRHDKVCLHLHYSICKALGTETTDKWYTHMPNPVCEEGDVTVLWNQAVHTDREVTANRPDIIIKNKKEKTCTLIDVAIPADKNVVQKEAEKRLKYKSLCIEIQRMWNLKCTIVPVIIGATGIVTRSLKKNLEAIPGKHLIDSLQKTAILGTSHIIRKVLQCEA

SEQ ID NO: 18166 - protein, 1176 aa, Coptotermes formosanus
MVISKQNNTQSGRRKERRSSDSTDENGNHTEETQHGPSQIPPNIGDGQKDGKKLNKRIRWSQEEMKELLWCFMYIKEKTLRENYKEAYKLWRERNPLTRMNIDAKALLNQKNYILKAKRVTAVEIDDIQESIRLQIGGDAEYYTNRENGEKMDTNILERQDQEGINTDFGKVENNKQPSDEGEQHTVRNKLKEDVQIMWYKMRLLQMSEREKLPKLKTNTKLIKFEEEINGVLEELLEEDEMDITDINNLIYAAATIMTQTLNEPSKRSKNRRNVNFWKIRMQKQISSWRRELSIIAETGTVSDNGKLNRKKRKIFQKYRVTNAREVAQLTETLKQKVQAKAQRIRRYEKRETQYSQNKMFKEDTKKFYRNLGMKDIEVREPPSMAEAETYWKSLWGEEAQHNERAEWIKREEKRKINHMDWRPIQTVEITSYLAKAHNWKSPGNDQIQNYWLKAFPATHRYIAKSFNAIIEEPEKAPDWLTTGITYLIPKSGDSKEVRNYRPITCLTTMYKTLTGIIATRISKHLEEQSLLPAEQKGCHPGSKGCKDQLMVSKAIYEDCRRRNKNLSIAWIDYQKAFDSIPHSWVERSIGLVGVNSKIVRFCKLSMEKWNTRLFLKTKQEVMQSQLIQVRRGIFQGDSLSPLLFCIALIPLTNELNRADCGYQVHGTERKISHLLYMDDLKLVGRNENDLKNEIKIVQTISKDINMNFGLEKCARICLKRGRVQSKMHIGSTFENDIRELDPRKAYKYLGIEENFDIQHKNEKEKFKKEYLRRLRLVLGTELSAKNKIQAIGSLAVPVLRYSFGIVNWHLEELRKLDRKTRKLLTIHRQHHPKADVDRLYVPRKQGGRGLMQLEAAYAVEIAKMVEYVEMKEDSLIQVVRTHQHNTDSAVLETARCLKTEVQTETRKLKDSIVEKTKGRWHGKRMHGQLPRNLDAKLVDIEQSYHWLKSGDIKGETESAIVAAQDQAISTNYFKNKILKEEIESKCRLCTQHEETIHHLTSGCPILAKNEYLMRHDKVCLHLRYSICKALGIETTDKWYTHMPNPVCEEGDVTVLWNQAVHTDREVTANRPDIIIKNKKEKTCTLIDVAIPADKNVVQKEAEKRLKYKSLCIEIQRMWNLKCTIVPVIIGATGIVTRSLKKNLEAIPGKHSIDSLQKTAILGTSHIIRKVLQCEA

SEQ ID NO: 18167 - protein, 1176 aa, Coptotermes formosanus
MVISKQNNKQSGRRKERRSSDSTDENGNHTEETQHGPSQIPPNIGVGQKDGKKLNKRIRWSQEEMKELLWCFMYIKEKTLRENYKEAYKLWRERNPLTRMNIDAKALLNQKNYIIKAKRVTAVEIDDIQESIRLQIGGDAEYYTNRENGEKMDTNILECQDQEGINTDFGKVENNKQPSDEGEQHTVRNKLKEDVQIMWYKMRLLQMSEREKLPKLKTNTKLIKFEEEINGVLEELLEEDEMDKTDINNLIYAAATIMTQTLNEPSKRSKNRRNVNFWKIRMQKQISSWRRELSIIAETGTGSDNGKLNRKKRKIFQKYRVTNAREVAQLTETLKQKVQAKAQRIRRYEKRETQYSQNKMFKEDTKKFYRNLGMKNIEVREPPSMAEAETYWKSLWGEEAQHNERAEWIKREEKRKINHMDWRPIQTVEITSYLAKAHNWKSPGNDQIQNYWLKAFPATHRYIAKSFNAIIEEPEKAPDWLTTGITYLIPKSGDSKEVRNYRPITCLTTMYKTLTGIIATRISKHLEEQSLLPAEQKGCHPGSKGCKDQLMVSKAIYEDCRRRNKNLSIAWIDYQKAFDSIPHSWVERSIGLVGVNSKIVRFCKLSMEKWNTRLFLKTKQEVMQSQLIQVRRGIFQGDSLSPLLFCIALIPLTNELNRADCGYQVHGTERKISHLLYMDDLKLVGRNENDLKNEIKIVQTISKDINMNFGLEKCARICLKRGRVQSKMHIGCTFENDIRELDPRKAYKYLGIEENFDIQHKNEKEKFKKEYLRRLRLVLGTELSAKNKIQAIGSLAVPVLRYSFGIVNWHLEELRKLDRKTRKLLTIHRQHHPKADVDRLYVPRKQGGRGLMQLEAAYAVEIAKMVEYVEMKEDSLIQVVRTHQHNMDSAVLETARCLKTEVQTETRKLKDSIVEKTKGRWHGKRMHGQLPRNLDAKLVDIEQSYHWLKSGDIKGETESAIVAAQDQAISTNYFKNKIFKEEIESKCRLCKQHEETIDHLTSGCPILAKNEYLMRHDKVCLHLHYSICKALGIETTDKWYTHMPNPVCEEGDVTVLWNQAVHTDREVTANRPDIIIKNKKEKTYTLIAVAIPADKNVVQKEAEKRLKYKSLCIEIQRMWNLKCTIVPVIIGATGIVTRSLKKNLEAIPGKHSIDSLQKTAILGTSHIIWKVLQCEA

SEQ ID NO: 18168 - protein, 919 aa, Coptotermes formosanus
MTQTLNEPSKRSKNRRNVNFWKIRMQKQISSWRRELSIIAETGTGSDNGKLNRKKRKIFQKYRVTNAREVAQLTETLKQKVQAKAQRIRRYEKRETQYSQNKMFKEDTKKFYRNLGMKNIEVREPPSMAEAETYWKSLWGEEVQHNERAEWIKREEKRKINHMDWRPIQTVEITSYLAKAHNWKSPGNVQIQNYWLKAFPATHRYIAKSFNAIIEEPEKGPDWLTTGITYLIPKSGDSKEVRNYRPITCLTTMYKTLTGIIATRISKHLEEQSLLPAEQKGCHPGSKGCKDQLMVSKAIYEDCRRRNKNLSIAWIDYQKAFDSIPHSWVERSIGLVGVNSKIVRFCKLSMEKWNTRLFLKTKQEVMQSQLIQVRRGIFQGDSLSPLLFCIALIPLTNELNRADCGYQVHGTERKISHLLYMDDLKLVGRNENDLKNEIKIVQTISKDINMNFGLEKCARICLKRGRVQSKMHIGSTFENDIRELDPRKAYKYLGIEENFDIQHKNEKEKFKKEYLRRLRLVLGTELSAKNKIQAIGSLAVPVLRYSFGIVNWHLEELRKLDRKTRKLLTIHRQHHPKADVDRLYVPRKQGGRGLMQLEAAYAVEIAKMVEYVEMKEDSLIQVVRTHQHNTDSAVLETARCLKTEVQTETRKLKDSIVEKTKGRWHGKRMHGQLPRNLDAKLVDIEQSYHWLKSGDIKGETESAIVAAQDQAISTNYFKNKILKEEIESKCRLCKQHEETIDHLTSGCPILAKNEYLMRHDKVCLHLHYSICKALGIETTDKWYTHMPNPVCEEGDVTVLWNQAVHTDREVTANRPDIIIKNKKEKTCTLIDVAIPADKNVVQKEAEKRLKYKSLCIEIQRMWNLKCTIVPVIIGATGIVTRSLKKNLEAIPGKHSIDSLQKTAILGTSHIIRKVLQCEA

SEQ ID NO: 18169 - protein, 1176 aa, Coptotermes formosanus
MVISKQNNTQSGRRKERRSSDSTDENGNHTEETQHGPSQIPPNIGVGQKDGKKLNKRIRWSQEETKELLWCFMYIKEKTLRENYKEAYKLWRERNPLTRMNIDAKALLNQKNYILKAKRVTAVEIDDIQESIRLQIGGDAEYYTKRENGEKMDTNVLERQDQEGINTDFGKVENNKQPSDEGEQHTVRNKLKEDVQIMWYKVRLLQMSEREKLPKLKTNTKLIKFEEEINGVLEELLEEDEMDITDINNLIYAAATIMTQTLNEPSKRSKNRRNVNFWKIRMQKQISSWRRELSIIAETGTGSDNGKLNRKKRKIFQKYRVTNAREVAQLTETLKQKVQAQAQRIRRYEKRETQYSQNKMFKEDTKKFYRNLGMKNIEVREPPSMAEAETYWKSLWGEEAQHNERAEWIKREEKRKINHMDWRPIQTVEITSYLAKAHNWKSPGNDQIQNYWLKAFPATHRYIAKSFNAIIEEPEKAPDWLTTGITYLTPKSGDSKEVRNYRPITCLTTMYKTLTGIIATRISKHLEEQSLLPAEQKGCHPGSKGCKDQLMVSKAIYEDCRRRKKNLSIAWIDYQKAFDSIPHSWVERSIGLVGVNSKIVRFCKLSMEKWNTRLFLKTKQEVMQSQLIQVRRGIFQGDSLSPLLFCIALIPLTNELKRADCGYQVHGTERKISHLLYMDDLKLVGRNENDLKNEIKIVQTISKDINMNFGLETCARIRLKRGRVQSKMHIGSTFENDIRELDPRKAYKYLGIEENFDIQHKNEKEKFKKEYLRRLRLVLGKELSAKNKIQAIGSLAVPVLRYSFGIVNWHLEELRKLDRKTRKLLTIHRQHHPKADVDRLYVPRKQGGRGLMQLEAAYAVEIAKMVEYVEMKEDSLIQVVRTHQHNTDSAVLETARCLKTEVQTETRKLKDSIVEKTKGRWHGKRMHGQLPRNLDAKLVDIEQSYHWLKSGDIKGETESAIVAAQDQAISTNYFKNKILKEEIESKCRLCKQHEETIDHLTSGCPILAKNEYLMRHDKVCLHLHYSICKALGTENTDKWYTHMPNPVCEEGDVTVLWNQAVHTDREVTANRPDIIIKNKKEKTCTLIDVAIPADKNVVQKEAEKRLKYKSLCIEIQRMWNLKCTIVPVIIGATGIVTRSLKKNLEAIPGKHSIDSLQKTAILGTSHIIRKVLQCEA

SEQ ID NO: 18170 - protein, 926 aa, Notospermus geniculatus
MTLLNFILFYQDKNIIKIYLIDIHTPNWLKTNRKATKKQLANRRYLRRQVVKGEVNRNSLLRARETTLQKLKVRSKQEKDRAKREKYIQQNRDFRVHGLGSLDRTQATGNKDQPTPSIQSFHDFWAGIVGVKGAYQPEDQDIADWTRTVQAKCDARGGEPEIECTVTDVEWRKLTSKLKAWKAPGPDGIRNIWWKISRECSGALRQVVTELLNGAQIPGWMTQGATTLIYKGAGDRNDPSKYRPIACLNTMYKVMTSVMANKLTDKLVEEGLLPLQQRALRKGGRGTMDCLVVDSLIAQDAKRGHKNLAVSWLDFTKAYDRVPHQLVIDCLEAVGAPQWMRLVIGRLVPQWTSRLVIRKGPRVVKSDLLRYERGLLQGDSLSPILFCLAMAPLSHAIDRCEKPYKTGNGWKVSHNGFMDDIKVYTKSERDLDKILGVCRRVVSALGGELNLAKCGKAILERGKPRPATAGGQTEGGNMPEYREGELYKYLGIKQLFGTDAAVLRDEVGKKYLDQVEKIWKTDLNLANKTKAYNQSCVGLFRYYFIGMRWGKTELTKLERKARGILRRQRGWYRAQAVERMYVSKQDGGLGLIPLEAAQDQFAVSLGEYLARSRDSFVTKAYEEMNYAANRWHTAKDVLSIAEKVRNAHNQPPERPARQVGLAVVKQKRALMLQRLREKTVHGRFRRFDPGARAYDWIKVGNLRSETAAVIMTAQDGTTMTRGYRSRVLHQQVDPTCRLCRKEVEGLGHILVGCDKSSWTTYKTRHDDVVRSVLRSVLTGAEGLSHREAAACGQNFDGKRVKVQWDPVVPTNRNIPSRRPDLIVTDKRDKQIHLVEITVCSDAAVLERADEKRVKYQALATDLAATHQGFRVNVIPIAVGTLGTLKSVVREVKALGNLVESEGAFLRAVQRAAIFGSAMTIKRHLAQ

SEQ ID NO: 18171 - protein, 962 aa, Carcina quercana
MSSQVSTSSQNQLVECPICGDSRLYKGQRGLAIHSSRKHVPRIDSVASSLDTVPANPSQFAVNTDGSHQNLAKSLAFYKHSIRIVRRIPKGARIAVARSLSEVVARVVRFNNTDSWRELFTFAFSTLHLRQNVHGHKLTKIIKQNTAQPSIPHVNSPLPFAASENSIIRSIESKISDGNVKGAARILFSSDSLATNSAETLTALQEKHPSPLSDTRIPDPPSTPLETLEVEEDVILAAIQSFPNGSASGLDGISPQHLKDLLNPFVGDAGRTLLREITGLINLILSGRVCNEVTDLLYGANLVALTKKDGGIRPIAVGSTFRRLASKVCCRSFLDRLSKKFQPRQFGFGVRGGGEAAVHAARSFLNSSEYEVFVKIDVKNAFNSVDRGAMLNVIQKELPEIFSYLWQCYGAPSKLLFGDIEIPSCVGCQQGDPLGPVIFSLAIDPIIRKLNSKFNLWYLDDGSLGGTASSVHEDLTFVINEFAKLGLTLNFDKCEIYIPDDLQTDRRTEIFTLFNNLMPNIKILDKNRLSLLGAPIFDDGIPQILNSKIEKFSLSSDRLYKLKPHMALFILRLCLFTPKFMYLLRCCPVWKFPSITSAIDSKLQATVSQILNINFDGNSWLQASLPIKYGGLGIRTTSSVALPAFLSSAHSSVTLISKILNKTNVCDVRVTDLSGAIAAWHGANAGECIPTTTTTSQSLWDLPAIKSKHASLLDSCLDDTDRARLLAVSENESGHWLHALPSNNLGTVLDPPCLRVAVSLRLGIKTCKPHRCPCGIFVDQLGLHGLSCPRSAGRAYRHGTLNDLVRRALVTASVPATLEPRGMFRDDGKRPDGATLVPWCLGRALVWDVTCVDTLAPSHTQGTARKAGTAAENAQIIKRRKYSAIANDYEFAALAMETMGPWSTDTKKFVKDVSVRLVLAAGDPRAGAFFAQRLSLAVQRGNSASVLGTMPHGLALDEVFTL

SEQ ID NO: 18172 - protein, 1140 aa, Ectemnius continuus
MNMDNANGFNAAVNIYLPLENITQCPLCLVLGRQMAFLTIKDIVLHLRTQHTAGTISWICRSCERAFKGAHNCTCHLPKCKGRVTTAPKRFQCEECPSSFDTARGLSTHERHRHPALRNRKRGADGPHPGGHQDNRQNRVWTEEETQLLRELIERFRHERRPNVHIRTFLPSKTLRQISDKKRELLRRAASNAETNDSILQDQGPSQVVSQIAPNDGRNSAEGTRHEPEDEESGATMNSDELEEWKGLMIEAMRDIQLPRGSKLGDLDAQLRDICERFEDNPDVGKDIDTFITNLFVPKLLEQVDEDSGNSARGPQSNRGNRRNANASRRRNGGNANHSERARYGYSRCQELFNRCPRKLADVAMSGDFSVIEMRRDPPDGDKIREFYEGLWSIAGPEWRNTNLTRVEYVSMLQACPPITTGETLSRIRRIKNNTTGGADKLRKVHLRAKGLVAIITRLFNLLLLSRHYPEPWKTNRTTLIPKPGKDLSDIKNWRPITIGSIIARIFSGIIDARLRDIIKLSPRQKGFIREDGCKNNVVLLDRAMAHMKEEKGGVVTIVDISKAFDTVPHSALTPCLEAKGVPKTLARYIAAMYNNCKSGIGATRNSVVDITLKRGVKQGDPLSPLLFNTVLDPIIEEIDREAEGIHLGGGNLSILAFADDIVLLNRNAAEARKYTNKLSNYLSGLGMSLAASKCSTFQIVARSKTWYIRDPNIVVGGETVPLTRPEEAFRYLGADMGPWTGVAKVGEVPQIVQAAKNVARMRLKPHQKISLITNYVLPRFIHLLTICPPSSTALQQIDHDIKQVVKQILHLTHSTTDGLIYSTRLDGGLGIPRMEHIVKLAVLRHAVKAGHSRDRVLQIGIQEAKVQDRLKKYANSLRLNWPASERDIETAKKRLKREEVDRWQALASQGQGVANFRQDRIGNTWLYKPELLKPSRYIDALRLRTNTFGCRTTLKRAGGDNDINCRRCQAAPETLGHILGSCITNKGLRVKRHDEIKDLIATKLSKSCTVFPEPTVNVSGELKKPDLVIKDQERLLVVDVTVRIEGGANLEHAYNEKVDKYRETAKQIQERLGCTASAVIPVVVGSRGAMPKRTYDDLRLHLGLTRADALTMSMIALRSSIEIANAFIDYGRPRPLAAL

SEQ ID NO: 18173 - protein, 1108 aa, Ectemnius lituratus
MDNTTHCPLCLVAGRQMGFLTVKDIVLHIRMQHPAGTISWICRRCEKAFKGAHNCTCHLPKCKGRVHMTPKRFQCEECPSSFDTARGLSTHERHRHPALRNRKREAGASQPRGNVGRENRVWTEEETQMLRELMDRFRLERQPNVHIRRFLPNKTLKQISDKKRELLRRAASNAETNDALLQDQRNSQIASNAGHDSAEGMPYQDNDGTITESEDLEEWEGTLRDAMRNIQLPRGSKLGELDAQLRNICERSKDSLDVGMEIDEYITKLFVPKLLEQADEETSSRGRGTQNTRGNRRSANASRRRNGGNANHSVRARYGYSRCQELYNRCPRKLADVAVSGDFSVIEMKRDPPDGDKIREFYEGLWSIAGPEWPNINLSRVDYVNMLQACPPITTGETLSRIKRIKNNTSGGADKLRKVHLRAKGLVAIITRLFNLLLITRYYPEPWKKNRTTLIPKPGKDLADIKNWRPITIGSIVARIFSGIIDARLRNIIKLCPRQKGFIREDGCKNNVVLLDRALAQMKEEKGGVVTIVDISKAFDTVPHSALTPCLEGKGVPKMLARYIAAMYDNCKSEIGAARNNVIDISLKRGVKQGDPLSPLLFNTVLDPIIEEIDRDAEGIQLGGGNLSILAFADDIVLLNRNAAEARKYTNKLSDYLTGLGMSLAASKCTTFQIVARNKTWYIRDPTIVVGGEVVPLTRPDEAFRYLGANMGPWTGVARAGETPQIVQAAKNVARMSLKPHQKILLLTNYILPRYIHELTICPPSSTALEQIDHDIKQVVKQILHLTHSTADGLIYSTRLDGGLGIPRMEHIVKLAVLRHAVKAGHSTDRVLQGGIQEPKVQERLKKYANSLRLNWPAGERDIETAKKRLKREEVDRWQSLASQGQGVADFRQDRIGNTWLYKPELLKPSRYIDALRLRTNTYGCRTTLKRAGGANDINCRRCNAAPETIGHILGSCINNKGLRVKRHDEIKDLIAAKMSKSCTVFPEPTINVSGELKKPDLVIKDQERLLVVDVTVRIEGGANLERAYHEKVDKYRDTATQIQQRLGCTSSAVVPVVVGSRGAMPKRTFDDLRLHLGLSRSDALTMSMIALRSSIEIANAFLDYGNT

SEQ ID NO: 18174 - protein, 1136 aa, Ectemnius lituratus
MGEPTVDDPCLTMDNANGLNAAVNIYLPMDNTTHCPLCLVAGRQMGFLTVKDIVLHIRMQHPAGTISWICRRCEKAFKGAHNCTCHLPKCKGRVHMTPKRFQCEECPSSFDTARGLSTHERHRHPALRNRKREAGASQPRGNVGRENRVWTEEETQMLRELMNRFRLERQPNVHIRRFLPNKTLKQISDKKRELLRRAASNAETNDALLQDQRNSQIASNAGHDSAEGMPYQDNDGTITESEDLEEWEGTLRDAMRNIQLPRGSKLGELDAQLRNICERSKDSLDVGMEIDEYITKLFVPKLLEQADEETSSRGRGTQNTRGNRRSANASRRRNGGNANHSVRARYGYSRCQELYNRCPRKLADVAVSGDFSVIEMKRDPPDGDKIREFYEGLWSIAGPEWPNINLSRVDYVNMLQACPPITTGETLSRIKRIKNNTSGGADKLRKVHLRAKGLVAIITRLFNLLLITRYYPEPWKKNRTTLIPKPGKDLADIKNWRPITIGSIVARIFSGIIDARLRNIIKLCPRQKGFIREDGCKNNVVLLDRALAQMKEEKGGVVTIVDISKAFDTVPHSALTPCLEGKGVPKMLARYIAAMYDNCKSEIGAARNNVIDISLKRGVKQGDPLSPLLFNTVLDPIIEEIDRDAEGIQLGGGNLSILAFADDIVLLNRNAAEARKYTNKLSDYLTGLGMSLAASKCTTFQIVARNKTWYIRDPTIVVGGEVVPLTRPDEAFRYLGANMGPWTGVARAGEMPQIVQAAKNVARMSLKPHQKILLLTNYILPRYIHELTICPPSSTALEQIDHDIKQVVKQILHLTHSTTDGLIYSTRLDGGLGIPRMEHIVKLAVLRHAVKAGHSTDRVLQNGIQEPKVQERLKKYANSLRLNWPAGERDIEAAKKRLRREEVDRWQSLASQGQGVADFRQDRIGNTWLYKPELLKPSRYIDALRLRTNTYGCRTTLKRAGGANDINCRRCNAAPETIGHILGSCINNKGLRVKRHDEIKDLIAAKMSKSCTVFPEPTINVSGELKKPDLVIKDQERLLVVDVTVRIEGGANLERAYQEKVDKYRDTATQIQQRLGCTSSAVVPVVVGSRGAMPKRTFDDLRLHLGLSRSDALTMSMIALRSSIEIANAFLDYGNT

SEQ ID NO: 18175 - protein, 1155 aa, Ectemnius lituratus
MGFSESVAGVPALMGEPTVDDPCMTMDNDSGHDTAVKIHLPLENITYCPVCLLAAKQMAFLALKDLVLHIRMQHNAGTFTWICRMCEKAFPGAHNCTCHIPKCKGRVENIRKQHQCEECACSFDTVRGLSTHERHRHPALRNRKREAGGIPPTRNRGRHNEVWTQEETGLLKELMERFKHERQPNVHIRNFLPGKTLRQISDKKRELLKRTAPTQSTNNIFSQIDEPSQPNSQRALHAGSSNEDLLDSQPPYEDETVPASDELDEWEEQMAQAIREIELPRGSKLREVYAKLEDLCHRPRGNADLGDEIDRFITNVLVPKLLEQVGEETRGSRRGPPSNRGSRENTAASSRRNGNHANHSGRARYGYSRCQELFKRCPRKLADVAVSGDFSVIELRRDPPEGNKIRECYEGLWSVPGPEWPATNVSRVESVSMLQACPPISTGETLSRIRRIKKSTAGGSDKLRKAHLQVKGFVAIATKLFNLLLIHRHYPTPWKRNRTTLIPKPGKDLSDIKNWRPITIGSILARVFSGILDQKLRSFIEICPRQKGFVKEDGCKNNVVLLDRAMARMKEEKGGVVTIVDISKAFDTVPHSALAPCLQGKGAPRMLAQYMADMYKDCTTGISAAGSNSIDVTLRRGVKQGDPLSPLLFNIVLDQIIEEINREAEGIQLGGGSLSILAFADDIVLLNKSAAEARKYISKLNNYLTGLGMSLAANKCSTFQIIARSKTWYIKDPNIEVNGDKVPPTKPEEAFRYLGADMGPWRGITGEGKVPQIIQSVENVARMKLKPHQKISLITEYVLPRFIHSLTICPPNSTALDQIDHEVKQVVKQILHLTPSTTDGLIYSTKLDGGLGIPRLERIVKLAVLRHAAKAALSSDIVLQSGIHEARVQERLKKYANSLRINWPASEKEIETAKKRLKREEADRWQSLVSQGHGVADFRQDRIGNTWLFKPELLKPSRYIDALKLRTNTFGCRTTLKRAGGTNEVNCRKCNAMPETLGHILGGCISNKGLRVKRHDEIKDLIAAKLSRTCTVFPEPTINVSGELKKPDLVIKDRERLLVVDVTVRIEGGASLERAYTEKVEKYRETAKQVQERTGCTSSAVVPVVVGSRGAMPKRTFDDLRLHLGLSKADALTMSMIALRSSIEIANAFLDYGNI

SEQ ID NO: 18176 - protein, 1155 aa, Ectemnius lituratus
MGFSESVAGVPALMGEPTVDDPCMTMDNDSGHDTAVKIHLPLENITYCPVCLLAAKQMAFLALKDLVLHIRMQHNAGTFTWICRMCEKAFAGAHNCTCHIPKCKGRVENIRKQHQCEECACSFDTVRGLSTHERHRHPALRNRKREAGGIPPTRNRGRHNEVWTQEETGLLKELMERFKHERQPNVHIRNFLPGKTLRQISDKKRELLKRTAPTQSTNNIFSQIDEPSQPNSQRALHAGSSNEDLLDSQLPYEDETVPASDELDEWEEQMAQAIREIELPRGSKLREVYAKLEDLCHRPRGNADLGDEIDRFITNVLVPKLLEQVGEETRGSRRGPPSNRGNRENTAASSRRNGNHANHSGRARYGYSRCQELFKRCPRKLADVAVSGDFSVIELRRDPPEGNKIRECYEGLWSVPGPEWPATNVSRVESVSMLQACPPISTGETLSRIRRIKKSTAGGSDKLRKAHLQVKGFVAIATKLFNLLLIHRHYPTPWKRNRTTLIPKPGKDLSDIKNWRPITIGSILARVFSGILDQKLRSFIEICPRQKGFVKEDGCKNNVVLLDRAMARMKEEKGGVVTIVDISKAFDTVPHSALAPCLQGKGAPRMLAQYMADMYKDCTTGISAAGSNSIDVTLRRGVKQGDPLSPLLFNIVLDQIIEEINREAEGIQLGGGSLSILAFADDIVLLNKSAAEARKYISKLNNYLTGLGMSLAANKCSTFQIIARSKTWYIKDPNIEVNGDKVPPTKPEEAFRYLGADMGPWRGITGEGKVPQIIQSVENVARMKLKPHQKISLITEYVLPRFIHSLTICPPNSTALDQIDHEVKQVVKQILHLTPSTTDGLIYSTKLDGGLGIPRLERIVKLAVLRHAAKAALSSDIVLQSGIHEARVQERLKKYANSLRINWPASEKEIETAKKRLKREEADRWQSLVSQGHGVADFRQDRIGNTWLFKPELLKPSRYIDALKLRTNTFGCRTTLKRAGGTNEVNCRKCNAMPETLGHILGGCISNKGLRVKRHDEIKDLIAAKLSRTCTVFLEPTINVSGELKKPDLVIKDRERLLVVDVTVRIEGGASLERAYTEKVEKYRETAKQVQERTGCTSSAVVPVVVGSRGAMPKRTFNDLRLHLGLSKADALTMSMIALRSSIEIANAFLDYGNI

SEQ ID NO: 18177 - protein, 1136 aa, Ectemnius lituratus
MGEPTVDDPCLTMDNANGLNAAVNIYLPMDNTTHCPLCLVAGRQMGFLTVKDIVLHIRMQHPAGTISWICRRCEKAFKGAHNCTCHLPKCKGRVHMTPKRFQCEECPSSFDTARGLSTHERHRHPALRNPKREAGASQPRGNVGRENRVWTEEETQMLRELMDRFRLERQPNVHIRRCLPNKTLKQISDKKRELLRRAASNAETNDALLQDQRNSQIASNAGHDSAEGMPYQDNDGTITESEDLEEWEGTLRDAMRNIQLPRGSKLGELDAQLRNICERSKDSLDVGMEIDEYITKLFVPKLLEQADEETSSRGRGTQNTRGNRRSANASRRRNGGNANHSVRARYGYSRCQELYNRCPRKLADVAVSGDFSVIEMKRDPPDGDKIREFYEGLWSIAGPEWPNINLSRVDYVNMLQACPPITTGETLSRIKRIKNNTSGGADKLRKVHLRAKGLVAIITRLFNLLLITRYYPEPWKKNRTTLIPKPGKDLADIKNWRPITIGSIVARIFSGIIDARLRNIIKLCPRQKGFIREDGCKNNVVLLDRALAQMKEEKGGVVTIVDISKAFDTVPHSALTPCLEGKGVPKMLARYIAAMYDNCKSEIGAARNNVIDISLKRGVKQGDPLSPLLFNTVLDPIIEEIDRDAEGIQLGGGNLSILAFADDIVLLNRNAAEARKYTNKLSDYLTGLGMSLAASKCTTFQIVARNKTWYIRDPTIVVGGEVVPLTRPDEAFRYLGANMGPWTGVARAGEMPQIVQAAKNVARMSLKPHQKILLLTNYILPRYIHELTICPPSSTALEQIDHDIKQVVKQILHLTHSTADGLIYSTRLDGGLGIPRMEHIVKLAVLRHAVKAGHSTDRVLQGGIQEPKVQERLKKYANSLRLNWPAGERDIETAKKRLKREEVDRWQSLASQGQGVADFRQDRIGNTWLYKPELLKPSRYIDALRLRTNTYGCRTTLKRAGGANDINCRRCNAAPETIGHILGSCINNKGLRVKRHDEIKDLIAAKMSKSCTVFPEPTINVSGELKKPDLVIKDQERLLVVDVTVRIEGGANLERAYHEKVDKYRDTATQIQQRLGCTSSAVVPVVVGSRGAMPKRTFDDLRLHLGLSRSDALTMSMIALRSSIEIANAFLDYGNT

SEQ ID NO: 18178 - protein, 1155 aa, Ectemnius lituratus
MGFSESVAGVPALMGEPTVDDPCMTMDNDSGHDTAVKIHLPLENITYCPVCLLAAKQMAFLALKDLVLHIRMQHNAGTFTWICRMCEKAFPGAHNCTCHIPKCKGRVENIRKQHQCEECACSFDTVRGLSTHERHRHPALRNRKREAGGIPPTRNRGRHNEVWTQEETGLLKELMERFKHERQPNVHIRNFLPGKTLRQISDKKRELLKRTAPTQSTNNIFSQIDEPSQPNSQRALHAGSSNEDLLDSQLPYEDETVPASDELDEWEEQMAQAIREIELPRGSKLREVYAKLEDLCHRPRGNADLGDEIDRFITNVLVPKLLEQVGEETRGSRRGPPSNRGNRENTAASSRRNGNHANHSGRARYGYSRCQELFKRCPRKLADVAVSGDFSVIELRRDPPEGNKIRECYEGLWSVPGPEWPATNVSRVESVSMLQACPPISTGETLSRIRRIKKSTAGGSDKLRKAHLQVKGFVAIATKLFNLLLIHRHYPTPWKRNRTTLIPKPGKDLSDIKNWRPITIGSILARVFSGILDQKLRSFIEICPRQKGFVKEDGCKNNVVLLDRAMARMKEEKGGVVTIVDISKAFDTVPHSALAPCLQGKGAPRMLAQYMADMYKDCTTGISAAGSNSIDVTLRRGVKQGDPLSPLLFNIVLDQIIEEINREAEGIQLGGGSLSILAFADDIVLLNKSAAEARKYISKLNNYLTGLGMSLAANKCSTFQIIARSKTWYIKDPNIEVNGDKVPPTKPEEAFRYLGADMGPWRGITGEGKVPQIIQSVENVARMKLKPHQKISLITEYVLPRFIHSLTICPPNSTALDQIDHEVKQVVKQILHLTPSTTDGLIYSTKLDGGLGIPRLERIVKLAVLRHAAKAALSSDIVLQSGIHEARVQERLKKYANSLRINWPASEKEIETAKKRLKREEADRWQSLVSQGHGVADFRQDRIGNTWLFKPELLKPSRYIDALKLRTNTFGCRTTLKRAGGTNEVNCRKCNAMPETLGHILGGCISNKGLRVKRHDEIKDLIAAKLSRTCTVFPEPTINVSGELKKPDLVIKDRERLLVVDVTVRIEGGASLERAYTEKVEKYRETAKQVQERTGCTSSAVVPVVVGSRGAMPKRTFDDLRLHLGLSKADALTMSMIALRSSIEIANAFLDYGNI

SEQ ID NO: 18179 - protein, 1155 aa, Ectemnius lituratus
MGFSESVAGVPALMGEPTVDDPCMTMDNDSGHDTAVKTHLPLENITYCPVCLLAAKQMAFLALKDLVLHIRMQHNAGTFTWICRMCEKAFPGAHNCTCHIPKCKGRVENIRKQHQCEECACSFDTVRGLSTHERHRHPALRNRKREAGGIPPTRNRGRHNEVWTQEETGLLKELMERFKHERQPNVHIRNFLPGKTLRQISDKKRELLKRTAPTQSTNNIFSQIDEPSQPNSQRALHAGSSNEELLDSQLPYEDETVPASDELDEWEEQMAQAIREIELPRGSKLREVYAKLEDLCHRPRGNADLGDEIDRFITNVLVPKLLEQVGEETRSSRRGPPSNRGNRENTAASSRRNGNHANHSGRARYGYSRCQELFKRCPRKLADVAVSGDFSVIELRRDPPEGNKIRECYEGLWSVPGPEWPATNVSRVESVSMLQACPPISTGETLSRIRRIKKSTAGGSDKLRKAHLQVKGFVAIATKLFNLLLIHRHYPTPWKRNRTTLIPKPGKDLSDIKNWRPITIGSILARVFSGILDQKLRSFIEICPRQKGFVKEDGCKNNVVLLDRAMARMKEEKGGVVTIVDISKAFDTVPHSALAPCLQGKGAPRMLAQYMADMYKDCTTGISAAGSNSIDVTLRRGVKQGDPLSPLLFNIVLDQIIEEINREAEGIQLGGGSLSILAFADDIVLLNKSAAEARKYISKLNNYLTGLGMSLAANKCSTFQIIARSKTWYIKDPNIEVNGDKVPPTKPEEAFRYLGADMGSWRGITREGKIPQIIQSVENVARMKLKPHQKISLITEYVLPRFIHSLTICPPNSTALDQIDHEVKQVVKQILHLTPSTTDGLIYSTKRDGGLGIPRLERIVKLAVLRHAAKTALSSDRVLQSGIQEARVQERLKKHANSLRINWPASEKDIETAKKRLKREEADRWQALVSQGHGVVDFRQDRIGNTWLFKPELLKAFRYVDALKLRTNTFGCRTTLKRAGGTNEVNCWKCNAMPETLGHILGGCISNKGLRVKRHDEIKNLIAAKLSTTCTVFPKPTINVSGELKKPDLVIKDQERLLVVDVTVRIEGEASLERAYSEKVEKYRETAKQIQERTGCKSSAVVPVVVGSRGAMPKRTFDDLRLHLGLSRADALTISMIALRSSVEIANAFLDYGNT

SEQ ID NO: 18180 - protein, 896 aa, Ectemnius continuus
MNNDELEEWKGLMIEAMRDIQLPRGSKLGDLDAHLRDICERFEDNLDMGKDIDTFITNLFVPKLLEQVDEDSGNSARGPQSNRGNRRNANANRRRNGGNANHSERARYGYSRCQELFNRCPRKLADVAMSGDFSVIEMRRDPPDGDKIREFYEGLWSVAGPEWRNTNLTRVEYVSMLQACPPITTGETLSRIRRIKNNTTGGADKLRKVHLRAKGLVAIITRLFNLLLLSRHYPEPWKTNRTTLIPKPGKDLSDIKNWRPITIGSIIARIFSGIIDARLRDIIKLSPRQKGFIREDGCKNNVVLLDRAMAHMKEEKGGVVTIVDISKAFDTVPHSALTPCLEAKGVPKTLARYIAAMYNNCKSGIGATRNSVIDVTLKRGVKQGDPLSPLLFNTVLDPIIEEIDREAEGIHLGGGNLSILAFADDIVLLNRNAAEARKYTNKLSNYLLGLGMSLAASKCSTFQIVARSKTWYIRDPNIVVGGETVPLTRPEEAFRYLGADMGPWTGVAKVAEVPQIVQAAKNVARMRLKPHQKISLITNYVLPRFIHLLTICPPSSTALQQIDHDIKQVVKQILHLTHSTTDGLIYSTRLDGGLGIPRMEHIVKLAVLRHAVKAGHSRDRVLQIGIQEAKVQDRLKKYANSLRLNWPASERDIETAKKRLKREEVDRWQALASQGQGVANFRQDRIGNTWLYKPELLKPSRYIDALRLRTNTFGCRTTLKRAGGDNDINCRRCQAAPETLGHILGSCITNKGLRVKRHDEIKDLIATKLSKSCTVFPEPTVNVSGELKKPDLVIKDQERLLVVDVTVRIEGGANLEHAYNEKVEKYRETAKQIQERLGCTASAVIPVVVGSRGAMPKRTYDDLRLHLGLTRADALTMSMIALRSSIEIANAFIDYG

SEQ ID NO: 18181 - protein, 1131 aa, Ectemnius continuus
MNTDNANGFNAAVNIYLPLENITQCPLCLVLGRQMAFLTIKDIVLHLRTQHTAGTISWICRSCERAFKGAHNCTCHLPKCKGRVTTAPKRFQCEECPSSFDTARGLSTHERHRHPALRNRKRGADGPHPGGHQDNRQNRVWTDEETRLLRELIERFRHERRPNVHIRTFLPSKTLRQISDKKRELLRRAASIAETNDSILQDQGPSQVSQIAPNDGRDSAEGTRYEPEDDESGATMNNDELEEWKGLMIEAMRDIQLPRGSKLGDLDAHLRDICERFEDNLDMGRDIDTFITNLFVPKLLEQVDEDSGNSARGPQSNRGNRRNANANRRRNGGNANHSERARYGYSRCQELFNRCPRKLADVAMSGDFSVIEMRRDPPDGDKIREFYEGLWSIAGPEWRNTNLTRVDYVSMLQACPPITTGETLSRIRRIKNNTTGGADKLRKVHLRAKGLVAIITRLFNLLLLSRHYPEPWKTNRTTLIPKPGKDLSDIKNWRPITIGSIIARIFSGIIDARLRDIIKLSPRQKGFIREDGCKNNVVLLDRAMAHMKEEKGGVVTIVDISKAFDTVPHSALTPCLEAKGVPKTLARYIAAMYNNCKSGIGATRNSVIDVTLKRGVKQGDPLSPLLFNTVLDPIIEEIDKEAEGIHLGSGNLSILAFADDIVLLNRNAAEARKYTNKLSNYLSGLGMSLAASKCSTFQIVARSKTWYIRDPNIVVGGETVPLTRPEEAFRYLGADMGPWTGVAKVGEVPQIVQAAKNVARMRLKPHQKISLITNYVLPRFIHLLTICPPSSTALQQIDHDIKQVVKQILHLTHSTTDGLIYSTRLDGGLGIPRMEHIVKLAVLRHAVKAGHSRDRVLQIGIQEAKVQDRLKKYANSLRLNWPASERDIETAKKRLKREEVDRWQALASQGQGVANFRQDRIGNTWLYKPELLKPSRYIDALRLRTNTFGCRTTLKRAGGDNDINCRRCQAAPETLGHILGSCITNKGLRVKRHDEIKDLIATKLSKSCTVFPEPTVNVSGELKKPDLVIKDQERLLVVDVTVRIEGGANLEHAYNEKVEKYRETAKQIQERLGCTASAVIPVVVGSRGAMPKRTYDDLRLHLGLTRADALTMSMIALRSSIEIANAFIDYG

SEQ ID NO: 18182 - protein, 939 aa, Andrena haemorrhoa
MSLLARREAELSMTGERCMNQALLGFLPGRTLEAVRGVRRRVDYRTLVTEHIGRMEQEAMEPVAAAPAPAREDEEYDQALLEYFRGLSPIGADAFRSETLDGICNRVGLEDRGVTLERLTAYLSGVFPLPRNAGAGRPPRRIPTAEARLSRRKQRRVDYGRVQKLWRRDPRRCYDDVMDGSGASHPLPQEVMVPYWESIMTNARDVSPPPVQREETIRALWSPVTLDEVRQSLPERKTAPGPDALSARILYSTPLEVLSRIYNLVLWCRRLPLHLRGARTVLIPKKPVPSSPSEYRPISVASVLVRGLHKVLARRMGRLIPIDERQRAFRTSDGCADNVFLLDLLLRHHHAHHKPLHVASVDVAKAFDTVSHRAILQTLEARGCPGPMLEYMEAVYSDAVTTIVSGGWQSHAIHPTHGVRQGDPMSPYIFNMVLDRLLKCFPQDIGADIDGVRIAVSAFADDLILASSTTTGLQQLLDCVEGFLAGCGMSVNVGKSFTISLGTVPRQKKTTVDPGNFVLGGLKLAAMKRTDTWTYLGIPFTPEGRLRSDLTVRLAAALGKLTRAPLKPQQRLFALRTYLLPSVYHVGSLGDVRVGSLNGGDRAVRAAVRGWLDLPQDTPVGYFHASVESGGLGVPSLRWCIPRIRLNRLKGLSLSSEASAARPGDYLRFEISRAQERLKDHGAYIDTAEKESRRWAGDLHRSVDGGALKESKRVPGQHRWISGGTRFLSGRDYVRTGKLRINALPTKSRTSRGRMQDRRCRAGCGVSETLNHVLQQCHRTHDARVRRHDAVVAYLARGMEQSGFEVQREPKFRTDEGVRKPDLVATRNSRCVVIDAQVVSEQTILDLAHKRKVEYYAANASLRRAVASSSGTEDVSFHSATLSWRGLWSVKSARGLVGAGLMKKRDFSVISSRVLVGGVAAWVLFNRRTSMRVDRTGVG

SEQ ID NO: 18183 - protein, 1063 aa, Andrena haemorrhoa
MLGPATSSSFGSETESCLCEHGSWGLPAHSTLNRVGPRKNKQASDAKSTRGAPTGAPQPTHSPQPGTSSSTQPVFHCEFPGCDRFFDTKIGRGVHAKRAHPDWTDDMNRAVTTKVRWTDEELSLLARREADLAMEGTRLMNQALMGFLPGRSLEALKGVRRRQDYKALVTGCIERLRQESVEPASADPPPAHEDEVDVCEQALLDYFRGLQPVGADAFRTEILDDVCNRAGLEDRGVTLERLTAYLSEVFPSPRGARDGRRPRRIPTNTAVQLSNRKQRRIDYGRVQKTWRKDPRRAYDGIMSGSDTNQSLPKEVMVPYWEAIMTDARDVSPPPALREGSISALWAPVTPDEVRRGLPERTTAPGPDGLSARILYRVPLEALTRIYNLVLWCRRLPLQLRAARTVLIPKKPSPENPSDFRPITVPSVLVRGLHKILAGRMGRFIGLDERQRAFRASDGCADNVFLLDLLLRHHHARHKPLHVASIDVAKAFDTVSHRSILQTLEARGCPGPMLEYMETVYADAQTTIVAGGWQSHAIHPRHGVRQGDPMSPYIFNMVLDRLLKCLPLDIGADIDGVRIAASAFADDLILAASTTTGLQQLLDHAQSFLAGCGMSINAGKSFTISLGTVPRQKKTTVDPGNFSLEGQTLASMRRSDTWTYLGVPFTPEGRLRPDLEYRVAAALQKISKAPLKPQQRLFALRTYLLPGVYHVGSLGDVRLGSLNGSDRAVRAAVRRWLDLPHDTPKAYFHATVDSGGLGIPSLRWTIPRIRLTRLNNLSLSANAAAALPGSYLHVEIGRVQKRLNDHGVSIDSPAKEARRWRDALHQSVDGSALKESKRVPGQHRWIAEGTHFLSGRDFVRANKLRINALPTRSRTSRGRLQDRQCRAGCNAPETLNHVLQQCHRTHDARIKRHNAVVAYVARSLEQQGFEVQREPIHQTDEGVRKPDLVASKDSRCFVIDAQVVSEQSILDLAHKRKVQYYAQNNSLHRGIASGSGAEIVTFHSVTLSWRGLWSAKSVRDLLSAGIIGKRDLKVVSTRVLVGGVAAWGIFNRRTTMRHDRSGVG

SEQ ID NO: 18184 - protein, 957 aa, Xanthogramma pedissequum
MNPQPTTLANDQVQCQYCQKYCKNQRGLGVHTRSAHPDERNEEICVERVKKQWSDEELSMMVRFEVEGIINNERFLNQYLVKKMPNRTLEAIKGARRKQAYKEAVSEAIAAREEQPLLSSLENTIRPNTPSLDFALNPIDNINDQIKEKVQELLGTVENTQEEFKTQRLISIARMSIEGNDVSSECLVWIRDVFPLHPRQHRRRTERDETHEQNIPNWRQRRRDYAKMQTLWKKDMGAVAKLVLDGPIIAEMPTSEAMTDYWKPIFEEPSFIPQIQSGDNIMPPRNNLNHIWGPINELEITKNDICSSSAAGIDGISPRQWKAVPANLRALFYNIILLIGGFPEEMLTSRTIFVPKKTGATEPCQFRQISITSVIVRHLHRILAARLQGCNLIDEKQRCLNDGCLDNISILATLLEDSRSKLKELHVISLDVAKAFDSLSHHAINQMLKKRGLPLVFTNYMMRSYHLSSTVIETNNQRSELIRVKRGVKQGDPLSTIIFCLVIDEIIAAIPDNIGYKLNGNTIKAFAYADDIILIASRKIGMQTSLKYVEKNACMRGLIMNTNKCCGLSIVPDGKNKTYKIISEAIFKLTGGSIPQLVSSQEWRYLGLDIRPVGPKKAGSDIAPYMDNLSKAPIKPQQRLKILWSFLLPRLYHKLVLAPITMDKLKRIDKQIREYIRRWIRLPGDIPIGYYHTSINDGGLGIPSMCTTIPGLILNRFQRLSTSTSSAVRAVAHENWVTKKLEWRRKVLQKDETLLETRMSREIWWAESLYRSVDGVELREASKAKVSTAWMNNVYGIPGRDFIQHVHLRINCLPTRIRTSRGIRRTTAQINCRGGCSVTETAAHIIQNCHRTHGGRILRDNAVCKVLTSGLKDKGFRVEEEPRIRTTQGLMKPDIVAAKGNVVNVIDAQVVSGATSLNSAHERKKTYYSLNQDIVNNLSNKYNVIPSNVHFSTCTVS

SEQ ID NO: 18185 - protein, 965 aa, Melanostoma mellinum
MDPLLRPRIPRIHELNKLEKLLLTINSEILPQHINEGISLEELNGLIYVCAATAVIALGKRLKSAQSNTTPRPKTVPKWRRRLETKISHLREDLGRLTAFRTGSRSRRLCRRVAALIKPLHYLRISQDQLSDLIDKKVQQLAATSKRLRRYNKCSQRKEENRLFYENQKAFYRSLSLSPAESGENHTPSVQECEQFWGKIWGSESTYNENALWIQAEIETSECITPMSQQLVSDEEVRTAISETQNWKSPGVDQIQNIWLKKLTATHRQLAKCFNDVILGTTSTPYFLTTGITYLLPKGNPCRDPSKYRPITCLCTMYKLFTKILSNRIYQHCSENNIISEQQKGCRKQSMGCKDQLTIDSVVMGIALKKKRNLSMAFIDYKKAFDSMPHGYLKKVLRIYKIDELTINCLEQLMTNWNTKLSINGNVGRPISIRRGIFQGDSLSPLWFCLGLNPLSRVLSRMRSGFKIRTETFDLQLNHLLYVDDLKIYAERRDKLYRMIEVVKSFSDDIRMEFGLDKCKMTHLVKGQLEPRDEGCPIDENQVIEELQFGESYKYLGFIQLKGISHTVIKTSLISQFKSRLNAVLRTNISGGNKCKAINTWAVPVLTYSFGVIKWSSTDIAHLETTIRTSLTRFQSHHPQGAIERIILPRKMGGRGIIHLRKLHHDQSILLREYFRNSDSVLLKAVSLCDDGYTPLMLSRDNYPIPTDAITHDAVLLAWKSKQIHGKHAQDLQLEHIDRTASNLWLMEGKLFSETEGFIQAIQDRILPTRNYRWAVLREGIEDRCRRCGDTGETIDHILGGCTLFAPLDYTNRHNNVAKIIHQQLAIQFGLIQHKVPFYKYYPSPVLENSTAKLYWDRTIITDQHLAANKPDIVFFQKGPRIIQIIDVAVPLSKNLLTTYATKVSKYTPLAIEMKQMYGSEQVEVIPIVPSRRSVTLSRWEGLISLFEPSSMPKGGRRMGKMNEN

SEQ ID NO: 18186 - protein, 983 aa, Tachina fera
MFQCSICSRSFNTKTGLGVHIRRAHPNESDVINARIEVKSRWSEEELMLMAKKESELHGVRFMNKELNKFFPKRSVEAIKKARQKDSYKEYVENFLTGSNIDPDTITPVSPTHTPMGDDNDDHFITNSLDELRSNNQDRYQIAVLMDIIENARSVGKTGTLTCLTNYLASILPIVSRQRRENRNINRNINNNVVTSRRKQRRIDYAKTQKQWEKHQSRCIKSIIEGANNSILPPKQIMEPFWRNVMETSSTTKPILPSKRQQLERVWSSITSEEIDKYRLETNTSPGPDGITSRQLKNVPSGILSKIFNIILWCGKFPNEIAKSKTIFIPKKPDSKEPGDFRPITIPSVLVRQLHTILARRIEDSLKLDQRQRAFIKTDGVGDNTIVLDIVLKSTKNKYSSLYIASLDVSKAFDSVTHDTIFEILKSFGFHINFIKYIEKFYKTTQTTLMTTSWESSPLIPKRGVKQGDPISPMFFNMVIDKLLDLLPNEVGYRLGRSVINALAFADDLVLLASTQDGLQKLIDTTHEFFSKCGLELNTSKCLSISIKGQPKQKRTIIEQNSFNINGRSMPALKRTDEWRYLGISFTADGRCKIRQENDIIEKLERITKAPLKPQQRLHALRTVLIPQLYHKLTLGEIKISSLNKTDKNIRRYVRKWLNLPNDVPIAFFHAPVSGGGLGIESVRWFGPMLRKKRLENIELPNVIDESQIFDAVQNEITIAERRLRAGNYSLLEAETINEYFSNKLYSSVDGAGLREAKKIKEAHRWVREPTKLLTGRDFINCIRLRINALPSKSRTSRGRPRIDRTCRAGCMLQETPYHTIQVCHRSSHARIERHDCVKTFVVRKMVEQGFEVHEEPQLNTSDGLRKPDIVGVKENELLIIDAQVVNDANDLDLAHNRKKAYYNTNAVREAIRNKFNQNVKNVGTITVSWRGVVSKASMNDLVNWKILKKADAALISTKAAIGSVRAFRMFNNTTSVVRNGIG

SEQ ID NO: 18187 - protein, 983 aa, Tachina fera
MFQCSICSRSFNTKTGLGVHIRRAHPNESDVINARIEVKSRWSEEELMLMAKKESELHGVRFMNKELNKFFPKRSVEAIKKARQKDSYKEYVENFLTGSNIDPDTITPVSPTHTPMGDDNDDHFITNSLDELRSNNQDRYQIAVLMDIIENARSVGKTGTLTCLTNYLASILPIVSRQRRDNRNINRNINNNVVTSRRKQRRIDYAKTQKQWEKHQSRCIKSIIEGANNSILPPKQIMEPFWRNVMETSSTTKPILPSKRQQLERVWSSITSEEIDKYRLETNTSPGPDGITSRQLKNVPSGLLSKIFNIILWCGKFPNEIAKSKTIFIPKKPDSKEPGDFRPITIPSVLVRQLHTILARRIEDSLKLDQRQRAFIKTDGVGDNTIVLDMVLKSTKNKYSSLYIASLDVSKAFDSVTHDTIFEILKSFGFHINFIKYIEKFYKTTQTTLMTTSWESSPLIPKRGVKQGDPISPMFFNMVIDKLLDLLPNEVGYRLGRSVINALAFADDLVLLASTQDGLQKLIDTTHEFFSKCGLELNTSKCLSISIKGQPKQKRTIIEQNNFNINGRSMPALKRTDEWRYLGISFTADGRCKVRQENDIIEKLERITKAPLKPQQRLHTLRTVLIPQLYHKLTLGEIKISSLNKTDKNIRRYVRKWLNLPNDVPIAFFHAPVSGGGLGIESVRWFGPMLRKKRLENIELPNVIDESQIFDDVQNEITIAERRLRAGNYSLLEAETINEYFSNKLYSSVDGAGLREAKKIKEAHRWVREPTKLLTGRDFINCIRLRINALPSKSRTSRGRPGIDRTCRAGCMLQETPYHTIQVCHRSSHARIERHDCVKTFVVRKMVEQGFEVHEEPQLNTSDGLRKPDIVGVKENELLIIDAQVVNDANDLDLAHNRKKAYYNTSAVREAIRNKFNQNVKNVGTITVSWRGVVSKASMNDLVNWKILKKADAALISTKAAIGSVRAFRMFNNTTSVVRNGIG

SEQ ID NO: 18188 - protein, 983 aa, Tachina fera
MFQCSICSRSFNTKTGLGVHIRRAHPNESDVINARIEVKSRWSEEELMLMAKKESELHGVRFMNKELNKFFPKRSVEAIKKARQKDSYKEYVENFLTGSNIDPDTITPVSPTHTPMGDDNDDHFITNSLDELRSNNQDRYQIAVLMDIIENARSVGKTGTLTCLTNYLASILPIVSRQRRENRNINRNINNNVVTSRRKQRRIDYAKTQKQWEKHQSRCIKSIIEGANSSILPPKQIMEPFWRNVMETSSTTKPILPSKRQQLERVWSSITSEEIDKYRLETNTSPGPDGITSRQLKNVPSGILSKIFNIILWCGKFPNEIAKSKTIFIPKKPDSKEPGDFRPITIPSVLVRQLHTILARRIEDSLKLDQRQRAFIKTDGVGDNTIVLDIVLKSTKNKYSSLYIASLDVSKAFDSVTHDTIFEILKSFGFHINFIKYIEKFYKTTQTTLMTTSWESSPLIPKRGVKQGDPISPMFFNMVIDKLLDLLPNEVGYRLGRSVINALAFADDLVLLASTEDGLQKLIDTTHEFFSKCGLELNTSKCLSISIKGQPKQKRTIIEQNSFNINGRSMPALKRTDEWRYLGISFTADGRCKIRQENDIIEKLERITKAPLKPQQRLHALRTVLIPQLYHKLTLGEIKISSLNKTDKNIRRYVRKWLNLPNDVPIAFFHAPVSGGGLGIESVRWFGPMLRKKRLENIELPNVIDESQIFDAVQNEITIAERRLRAGNYSLLEAETINEYFSNKLYSSVDGAGLREAKKIKEAHRWVREPTKLLTGRDFINCIRLRINALPSKSRTSRGRPGIDRTCRAGCMLQETPYHTIQVCHRSSHARIERHDCVKTFVVRKMVEQGFEVHEEPQLNTSDGLRKPDIVGVKENELLIIDAQVVNDANDLDLAHNRKKAYYNTSAVREAIRNKFNQNVKNVGTITVSWRGVMSKASMNDLVNWKILKKADAALISTKAAIGSVRAFRMFNNTTSVVRNGIG

SEQ ID NO: 18189 - protein, 983 aa, Tachina fera
MFQCSICSRSFNTKTGLGVHIRRAHPNESDVINARIEVKSRWSEEELMLMAKNESELHGVRFMNKELNKFFPKRSVEAIKKARQKDSYKEYVENFLTGSNIDPDTITPVSPTHTPMGDDNDDHFITNSLDELRSNNQDRYQIAVLMDIIENARSVGKTGTLTCLTNYLASILPIVSRQRRDNRNINRNINNNVVTSRRKQRRIDYAKTQKQWEKHQSRCIKSIIEGANNSILPPKQIMEPFWRNVMETSSTTKPILPSKRQQLERVWSSITSEEIDKYRLETNTSPGPDGITSRQLKNVPSGLLSKIFNIILWCGKFPNEIAKSKTIFIPKKPDSKEPGDFRPITIPSVLVRQLHTILARRIEDSLKLDQRQRAFIKTDGVGDNTIVLDMVLKSTKNKYSSLYIASLDVSKAFDSVTHDTIFEILKSFGFHINFIKYIEKFYKTTQTTLMTTSWESSPLIPKRGVKQGDPISPMFFNMVIDKLLDLLPNEVGYRLGRSVINALAFADDLVLLASTQDGLQKLIDTTHEFFSKCGLELNTSKCLSISIKGQPKQKRTIIEQNNFNINGRSMPALKRTDEWRYLGISFTADGRCKVRQENDIIEKLERITKAPLKPQQRLHALRTVLIPQLYHKLTLGEIKISSLNKTDKNIRRYVRKWLNLPNDVPIAFFHAPVSGGGLGIESVRWFGPMLRKKRLENIELPNVIDESQIFDAVQNEITIAERRLRAGNYSLLEAETINEYFSNKLYSSVDGAGLREAKKIKEAHRWVREPTKLLTGRDFINCIRLRINALPSKSRTSRGRPGIDRTCRAGCMLQETPYHTIQVCHRSSHARIERHDCVKTFVVRKMVEQGFEVHEEPQLNTSDGLRKPDIVGVKENELLIIDAQVVNDANDLDLAHNRKKAYYNTSAVREAIRNKFNQNVKNVGTITVSWRGVVSKASMNDLVNWKILKKADAALISTKAAIGSVRAFRMFNNTTSVVRNGIG

SEQ ID NO: 18190 - protein, 983 aa, Tachina fera
MFQCSICSRSFNTKTGLGVHIRRAHPNESDVINARIEVKSRWSEEELMLMAKKESELHGVRFMNKELNKFFPKRSVEAIKKARQKDSYKEYVENFLTGSNIDPDTITPVSPTHTPMGDDNDDHFITNSLDELRSNNQDRYQIAVLMDIIENARSVGKTGTLTCLTNYLASILPIVSRQRRENRNINRNINNNVVTSRRKQRRIDYAKTQKQWEKHQSRCIKSIIEGANSSILPPKQIMEPFWRNVMETSSTTKPILPSKRQQLERVWSSITSEEIDKYRLETNTSPGPDGITSRQLKNVPSGILSKIFNIILWCGKFPNEIAKSKTIFIPKKPDSKEPGDFRPITIPSVLVRQLHTILARRIEDSLKLDQRQRAFIKTDGVGDNTIVLDMVLKSTKNKYSSLYIASLDVSKAFDSVTHDTIFEILKSFGFHMNFIKYIEKFYKTTQTTLTTTAWESSPLIPKRGVKQGDPISPMFFNMVIDKLLDLLPNEVGYRLGRSIINALAFADDLVLLASTEDGLQKLIDTTHEFFSKCGLELNTSKCLSISIKGQPKQKRTIIEQNNFNINGRSMPALKRTDEWRYLGISFTADGRCKIRQENDIIEKLERITKAPLKPQQRLHALRTVLIPQLYHKLTLGEIKISSLNKTDKNIRRYVRKWLNLPNDVPIAFFHAPVSGGGLGIESVRWFGPMLRKKRLENIELPNVIDESQIFDAVQNEITIAERRLRAGNYSLLEAETINEYFSNKLYSSVDGAGLREAKKIKEAHRWVREPTKLLTGRDFINCIRLRINALPSKSRTSRGRPGIDRTCRAGCMLQETPYHTIQVCHRSSHARIERHDCVKTFVVRKMVEQGFEVHEEPQLNTSDGLRKPDIVGVKENELLIIDAQVVNDANDLDLAHNRKKAYYNTSAVREAIRNKFNQNVKNVGTITVSWRGVMSKASMNDLVNWKILKKADAALISTKAAIGSVRAFRMFNNTTSVVRNGIG

SEQ ID NO: 18191 - protein, 983 aa, Tachina fera
MFQCSICSRSFNTKTGLGVHIRRAHPNESDVINARIEVKSRWSEEELMLMAKKESELHGVRFMNKELNKFFPKRSVEAIKKARQKDSYKEYVENFLTGSNIDPDTITPVSPTHTPMGDDNDDHFITNSLDELRSNNQDRYQIAVLMDIIENARSVGKTGTLTCLTNYLASILPIVSRQRRDNRNINRNINNNVVTSRRKQRRIDYAKTQKQWEKHQSRCIKSIIEGANNSILPPKQIMEPFWRNVMETSSTTKPILPSKRQQLERVWSSITSEEIDKYRLETNTSPGPDGITSRQLKNVPSGLLSKIFNIILWCGKFPNEIAKSKTIFIPKKPDTKEPGDFRPITIPSVLVRQLHTILARRIEDSLKLDQRQRAFIKTDGVGDNTIVLDMVLKSTKNKYSSLYIASLDVSKAFDSVTHDTIFEILKSFGFHINFIKYIEKFYKTTQTTLMTTSWESSPLIPKRGVKQGDPISPMFFNMVIDKLLDLLPNEVGYRLGRSVINALAFADDLVLLASTQDGLQKLIDTTHEFFSKCGLELNTSKCLSISIKGQPKQKRTIIEQNNFNINGRSMPALKRTDEWRYLGISFTADGRCKVRQENDIIEKLERITKAPLKPQQRLHALRTVLIPQLYHKLTLGEIKISSLNKTDKNIRRYVRKWLNLPNDVPIAFFHAPVSGGGLGIESVRWFGPMLRKKRLENIELPNVIDESQIFDAVQNEITIAERRLRAGNYSLLEAETINEYFSNKLYSSVDGAGLREAKKIKEAHRWVREPTKLLTGRDFINCIRLRINALPSKSRTSRGRPGIDRTCRAGCMLQETPYHTIQVCHRSSHARIERHDCVKTFVVRKMVEQGFEVHEEPQLNTSDGLRKPDIVGVKENELLIIDAQVVNDANDLDLAHNRKKAYYNTSAVREAIRNKFNQNVKNVGTITVSWRGVVSKASMNDLVNWKILKKADAALISTKAAIGSVRAFRMFNNTTSVVRNGIG

SEQ ID NO: 18192 - protein, 983 aa, Tachina fera
MFQCSICSRSFNTKTGLGVHIRRAHPNESDVINARIEVKSRWSEEELMLMAKKESELHGVRFMNKELNKFFPKRSVEAIKKARQKDSYKEYVENFLTGSNIDPDTITPVSPTHTPMGDDNDDHFITNSLDELRSNNQDRYQIAVLMDIIENARSVGKTGTLTCLTNYLASILPSVSRQRRENRNINRNINNNVVTSRRKQRRIDYAKTQKQWEKHQSRCIKSIIEGANNSILPPKQIMEPFWRNVMETSSTTKPILPSKRQQLERVWSSITSEEIDKYRLETNTSPGPDGITSRQLKNVPSGILSKIFNIILWCGKFPNEIAKSKTIFIPKKPDSKEPGDFRPITIPSVLVRQLHTILARRIEDSLKLDQRQRAFIKTDGVGDNTILLDMVLKSTKNKYSSLYIASLDVSKAFDSVTHDTIFEILKSFGFHINFIKYIEKFYKTTQTTLMTTSWESSPLIPKRGVKQGDPISPMFFNMVIDKLLDLLPNEVGYRLGRSVINALAFADDLVLLASTQDGLQKLIDTTHEFFSKCGLELNTSKCLSISIKGQPKQKRTIIEQNNFNINGRSMPALKRTDEWRYLGISFTADGRCKIRQENDIIEKLERITKAPLKPQQRLHALRTVLIPQLYHKLTLGEIKISSLNKTDKNIRRYVRKWLNLPNDVPIAFFHAPVSGGGLGIESVRWFGPMLRKKRLENIELPNVIDESQIFDAVQNEITIAERRLRAGNYSLLEAETINEYFSNKLYSSVDGAGLREAKKIKEAHRWVREPTKLLTGRDFINCIRLRINALPSKSRTSRGRPGIDRTCRAGCMLQETPYHTIQVCHRSSHARIERHDCVKTFVVRKMVEQGFEVHEEPQLNTSDGLRKPDIVGVKENELLIIDAQVVNDANDLDLAHNRKKAYYNTSAVREAIRNKFNQNVKNVGTITVSWRGVMSKASMNDLVNWKILKKADAALISTKAAIGSVRAFRMFNNTTSVVRNGIG

SEQ ID NO: 18193 - protein, 983 aa, Tachina fera
MFQCSICSRSFNTKTGLGVHIRRAHPNESDVINARIEVKSRWSEEELMLMAKKESELHGVRFMNKELNKFFPKRSVEAIKKARQKDSYKEYVENFLTGSNIDPDTITPVSPTHTPMGDDNDDHFITNSLDELRSNNQDRYQIAVLMDIIENARSVGKTGTLTCLTNYLASILPSVSRQRRENRNINRNINNNVVTSRRKQRRIDYAKTQKQWEKHQSRCIKSIIEGANNSILPPKQIMEPFWRNVMETSSTTKPILPSKRQQLERVWSSITSEEIDKYRLETNTSPGPDGITSRQLKNVPSGILSKIFNIILWCGKFPNEIAKSKTIFIPKKPDSKEPGDFRPITIPSVLVRQLHTILARRIEDSLKLDQRQRAFIKTDGVGDNTIVLDMVLKSTKNKYSSLYIASLDVSKAFDSVTHDTIFEILKSFGFHINFIKYIEKFYKTTQTTLTTTAWESSPLIPKRGVKQGDPISPMFFNMVIDKLLDLLPNEVGYRLGRSIINALAFADDLVLLASTKDGLQKLIDTTHEFFSKCGLELNTSKCLSISIKGQPKQKRTIIEQNNFNINGRSMPALKRTDEWRYLGISFTADGRCKIRQENDIIEKLERITKAPLKPQQRLHALRTVLIPQLYHKLTLGEIKISSLNKTDKNIRRYVRKWLNLPNDVPIAFFHAPVSGGGLGIESVRWFGPMLRKKRLENIELPNVIDESQIFDAVQNEITIAERRLRAGNYSLLEAETINEYFSNKLYSSVDGAGLREAKKIKEAHRWVREPTKLLTGRDFINCIRLRINALPSKSRTSRGRPGIDRTCRAGCMLQETPYHTIQVCHRSSHARIERHDCVKTFVVRKMVEQGFEVHEEPQLNTSDGLRKPDIVGVKENELLIIDAQVVNDANDLDLAHNRKKAYYNTSAVREAIRNKFNQNVKNVGTITVSWRGVVSKASMNDLVNWKILKKADAALISTKAAIGSVRAFRMFNNTTSVVRNGIG

SEQ ID NO: 18194 - protein, 983 aa, Tachina fera
MFQCSICSRSFNTKTGLGVHIRRAHPNESDVINARVEVKSRWSEEELMLMAKKESELHGVRFMNKELNKFFPKRSVEAIKKARQKDSYKEYVENFLTGSNIDPDTITPVSPTHTPMGDDNDDHFITNSLDELRSNNQDRYQIAVLMDIIENARSVGKTGTLTCLTNYLASILPIVSRQRRDNRNINRNINNNVVTSRRKQRRIDYAKTQKQWEKHQSRCIKSIIEGANNSILPPKQIMEPFWRNVMETSSTTKPILPSKRQQLERVWSSITSEEIDKYRLETNTSPGPDGITSRQLKNVPSGLLSKIFNIILWCGKFPNEIAKSKTIFIPKKPDSKEPGDFRPITIPSVLVRQLHTILARRIEDSLKLDQRQRAFIKTDGVGDNTIVLDMVLKSTKNKYSSLYIASLDVSKAFDSVTHDTIFEILKSFGFHINFIKYIEKFYKTTQTTLMTTSWESSPLIPKRGVKQGDPISPMFFNMVIDKLLDLLPNEVGYRLGRSVINALAFADDLVLLASTQDGLQKLIDTTHEFFSKCGLELNTSKCLSISIKGQPKQKRTIIEQNNFNINGRSMPALKRTDEWRYLGISFTADGRCKVRQENDIIEKLERITKAPLKPQQRLHALRTVLIPQLYHKLTLGEIKISSLNKTDKNIRRYVRKWLNLPNDVPIAFFHAPVSGGGLGIESVRWFGPMLRKKRLENIELPNVIDESQIFDAVQNEITIAERRLRAGNYSLLEAETINEYFSNKLYSSVDGAGLREAKKIKEAHRWVREPTKLLTGRDFINCIRLRINALPSKSRTSRGRPGIDRTCRAGCMLQETPYHTIQVCHRSSHARIERHDCVKTFVVRKMVEQGFEVHEEPQLNTSDGLRKPDIVGVKENELLIIDAQVVNDANDLDLAHNRKKAYYNTSAVREAIRNKFNQNVKNVGTITVSWRGVVSKASMNDLVNWKILKKADAALISTKAAIGSVRAFRMFNNTTSVVRNGIG

SEQ ID NO: 18195 - protein, 983 aa, Tachina fera
MFQCSICSRSFNTKTGLGVHIRRAHPNESDVINARIEVKSRWSEEELMLMAKKESELHGVRFMNKELNKFFPKRSVEAIKKARQKDSYKEYVENFLTGSNIDPDTITPVSPTHTPMGDDNDDHFITNSLDELRSNNQDRYQIAVLMDIIENARSVGKTGTLTCLTNYLASILPIVSRQRRDNRNINRNINNNVVTSRRKQRRIDYAKTQKQWEKHQSRCIKSIIEGANNSILPPKQIMEPFWRNVMETSSTTKPILPSKRQQLERVWSSITSEEIDKYRLETNISPGPDGITSRQLKNVPSGLLSKIFNIILWCGKFPNEIAKSKTIFIPKKPDSKEPGDFRPITIPSVLVRQLHTILARRIEDSLKLDQRQRAFIKTDGVGDNTIVLDMVLKSTKNKYSSLYIASLDVSKAFDSVTHDTIFEILKSFGFHINFIKYIEKFYKTTQTTLMTTSWESSPLIPKRGVKQGDPISPMFFNMVIDKLLDLLPNEVGYRLGRSVINALAFADDLVLLASTQDGLQKLIDTTHEFFSKCGLELNTSKCLSISIKGQPKQKRTIIEQNNFNINGRSMPALKRTDEWRYLGISFTADGRCKVRQENDIIEKLERITKAPLKPQQRLHALRTVLIPQLYHKLTLGEIKISSLNKTDKNIRRYVRKWLNLPNDVPIAFFHAPVSGGGLGIESVRWFGPMLRKKRLENIELPNVIDESQIFDAVQNEITIAERRLRAGNYSLLEAETINEYFSNKLYSSVDGAGLREAKKIKEAHRWVREPTKLLTGRDFINCIRLRINALPSKSRTSRGRPGIDRTCRAGCMLQETPYHTIQVCHRSSHARIERHDCVKTFVVRKMVEQGFEVHEEPQLNTSDGLRKPDIVGVKENELLIIDAQVVNDANDLDLAHNRKKAYYNTSAVREAIRNKFNQNVKNVGTITVSWRGVVSKASMNDLVNWKILKKADAALISTKAAIGSVRAFRMFNNTTSVVRNGIG

SEQ ID NO: 18196 - protein, 1393 aa, Schrankia costaestrigalis
MANPNIMEHNNKNKRLTPLPGGYRQGTSGAGAGRRSTSSSMRTTSDSLLNRRAGVRDTQNASADIIRDADDALQSRDLDLTASAGPSVTTTTNLDEDDARKKWSQEELQELMFCFYKAKAEGVGYIKRLFQHFKERNPHNPKTITFNGNTLSNQARTIIKRNFLSTQLLQEIKIQAELSITESQTQPSTLSLPGTSQQTHTHTTTHSPTQQTHESICTDTKDNRRKWTEHEIRELMFCYYKAKNDGSNYIKRLLALFKERNPHNPKITKFNGNTLSNQARTVISREMIPRQELLEIKIQAEHPHPVHLPSTQQHCIHNTDTPSTSHSPLLDNIESLIDVHDNTQQSNIQTETGSLNNESEQTFHLTQQTNLVDEELESTISAFLQHLSEIKNTPIENRIILPKISFNKQIIQSLQKLNTYLHNLLPSQNTLREINDIIYAAATTLISINGQKPYTTSTRIKTKIDPPWKRRLKTKLEENRKELGRLLEIKRGVNTRRMIKIKEKLYNKYNIFTEQDLDNIVEMITQKVKAYAGRIKRYDEMNDRKEYNIKFHQNQHLFYRTLNKSQQAPIELPTKDAVQDFWNSILSEPISYNRQAQWISDVEKENEHINQHHFVELTVEQIKKALQKSHNWKTPGIDQIQNYYLKYFTATHPYITDAFNRILQKTEPIEPWFTTGRVILIPKNENTTEPKNWRPIACLPTMYKILTSVIADELYKHCEINNILAPEQRGCRRHVRGCKDHLILNKSLLEDAHVCQKNLSMGWIDYSKAFDSISHEWLLKVLNIYKCPDAIAGFLELVMPFWNVVMTARGASASVTTDPIHIRRGIFQGDSLSPLLFCLSLNPLSQILNNYQAKGYTLKEGSSITHLLYMDDLKVYANSKYNLNILLDSTEIFSRDIGMQFGLSKCNVLHMKAGKRSECQGEGHSLLNGAVFEYLKENQKYKYLGINEAGKIDHCEIRETVKKEYFRRVNALTNTQLNSRNLIKAINIYAVPVLLYTFGVINYKTSDLTKIDTKTRKLLNMNKAHTQKADTERLYLPVEKGGRGLTNIETLHNIQIIKFKQYLELKQDYIINAIVEHDTHKDKYSIIKDSRKNISDLGLENTQNYTDTDFKAACIKTKTDRWKAKPLHGQFYRLVIDKNNVDSEYSFRWLKKQSIPPSLESSIFAIQDQAIMTRQFERDILHKPIDGKCRLCAIKDETVQHIVSGCEKLAGTYYIKRHNNIVQYIFWALAKKHNFEVNSLWWKEHLTQPKVIENDTAKLMWEISVQTDVTVLHNRPDIIYIDKINNKTFLIDITVPSDYNIGPKEIEKLSKYHLLKTEITRLWNTRTETIPIVIGSTGVVGKSIHRYCEKLDANINLHIIQKQAAIHTVTIISKVLGDTVFVNNIGDTEPPLP

SEQ ID NO: 18197 - protein, 1167 aa, Schrankia costaestrigalis
MFCYYKAKNDGSNYIKRLLALFKERNPHNPKITKFNGNTLSNQARTVISREMIPRQELLEIKIQAEQPQTDLHIDLPHPVHLPSTQQHCIHNTDTPSTSHSPLLDNIESLIDVHDNTQQSNIQTETGSLNNESEQTFHLTQQTNLVDEELESTISAFLQHLSEIKNTPIENRKILPKISFNKQIIQSLQKLNTYLHNLLPSQNTLREINDIIYAAATTLISINGQKPYTTSTRIKTKIDPPWKRRLKTKLEENRKELGRLLEIKRGVNTRRMIKIKEKLYNKYNIFTEQDLDNIVEMITQKVKAYAGRIKRYDEMNDRKEHNIKFHQNQHLFYRTLNKSQQAPIELPTKDAVQDFWNSILSEPISYNRQAQWISDVEKENEHINQHHFVELTVEQIKKALQKSHNWKTPGIDQIQNYYLKYFTATHPYITDAFNRILQKTEPIEPWFTTGRVILIPKNENTTEPKNWRPIACLPTMYKILTSVIADELYKHCEINNILAPEQRGCRRHVRGCKDHLILNKSLLEDAHVCQKNLSMGWIDYSKAFDSISHEWLLKVLNIYKCPDAIAGFLELVMPFWNVVMTARGASASVTTDPIHIRRGIFQGDSLSPLLFCLSLNPLSQILNNYQAKGYTLKEGSSITHLLYMDDLKVYANSKYNLNILLDSTEIFSRDIGMQFGLSKCNVLHMKAGKRSECQGEGHSLLNGAVFEYLKENQKYKYLGINEAGKIDHCEIRETVKKEYFRRVNALTNTQLNSRNLIKAINIYAVPVLLYTFGVINYKTSDLTKIDTKTRKLLNMNKAHTQKADTERLYLPVEKGGRGLTNIETLHNIQIIKFKQYLELKQDYIINAIVEHDTHKDKYSIIKDSCKNISDLGLENTQNYTDTDFKAACIKTKTDRWKAKPLHGQFYRLVIDKNNVDSEYSFRWLKKQSIPPSLESSIFAIQDQAIMTRQFERDILHKPIDGKCRLCAIKDETVQHIVSGCEKLAGTYYIKRHNNIVQYIFWTLAKKHNFEVNNLWWKEHLTQPKVIENDTAKLMWEISVQTDVTVLHNRPDIIYIDKINNKTFLIDITVPSDYNIGPKEIEKLSKYHLLKTEITRLWNTRTETIPIVIGSTGVVGKSIHRYCEKLDANINLHIIQKQAAIHTVTIISKVLGNTVFVNNFGDAEPPLP

SEQ ID NO: 18198 - protein, 1398 aa, Schrankia costaestrigalis
MANPNIMEHNNKNKRLTPLPGGYRQGTSGAGAGRRSMRTTSDSLLNRRAGVRDTQNASADIIRDADDALQSRDLDLTASAGPSVTTTTNLDEDDARKKWSQEELQELMFCFYKAKAEGVGYIKRLFQHFKERNPHNPKTITFNGNTLSNQARTIIKRNFLSTQLLQEIKIQAELSITESQTQPSTLSLPGTSQQTHTHTTTHSPTQQTHESICTDTKDNRRKWTEHEIRELMFCYYKAKNDGSNYIKRLLALFKERNPHNPKITKFNGNTLSNQARTVISREMIPRQELLEIKIQAEQPQTDLHIDLPHPVHLPSTQQHCIHNTDTPSTSHSPLLDNIESLIDVHDNTQQSNIQTETGSLNNESEQTFHLTQQTNLVDEELESTISAFLQHLSEIKNTPIENRKILPKISFNKQIIQSLQKLNTYLHNLLPSQNTLREINDIIYAAATTLISINGQKPYTTSTRIKTKIDPPWKRRLKTKLEENRKELGRLLEIKRGVNTRRMIKIKEKLYNKYNIFTEQDLDNIVEMITQKVKAYAGRIKRYDEMNDRKEHNIKFHQNQHLFYRTLNKSQQAPIELPTKDAVQDFWNSILSEPISYNRQAQWISDVEKENEHINQHHFVELTVEQIKKALQKSHNWKTPGIDQIQNYYLKYFTATHPYITDAFNRILQKTEPIEPWFTTGRVILIPKNENTTEPKNWRPIACLPTMYKILTSVIADELYKHCEINNILAPEQRGCRRHVRGCKDHLILNKSLLEDAHVCQKNLSMGWIDYSKAFDSISHEWLLKVLNIYKCPDAIAGFLELVMPFWNVVMTVRGASASVTTDPIHIRRGIFQGDSLSPLLFCLSLNPLSQILNNYQAKGYTLKEGSSITHLLYMDDLKVYANSKYNLNILLDSTEIFSRDIGMQFGLSKCNVLHMKAGKRSECQGEGHSLLNGAVFEYLKENQKYKYLGINEAGKIDHCEIRETVKKEYFRRVNALTNTQLNSRNLIKAINIYAVPVLLYTFGVINYKTSDLTKIDTKTRKLLNMNKAHTQKADTERLYLPVEKGGRGLTNIETLHNIQIIKFKQYLELKQDYIINAIVEHDTHKDKYSIIKDSCKNISDLGLENTQNYTDTDFKAACIKTKTDRWKAKPLHGQFYRLVIDKNNVDSEYSFRWLKKQSIPPSLESSIFAIQDQAIMTRQFERDILHKPIDGKCRLCAIKDETVQHIVSGCEKLAGTYYIKRHNNIVQYIFWALAKKHNFEVNSLWWKEHLTQPKVIENDTAKLMWEISVQTDVTVLHNRPDIIYIDKINNKTFLIDITVPSDYNIGPKEIEKLSKYHLLKTEITRLWNTRTETIPIVIGSTGVVGKSIHRYCEKLDANINLHIIQKQAAIHTVTIISKVLGDTVFVNNIEDTEPPLP

SEQ ID NO: 18199 - protein, 939 aa, Apotomis turbidana
MSVSNSAIKVPCPHCPGSSKLFVAPKGLNIHINRIHGNRNLPSQPPPSPDANASTAGQSFPDLAGLKRNITVLRHIPKGARHAAAGKLKSIIDCCLHTNDTKDWFTLLSFAFSALRVPEGTARKSLTEKVKENIETLNVHRQYGNPRRPYSIYRTIENKVHDGDLKGAVRLLLSDSTLAPDDDNTVRALEEKHPAPSRQLTYPPEPDISSPFLTVTTTDVAAALSSFYNGSASGLDGLRPQHLKELTSPSAGDNGSKLLESLTHLCNFLLRGMLNRQVCPFLYGASLCALKKKDGSVRPIAIGNTIRRLVAKLGCRAVRDEMADYLQPHQIGVGTPLGCEAAIHACRSYTFDHDDTDTVILKVDLKNAFNSVERDVMLKEIKEVIPPLYPFLHQCYSSPSNLLYNNKTITSQVGAQQGDPLGPLVFCLAIQNVIKTLQSPLNIWYLDDGTIGGRPNTVLNDIIKLIPALSALGLELNTSKCELFPCGPVAELSIPKFSSILPNLKIINRPSFTLLGAPIFSDGVSPIIQNKTSKLAASLPHLQQLSAHVSLVLLRNCFAMPRLTYTLRTSPTWKSYPDIIMFDRTLQGALEGILNINCNTTQWTQASLPIRHGGLGIRRAEDIGLIGFIASVHATQQLVTQILPFNGDNAAIAFKDEALELWSVRLPSADVPENTKCQRQWDEILCKTRRNELLNVAMGSDVARLKAAMSSESGAWLHALPSPHLGTLLDNDSLRIGAALRLGCQVCEPHRCVCGATVEANGHHGLSCQRAAGRFSRHHALNDIIRRAMVAANIPCTLEPQGLSRTDGKRPDGLTLVPWVRGRSLIWDATCVSTFAPSHLADTTRAAGGAAETAAKLKHVKYSNLEPVYEFVPVAVETGGPWCAEAKEFVAALARRLKDRGVDPRSGEYLAQRISLAIVRGNSASILGTFEPGTFRNCS

SEQ ID NO: 18200 - protein, 939 aa, Apotomis turbidana
MSVSNSAIKVPCPHCPGSSKLFVAPKGLNIHINRIHGNRNLPSQPPPSVDANASTAGQSFPDLAGLKRNITVLRHIPKGARHAAAGKLKSIIDCCLHTNDTKDWFTLLSFAFSALRVPEGTARKSLTEKVKENIETLNVHRQYGNPRRPYSIYRTIENKVHDGDLKGAVRLLLSDSTLAPDDDNTVRALEEKHPAPSRQLTYPPEPDISSPFLTVTTTDVAAALSSFYNGSASGLDGLRPQHLKELTSSSARDNGSKLLESLTHLCNFLLRGMLNRQVWPFLYGASLCALKKKDESVRPIAIGNTIRRLVAKLGCRAVRDEMADYLQPHQIGVGTPLGCEAAIHACRSYTFDHDDTDTVILKVDLKNAFNNVERDVMLKEIIEVIPPLYPFLHQCYSSPSNLLYNNKTITSQVGAQQGDPLGPLVFCLAIQNVIKTLQSPLNIWYLDDGTIGGRPNTVLNDIIKLIPALSALGLELNTSKCELFPCGPVAELSIPKFSSILPNLKIINRPSFTLLGAPMFSDGVSPVIQNKTSKLAASLPHLQQLSAHVSLVLLRNCFAMPRLTYTLRTSPTWKSYPDIIMFDRTLQGALEGILNINCNTTQWTQASLPIRHGGLGIRRAEDIRLIGFIASVHATQQLVTQILPFNGDNAAIAFKDEALELWSVRLPSADIPENTKCQRQWDEILCKTRRNELLNVAMGSDVARLKAAMTSESGAWLHALPSPHLGTLLDNDSLSIGATLRLGCQVCEPHRCVCGATVEANGHHGLSCQRAAGRFSRHHALNDIIRRAMVAANIPCTLEPQGLSRTDGKRPDGLTLVPWVRGRSLIWDATCVSTFAPSHLADTTRAAGGAAETAAKLKHVKYSNLEPVYEFVPVAVETGGPWCAEAKEFVASLARRLKDRGVDPRSGEYLAQRISLAIVRGNSASILGTFEPGTFRNCS

SEQ ID NO: 18201 - protein, 961 aa, Thyatira batis
MSQTCTDPGAQPLSDSSFIRCSQCSQPRFFKGQRGLNIHIGKVHNINSNSCDPVAIYPLSTNVSPSSSLISSKKPLSEFLSKLKITCPIVKRIPRGARLSVAQLLSQIIKNVVAENSQNAWEQLLTFSYNVLHVESNSSGSLTANIKKNCSNPNNSQNYLCNTNNKNQNIYKKVENKISEGDLKGAANLLFSNDVIAPDSPETLSALIEKHPPSPAPLQLPSSEPNNLSSNIKDVLSAVMSFRNGSAGGIDGITPQHLKDLLCSSTGDAGRTLLGDINNLVNLMLSGKVNPEVTHIIYGANLCALKKKDGGIRPIAVGTTFRRIVSKICCSHILPELTELFQPYQLGFGSRGGCEAAVHALRTYLDKDLGEVVLKVDVKNAFNSVDRTALLNEVKNKTPEIYNYLAQCYGLPSHLIYKENTIHSAVGCQQGDPLGPAVFSLAIHPIISSLCSKLNMWYLDDGTLAGDADIVLSDLNYLINSFDSIGLSLNFSKCELFISDSCSFEHRSKVIDKFNRLAPNIKILDSKSLRLLGAPVLNDSIKPFLDDQNSKFNDMSERLLKINAHMAYYIIRYCLFVPKFMYFLRCCPFWKFQSFLSILDDSIREILVKIFNCSFNDKAWCQASLPIRFGGLGIRKITSVSLPAFLSSCHSTSHLFNKIIHNSFGSNTQISFYNEAESTWTTACPNTCIPVNSKVQRLWDEPLCKQVLSQLINSCCNLAERARLLAVSERESGYWLQALPSANVGTLLTNTTFSLAIGLRLGSVTNEPHRCVCGESVDNLGHHGLSCRRSAGRLPRHAAINDVIRRAFATVNVPAILEPKGIVRDDGKRPDGMTLIPWCRGRPLVWDATCVDTLAPTHLQSTARAAGAAASTAEDSKRRKYAAIGDNCIFVPFGVETLGPWGPEAKILYRDLSTRLNEVSGDQRAGSYLGQRISLAIQRGNATSLLGTLPTGSDLSSIFYL

SEQ ID NO: 18202 - protein, 721 aa, Thyatira batis
MSFRNGSAGGLDGITPQHLKDLLCSSTGDAGRTLLGDINNLVNLMLSGKVNPEVTHIIYGANLCALKKKDGGIRPIAVGTTFRRIVSKICCSHILPELTELFQPYQLGFGSRGGCEAAVHALRTYLDKDLGEVVLKVDVKNAFNSVDRTALLNEVKNKTPEIYNYLAQCYGLPSHLIYKENTIHSAVGCQQGDPLGPAVFSLAIHPIISSLCSKLNMWYLDDGTLAGDADIVLSDLNYLINSFDSIGLSLNFSKCELFISDSCSFEHRSKVIDKFNRLAPNIKILDSKSLRLLGAPVLNDSIKPFLDDQNSKFNDMSERLLKINAHMAYYIIRYCLFVPKFMYFLRCCPFWKFQSFLSILDDSIREILVKIFNCSFNDKAWCQASLPIRFGGLGIRKITSVSLPAFLSSCHSTSHLFNKIIHNSFGSNTQISFYNEAESTWTTACPNTCIPVNSKVQRLWDEPLCKQVLSQLINSCCNLAERARLLAVSERESGYWLQALPSANVGTLLTNTTFSLAIGLRLGSVTNEPHRCVCGESVDNLGHHGLSCRRSAGRLPRHAAINDVIRRAFATVNVPAILEPKGIVRDDGKRPDGMTLIPWCRGRPLVWDATCVDTLAPTHLQSTARAAGAAASTAEDSKRRKYAAIGDNCIFVPFGVETLGPWGPEAKILYRDLSTRLNEVSGDQRAGSYLGQRISLAIQRGNATSLLGTLPTGSDLSSIFY

SEQ ID NO: 18203 - protein, 961 aa, Thyatira batis
MSQTCTDPGAQPLSDSSFIRCSQCSQPRFFKGQRGLNIHIGKVHNINSNSCDPVAIYPLSTNVSPSSSPISSKKPLSEFLSKLKITCPIVKRIPRGARLSVAQLLSQIIKNVVAENSQNAWEQLLTFSYNVLHVESNSSGSLTANIKKNCSNPNNSQNYLCNTNNKNQNIYKKVENKISEGDLKGAANLLFSNDVIAPDSPETLSALIEKHPPSPAPLQLPSSEPNNLSSNIKDVLSAVMSFRNGSAGGLDGITPQHLKDLLCSSTGDAGRTLLGDINNLVNLMLSGKVNPEVTHIIYGANLCALKKKDGGIRPIAVGTTFRRIVSKICCSHILPELTELFQPYQLGFGSRGGCEAAVHALRTYLDKDLGEVVLKVDVKNAFNSVDRSALLNEVKNKTPEIYNYLAQCYGIPSHLIYKENTIHSAVGCQQGDPLGPAVFSLAIHPIISSLSSKLNMWYLDDGTLAGDADIVLSDLNYLINSFDSIGLSLNFSKCELFISDSCSFEHRSKVIDKFNRLAPNIKILDSKSLRLLGAPVLNDSIKPFLDDQNSKFNDMSERLLKINAHMAYYIIRYCLFVPKFMYFLRCCPFWKFQSFLSILDDSIREILVKILNCSFNDKAWCQASLPIRFGGLGIRKISSVSLPAFLSSCHSTSHLFNKIIHNSFGSNTQISFYNEAESTWTTACPNTCIPVNSKVQRLWDEPLCKQVHSQLINSCCNLAERARLLAVSERESGYWLQALPSANVGTLLTNTTFSLAIGLRLGSVTNEPHRCVCGVSVDNLGHHGLSCRRSAGRLPRHAAINDVIRRAFATVNVPAILEPKGIVRDDGKRPDGMTLIPWCRGRPLVWDATCVDTLAPTHLQSTARAAGAAASTAEDSKRRKYAAIGDNCIFVPFGVETLGPWGPEAKILYRDLSTRLNEVSGDQRAGSYLGQRISLAIQRGNATSLLGTLPTGSDLSSIFYL

SEQ ID NO: 18204 - protein, 961 aa, Thyatira batis
MSQTCTDPGAQPLSDSSFIRCSQCSQPRFFKGQRGLNIHIGKVHNINSNSCDPVAIYPLSTNVSPSSSLISSKKPLSEFLSKLKITCPIVKRIPRGARLSVAQLLSQIIKNVVAENSQNAWEQLLTFSYNVLHVESNSSGSLTANIKKNCSNPNNSQNYLCNTNNKNQNIYKKVENKISEGDLKGAANLLFSNDVIAPDSPETLSALIEKHPPSPAPLQLPSSEPNNLSSNIKDVLSAVMSFRNGSAGGLDGITPQHLKDLLCSSTGDAGRTLLGDINNLVNLMLSGKVNPEVTHIIYGANLCALKKKDGGIRPIAVGTTFRRIVSKICCSHILPELTELFQPYQLGFGSRGGCEAAVHALRTYLDKDLGEVVLKVDVKNAFNSVDRTALLNEVKNKTPEIYNYLAQCYGLPSHLIYKENTIHSAIGCQQGDPLGPAVFSLAIHPIISSLCSKLNMWYLDDGTLAGDADIVLSDLNYLINSFDSIGLSLNFSKCELFISDSCSFEHRSKVIDKFNRLAPNIKILDSKSLRLLGAPVLNDSIKPFLDDQNSKFNDMSERLLKINAHMAYYIIRYCLFVPKFMYFLRCCPFWKFQSFLSILDDSIREILVKIFNCSFNDKAWCQASLPIRFGGLGIRKITSVSLPAFLSSCHSTSHLFNKIIHNSFGSNTQISFYNEAESTWTTACPNTCIPVNSKVQRLWDEPLCKQVHSQLINSCCNLAERARLLAVSERESGYWLQALPSANVGTLLTNTTFSLAIGLRLGSVTNEPHRCVCGESVDNLGHHGLSCRRSAGRLPRHAAINDVIRRAFATVNVPAILEPKGIVRDDGKRPDGMTLIPWCRGRPLVWDATCVDTLAPTHLQSTARAAGAAASTAEDSKRRKYAAIGDNCIFVPFGVETLGPWGPEAKILYRDLSTRLNEVSGDQRAGSYLGQRISLAIQRGNATSLLGTLPTGSDLSSIFYL

SEQ ID NO: 18205 - protein, 735 aa, Habrosyne pyritoides
MKISEKDVLSAIMSFKNGSAGGLDGITPQHFKDMICNATGDTGKALLNNMAALINIMLAGSVNPEISHILYGANLCALKKKDGGIRPIAVGTTLRRIASKICCKYILPGLSKKFQPTQLGFGSRGGCEAAVHALRTNILNNGSEVVLKVDVQNAFNSVDRTAMLSEIKKYTPEIFNYLYQCYSTPSTLVYKNNLLHSAVGCQQGDPLGPAIFSLAIHPIISSLKSKLNIWYLDDGTLGGDVASVLRDVDTLISHFNTIGLQLNFSKCELFISDTIPNNTTHSIVNDFNMICPNIKILGKESLRLLGAPILDESIPPFLNEQTLKFNEISDRLLKINSHIAFTIIRFCVFVPKFTYVIRCSPLWKFDNLLTPIDNFIRKTMIQILNCPLNDRTWCQASLPIRFGGLGIRKISSVSLPAFLSSTYSISDLFSKIISPSLKDAEISCSVEAKNAWITACSGESIPLYPKVQRQWDEPLCKAVQQDLLNTSSNLSERARLLAVSERESGYWLQALPSTNIGTLLDNTSFSLAICLRLGTYTNEPHRCLCGNDVDRLGYHGLSCRRSAGRLSRHAAINDVIRRAFATVHVPAILEPNGIARDDGKRPDGMTLLPWSRGKPLVWDATCVDTVAQSHLESTSKAAGAAATAAESSKRRKYATIGDGYIFAPFGVETLGPWGPEARKLFKDLSTRLIESSGDQRAGSYFGQRISLAIQRGNVASLLGTLPIDSSNNLNSVFYL

SEQ ID NO: 18206 - protein, 957 aa, Thyatira batis
MSQTTDTGCQYNSDASLVQCPHCSQPRFFKGERGLKIHIGKSHKCIIRQTSGIPSSLPSVNSNHAVTNTPHFWQTLSDLKNNQPIIKRIPKGARIAVAQSLSKVIKKVVNENSKCAWEMFFLFVYNTLHVNSRNGSLTKNIKQNCLNGPSVPIYEYVQKNRTYNVFKKIENKVSDGDIKGAAHLLFTNDVVAPDSPETLLALLEKHPTSSATLQPSPPLDTTQPLQTTSKDIYHCIMSFNNGSAGGLDGLTPQHLKDLVSRCTGDAGRALLSDLTDLTNLLLAGQVHEDFKDILYGANLCALKKKDGGIRPIAVGCTLRRITSKICCKYILPGLSQKFQPTQLGFGSRGGCEAAVHALRTYLSSKKDEVVLKVDVRNAFNSVDRLTMLNEIKTHTPEIYNYVEQCYGTPSKLVYKNHLILSAVGCQQGDPLGPAIFSLAIHPVISSLNSKFNAWYLDDGTLGGEASTVLGDLKTIIDSFEKIGLDINFSKCELYVPDTLSDAEKTSIGDSFNCLSPNIKLLQKQSLRLLGAPIFDDSIPPYLEEQSSKFYNICDRLQKINSHMAFQIIRFCLFVPKFTYVLRCCPVWKFFNQMEYLDNAIQKVLVKILNCPINDRAWSQASLPIRFGGLGIRKISSISVPAFLSSTYSTFDLFKKIIHPSLGDIEIIYSSEARDVWFASCPSESIPQNPKLQKQWDEPLCKRVHSQLLSRSDGLAERARLLAVSERESGYWLHAIPSTSIGTLLDNVSFSVAVSLRLGSKINEPHRCPCGNDVDQFGHHGLSCRRSAGRLSRHAAINDVIRRAFASVNVPAILEPNGIARDDGKRPDGMTLVPWSRGKPLVWDATCADTLAQSHLQSTSGVAGAAATTAEALKRRKYMVLNENYIFLPFGVETLGPWGPDAHSLYKELSTRLIERSGDQRAGYYLAQRISLAIQRGNVASILGTLPQGSDLDNIFYL

SEQ ID NO: 18207 - protein, 965 aa, Habrosyne pyritoides
MPQSSDGLGPDVGCQCTVSTLVRCPQCLEPRYFKGQRGLNIHIGKSHKNFNHSSLSPTFTNHENSNQINNQNPTQHVSFWQSLSELKCNIPLIKRIPRGARICVAQCLNQSIRKVVDENSKHAWEQLLTFSYHVLHVDSKCTGSLTKNIKNNCFRKQTHFSTAKKSTKQNNIIKKIENKVNDGDIKGAAHLLFSNDVIAPDSPETLSALNSKHPPSPATLHLPPLDQSDHMKISEKDVLSAIMSFKNGSAGGLDGITPQHFKDMICNATGDTGKALLNNMAALINIMLAGSVNPEISHILYGANLCALKKKDGGIRPIAVGTTLRRIASKICCKYILPGLSKKFQPTQLGFGSRGGCEAAVHALRTNILNNGSEVVLKVDVQNAFNSVDRTAMLSEIKKYTPEIFNYLYQCYSTPSTLVYKNNLLHSAVGCQQGDPLGPAIFSLAIHPIISSLKSKLNIWYLDDGTLGGDVASVLRDVDTLISHFNTIGLQLNFSKCELFISDTIPNNTTHSIVNDFNMICPNIKILGKESLRLLGAPILDESIPPFLNEQTLKFNEITDRLLKINSHIAFTIIRFCVFVPKFTYVIRCSPLWKFDNLLTPIDNFIQKTMIQILNCPLNDRTWCQATLPIRFGGLGIRKISSVSLPAFLSSTYSTSDLFSKIISPSLKDAEISCSVEAKNAWITACSGESIPLYPKDQRQWDEPLCKAVQQDLLNTSSNLSERARLLAVSERESGYWLQALPSTNIGTLLDNTSFSLAICLRLGTYTNEPHRCLCGNDVDRLGYHGLSCRRSAGRLSRHAAINDVIRRAFATVHVPAILEPNGIARDDGKRPDGMTLLPWSRGKPLVWDATCVDTVAQSHLESTSKAAGAAATAAESSKRRKYATIGDGYIFAPFGVETLGPWGPEARKLFKDLSTRLIESSGDQRAGSYFGQRISLAIQRGNVASLLGTLPIDSSNNLNSVFYL

SEQ ID NO: 18208 - protein, 965 aa, Habrosyne pyritoides
MPQSSDGLGPDVGCQCTVSILVRCPQCLEPRYFKGQRGLNIHIGKSHKNFNHSSLSPTFTNHENSNQINNQNPTQHVSFWQSLSELKCNIPLIKRIPRGARICVAQCLNQSIRKVVDENSKHAWEQLLTFSYHVLHVDSKCTGSLTKNIKNNCFRKQTHFSTAKKSTKQNNIIKKIENKVNDGDIKGAAHLLFSNDVIAPDSPETLSALNSKHPPSPATLHLPPLDQSDHMKISEKDVLSAIMSFKNGSAGGLDGITPQHFKDMICNATGDTGKALLNNMAALINIMLAGSVNPEIIHILYGANLCALKKKDGGIRPIAVGTTLRRIASKICCKYILPGLSKKFQPTQLGFGSRGGCEAAVHALRTNILNNGSEVVLKVDVQNAFNSVDRTAMLSEIKKYTPEIFNYLYQCYSTPSTLVYKNNLLHSAVGCQQGDPLGPAIFSLAIHPIISSLKSKLNIWYLDDGTLGGDVASVLRDVDTLISHFNTIGLQLNFSKCELFISDTIPNNTTHSIVNDFNMICPNIKILGKESLRLLGAPILDESIPPFLNEQTLKFNEITDRLLKINSHIAFTIICFCVFVPKFTYVIRCSPLWKFDNLLTPIDNFIQKTMIQILNCPLNDRTWCQASLPIRFGGLGIRKISSVSLPAFLSSTYSISDLFSKVISPSLKDAEISCSVEAKNAWITACSGESIPLYPKVQRQWDEPLCKAVQQDLLNTSSNLSERARLLAVSERESGYWLQALPSTNIGTLLDNTSFSLAICLRLGTYTNEPHRCLCGNDVDRLGYHGLSCRRSAGRLSRHAAINDVIRRAFATVHVPAILEPNGIARDDGKRPDGMTLLPWSRGKPLVWDATCVDTVAQSHLESTSKAAGAAATAAESSKRRKYATIGDGYIFAPFGVETLGPWGPEARKLFKDLSTRLIESSGDQRAGSYFGQTISLAIQRGNVASLLGTLPIDSSNNLNSVFYL

SEQ ID NO: 18209 - protein, 965 aa, Habrosyne pyritoides
MPQSSDGLGPDVGCQCTVSTLVRCPQCLEPRYFKGQRGLNIHIGKSHKNFNHSSLSPTFTNHENSNQINNQNPTQHVSFWQSLSELKCNIPLIKRIPRGARICVAQCLNQSIRKVVDENSKHAWEQLLTFSYHVLHVDSKCTGSLTKNIKNNCFRKQTHFSTAKKSTKQNNIIKKIENKVNDGDIKGAAHLLFSNDVIAPDSPETLSALNSKHPPSPATLHLPPLDQSDHMKISEKDVLSAIMSFKNGSAGGLDGITPQHFKDMICNATGDTGKALLNNMAALINIMLAGSVNPEISHILYGANLYALKKKDGGIRPIAVGTTLRRIASKICCKYILPGLSKKFQPTQLGFGSRGGCEAAVHALRTNILNNGSEVVLKVDVQNAFNSVDRTAMLSEIKKYTPEIFNYLYQCYNTPSTLVYKNNLLHSAVGCQQGDPLGPAIFSLAIHPIISSLKSKLNIWYLDDGTLGGDVASVLRDVDTLISHFNTIGLQLNFSKCELFISDTIPNNTTHSIVNDFNMICPNIKILGKESLRLLGAPILDESIPPFLNEQTLKFNEITDRLLKINSHIAFTIIRFCVFVPKFTYVIRCSPLWKFDNLLTPIDNFIQKTMIQILNCPLNDRTWCQASLPIRFGGLGIRKISSVSLPAFLSSTYSISDLFSKIISPSLKDAEISCSVEAKNAWITACSGESIPLYPKVQRQWDEPLCKAVQQDLLNTSSNLSERARLLAVSERESGYWLQALPSTNIGTLLDNTSFSLAICLRLGTYTNEPHRCLCGNDVDRLGYHGLSCRRSAGRLSRHAAINDVIRRAFATVHVPAILEPNGIARDDGKRPDGMTLLPWSRGKPLVWDATCVDTVAQSHLESTSKAAGAAATAAESSKRRKYATIGDGYIFAPFGVETLGPWGPEARKLFKDLSTRLIESSGDQRAGSYFGQRISLAIQRGNVASLLGTLPIDSSNNLNSVFYL

SEQ ID NO: 18210 - protein, 952 aa, Plutella xylostella
MPDSRAVCPHCPGSSRQFVAPRGLNVHISRVHKDVLSHRPQATAQNEIGDDPPQSPQSALGNLSQLRRNVRVLKHVPKGARSLAASKLSQLIERCVQSNDTGDWHALLSFSYTCLRVPCPGDKSRSLTSKVKANILASDLGDSLSQNVAPSNVVVGHRALYRAVETKVHDGDLSGAVRILLSDCSIAENNEETLEALRLKHPAPGRPLNFPPEPASSDEYLVVEVGDVARAIGSFNNGSAAGLDGIRPELLKELTSSGAGDNGATLLQSICNLSNFLLRGLVNREVCPFLYGASLCALKKKDGGIRPIAVGSVLRRLVAKLGCAAVRDVMSQRLQPHQLGFGVPLGCEAAIHATRSFAFSRDGSDDVIVKVDLRNAFNTVERDIILARVRDHTPALYPFLYQCYSKPSNLFYGDSLVESRVGVQQGDPLGPLIFSLATQDVVAHLRSPLNVWYLDDGTLGGSPEVVLADIETLKQGLSNLGLCLNTQKCELFPCSGQLPSDTRMRVEAAVPGVNLLVKSDFTLLGAPIFAEGVPGVILSKLRNLTDTKPHLRQLSAHVALTILRSCLSIPRLTYTLRTAPVWLCGEESLRYDNMLRELLESVLNVGMSDLQWSQAALPIRHGGLGIRRLQDIELPAFLASASGVLELVTRILQVNGDDFSIPFAEEALSLWRARCPGCDDPDFPERQRAWDEEICRVSLDGLLGHSSGAERARLLAVSRPESGLWLHALPSPHLGTLLDDNSLRVAVALRLGCDVCQPHRCVCGANVDVQGRHGLHCVRSAGRISRHHAINDIVRRALISADIPAVLEPPGLSRSDGRRPDGLTLIPWEKGRCLLWDATCVCTFAPSHVGHTAGTVGAAAEAAARQKCVKYGQLIAGGYIFVPLAIETTGVWGEQGRQFVREIGRRLRSRGFDYRSGAYLAQRISLAVQRGNAASVMGTFGSGASWVVYLAK

SEQ ID NO: 18211 - protein, 927 aa, Plutella xylostella
MSTLVGYIGARSPTGLRRLRKMGSTMARHKVHNQRWAIFLNYARNVRVLKHVPKGARSLAAGRLSQLIERCVQSNDTGDWYALLSFSYTCLRVPCPGDKSRSLTSKVKANILASDLGDSLSQNVAPSNVVVGRRALYRAVETKVHDGDLSGAVRILLSDCSIAENNEETLEALRLKHPAPGRPLNFPPEPASSDEYLVVEVGDVARAIGSFNNGSAAGLDGIRPELLKELTSSGAGDNGATLLQSICNLSNFLLRGLVNREVCPFLYGASLCALKKKDGGIRPIAVGSVLRRLVAKLGCAAVRDVMSQRLQPHQLGFGVPLGCEAAIHATRSFAFSRDGSDDVIIKVDLRNAFNTVERDIILARVRDHTPALYPFLHQCYSKPSNLFYGDSLVESRVGVQQGDPLGPLIFSLATQDVVAHLRSPLNVWYLDDGTLGGSPEVVLADIETLKQGLSNLGLCLNTQKCELFPCSGQLPSDTRMRVEAAVPGVNLLVKSDFTLLGAPIFAEGVPGVILSKLRNLTDTKPHLKRLSAHVALTILRSCLSIPRLTYTLRTAPVWLCGEESLRYDNMLRELLESVLNVGMSDLQWSQAALPIRHGGLGIRRLQDIELPAFLASASGVLELVTRILQVNGDDFSIPFAEEALSLWRARCPGCDDPDFSERQRAWDEEICRVSLDGLLGHSSGAERARLLAVSRPESGLWLHALPSPHLGTLLDDNSLRVAVALRLGCDVCQPHRCVCGANVDVQGRHGLHCVRSAGRISRHHAINDIVRRALISADIPAVLEPPGLSRSDGRRPDGLTLIPWEKGRCLLWDATCVCTFAPSHVGHTAGTVGAAAEAAARQKCVKYGQLIAGGYIFVPLAIETTGVWGEQGRQFVREIGRRLRSRGFDYRSGAYLAQRISLAVQRGNAASVMGTFGSGASWGGLFS

SEQ ID NO: 18212 - protein, 948 aa, Plutella xylostella
MTESRAVCPHCPGSSRQFVVPRGLNVHISRVHRGALPHRSQATAQDGTDDGPPQPALGNLSQLRRNVRVLKHVPKGARSLAAGRLSQLIESCLQSNDTGDWYALLSFPYTCLRVPCPGDKSRSLTSKVKANILAGHLGDSLLRNGAPLDGAVGHRALYRAVETKVHDGDLSGAVRILLSDCSVAEDNEETLEALRLKHPAPGRHLEFPPEPGSSDEYLVVEVGEVSRAIGSFNNGSAAGLDGIRPELLKQLTSSGAGDNGATLLQSICNLSNFMLRGLVNREVCPFLYGASLCALKKKDGGIRPIAVGSVLRRLVAKLGCAAVRDVMSQRLQPHQLGFGVPLGCEAAIHATRSFAFSGDGSDDVIIKVDLRNAFNTVERDIILARVRDHIPALYPFLHQCYSKPSNLFYGDSLVESRVGVQQGDPLGPLIFSLATQDVVAHLRSPLNVWYLDDGTLGGSPEVVLADIETLKQGLSNLGLCLNTQKCELFPCSGQLPSDTRMRVEAAVPGVNLLDRSDFTLLGAPIFAEGVPGVILSKVRNLTDTKPHLKQLSAHVALTILRSCLSMPRLTYTLRTAPVWMCGEESLRYDNMLRELLECVLNVGMSDLQWSQAALPIRHGGLGIRRLQDIELPAFLASASGVLELVTRILQVNGDDFSIPFAEEALTLWRARCPGCDDPDFPERQRAWDEEICRVSLDGLLGHSSGAERARLLAVSRPESGLWLHALPSPHLGTLLDDNSLRVAVALRLGCDVCQPHRCVCGANVDVQGRHGLHCVRSAGRISRHHSINDIVRRALISADIPAVLEPPGLSRSDGRRPDGLTLIPWEKGRCLLWDATCVCTFAPSHVGSTAGTVGAAAEAAARQKCVKYGQLIAGGYIFVPLAIETTGVWGEQGRQFIREIGRRLRSRGFDCRSGAYLAQRISLAVQRGNAASVMGTFGSGASWGGLFN

SEQ ID NO: 18213 - protein, 951 aa, Plutella xylostella
MPDSRAVCPHCPGSSRQFVAPRGLNVHISRVHKDVLSHRPQATAQNEIGDDPPQSPQSALGNLSQLRRNVRVLKHVPKGARSLAASKLSQLIERCVQSNDTGDWYALLSFSYTCLRVPCPGDKSRSLTSKVKANILASDLGDSLSQNVAPSNVVVGHRALYRAVETKVHDGDLSGAVRILLSDCSIAENNEETLEALRLKHPAPGRPLNFPPEPASSDEYLVVEVGDVARAIGSFNNGSAAGLDGIRPELLKELTSSGAGDNGATLLQSICNLSNFLLRGLVNREVCPFLYGASLCALKKKDGGIRPIAVGSVLRRLVAKLGCAAVRDVMSQRLQPHQLGFGVPLGCEAAIHATRSFAFSRDGSDDVIIKVDLRNAFNTVERDIILARVRDHTPALYPFLHQCYSKPSNLFYGDSLVESRVGVQQGDPLGPLIFSLATQDVVAHLRSPLNVWYLDDGTLGGSPEVVLADIETLKQGLSNLGLCLNTQKCELFPCSGQLPSDTRMRVEAAVPGVNLLVKSDFTLLGAPIFAEGVPGVIRSKLRNLTDTKPHLKQLSAHVALTILRSCLSIPRLTYTLRTAPVWLCGEESLRYDNMLRELLESVLNVGMSDLQWSQAALPIRHGGLGIRRLQDIELPAFLASASGVLELVTRILQVNGDDFSIPFAEEALSLWRARCPGCDDPDFPERQRAWDEEICRVSLDGLLGHSSGAERARLLAVSRPESGLWLHALPSPHLGTLLDDNSLRVAVALRLGCDVCQPHRCVCGANVDVQGRHGLHCVRSAGRISRHHAINDIVRRALISADIPAVLEPPGLSRSDGRRPDGLTLIPWEKGRCLLWDATCVCTFAPSHVGHTAGTVGAAAEAAARQKCVKYGQLIAGGYIFVPLAIETTGVWGERGRQFVREIGRRLRSRGFDYRSGAYLAQRISLAVQRGNAASVMGTFGSGASWGGLFS

SEQ ID NO: 18214 - protein, 948 aa, Plutella xylostella
MTESRAVCPHCPGSSRQFVVPRGLNVHISRVHRGALPHRSQATAQDGTDDGPPQPALGNLSQLRRNVRVLKHVPKGARSLAAGRLSQLIESCLQSNDTGDWYALLSFPYTCLRVPCPGDKSRSLTSKVKANILAGDLGDSLLRNGAPLDGAVGHRALYRAVETKVHDGDLSGAVRILLSDCSVAEDNEETLEALRLKHPAPGRHLEFPPEPGSSDEYLVVEVGEVSRAIGSFNNGSAAGLDGIRPELLKELTSSGAGDNGATLLQSICNLSNFMLRGLVNREVCPFLYGASLCALKKKDGGIRPIAVGSVLRRLVAKLGCAAVRDVMSQRLQPHQLGFGVPLGCEAAIHATRSFAFSRDGSDDVIIKVDLRNAFNTVERDIILARVRDHIPALYPFLHQCYSKPSNLFYGDSLVESRVGVQQGDPLGPLIFSLATQDVVAHLRSPLNVWYLDDGTLGGSPEVVLADIETLKQGLSNLGLCLNTQKCELFPCSGQLPSDTRMRVEAAVPGVNLLDRSDFTLLGAPIFAEGVPGVILSKVRNLTDTKPHLKQLSAHVALTILRSCLSMPRLTYTLRTAPVWMCGEESLRYDNMLRELLECVLNVGMSDLQWSQAALPIRHGGLGIRRLQDIELPAFLASASGVLELVTRILQVNGDNFSIPFAEEALTLWRARCPGCDDPDFPERQRAWDEEICRVSLDGLLGHSSGAERARLLAVSRPESGLWLHALPSPHLGTLLDDNSLRVAVALRLGCDVCQPHRCVCGANVDVQGRHGLHCVRSAGRISRHHSINDIVRRALISADIPAVLEPPGLSRSDGRRPDGLTLIPWEKGRCLLWDATCVCTFAPSHVGSTAGTVGAAAEAAARQKCVKYGQLIAGGYIFVPLAIETTGVWGEQGRQFIREIGRRLRSRGFDCRSGAYLAQRISLAVQRGNAASVMGTFGSGASWGGLFN

SEQ ID NO: 18215 - protein, 951 aa, Plutella xylostella
MTESRAVCPHCPGSSRQFVVPRGLNVHISRVHRGALPHRSQATAQDGIDDGPPQSPQSALGNLSQLRRNVRVLKHVPKGARSLAASKLSQLIERCVQSNDTGDWYALLSFSYTCLRVPCPGDKSRSLTSKVKANILASDLGDSLSQNVAPSNVVVGRRALYRAVETKVHDGDLSGAVRILLSDCSIAENNEETLEALRLKHPAPGRPLNFPPEPASSDEYLVVEVGDVARAIGSFNNGSAAGLDGIRPELLKELTSSGAGDNGATLLQSICNLSNFLLRGLVNREVCPFLYGASLCALKKKDGGIRPIAVGSVLRRLVAKLGCAAVRDVMSQRLQPHQLGFGVPLGCEAAIHATRSFAFSRDGSDDVIIKVDLRNAFNTVERDIILARVRDHTPALYPFLHQCYSKPSNLFYGDSLVESRVGVQQGDPLGPLIFSLATQDVVAHLRSPLNVWYLDDGTLGGSPEVVLADIETLKQGLSNLGLCLNTQKCELFPCSGQLPSDTRMRVEAAVPGVNLLVKSDFTLLGAPIFAEGVPGVILSKLRNLTDTKPHLKQLSAHVALTILRSCLSIPRLTYTLRTAPVWLCGEESLRYDNMLRELLESVLNVGMSDLQWSQAALPIRHGGLGIRRLQDIELPAFLASASGVLELVTRILQVNGDDFSIPFAEEALSLWRARCPGCDDPDFPERQRAWDEEICRVSLDGLLGHSSGAERARLLAVSRPESGLWLHALPSPHLGTLLDDNSLRVAVALRLGCDVCQPHRCVCGANVDVQGRHGLHCVRSAGRISRHHAINDIVRRALISADIPAVLEPPGLSRSDGRRPDGLTLIPWEKGRCLLWDATCVCTFAPSHVGHTAGTVGAAAEAAARQKCVKYGQLIAGGYIFVPLAIETTGVWGEQGRQFVREIGRRLRSRGFDYRSGAYLAQRISLAVQRGNAASVMGTFGSGASWGGLFS

SEQ ID NO: 18216 - protein, 951 aa, Plutella xylostella
MPDSRAVCPHCPGSSRQFVAPRGLNVHISRVHKDVLSNRPQATAQNEIGDDPPQSPQSALGNLSQLRRNVRVLKHVPKGARSLAASKLSQLIERCVQSNDTGDWYALLSFSYTCLRVPCPGDKSRSLTSKVKANILASDLGDSLSQNVAPSNVVVGHRALYRAVETKVHDGDLSGAVRILLSDCSIAENNEETLEALRLKHPAPGRPLNFPPEPASSDEYLVVEVGDVARAIGSFNNGSAAGLDGIRPELLKELTSSGAGDNGATLLQSICNLSNFLLRGLVNREVCPFLYGAFLCALKKKDGGIRPIAVGSVLRRLVAKLGCAAVRDVMSQRLQPHQLGFGVPLGCEAAIHATRSFAFSRDGSDDVIIKVDLRNAFNTVERDIILARVRDHTPALYPFLHQCYSKPSNLFYGDSLVESRVGVQQGDPLGPLIFSLATQDVVAHLRSPLNVWYLDDGTLGGSPEVVLADIETLKQGLSNLGLCLNTQKCELFPCSGQLPSDTRMRVEAAVPGVNLLVKSDFTLLGAPIFAEGVPGVILSKLRNLTDTKLHLKQLSAHVALTILRSCLSIPRLTYTLRTAPVWLCGEESLRYDNMLRELLESVLNVGMSDLQWSQAALPIRHGGLGIRRLQDIELPAFLASASGVLELVTRILQVNGDDFSIPFAKEALSLWRARCPGCDDPDFPERQRAWDEEICRVSLDGLLGHSSGAECARLLAVSRPESGLWLHALPSPHLGTLLDDNSLRVAVALRLGCDVCQPHRCVCGANVDVQGRHGLHCVRSAGRISRHHAINDIVRRALISADIPAVLEPPGLSRSDGRRPDGLTLIPWEKGRCLLWDATCVCTFAPSHVGHTAGTVGAAAEAAARQKCVKYGQLIAGGYIFVPLAIETTGVWGEQGRQFVREIGRRLRSRGFDYRSGAYLAQRISLAVQRGNAASVMGTFGSGASWGGLFS

SEQ ID NO: 18217 - protein, 927 aa, Plutella xylostella
MFTLAGYIRTCSPTGLRRLRKMRSAMTRHKVHNQRWAIFLALRRNVRVLKHVPKGARSLAASKLSQLIERCVQSNDTGDWYALLSFSYTCLRVPCPGDKSRSLTSKVKANILASDLGDSLSQNVAPSNVVVGHRALYRAVETKVHDGDLSGAVRILLSDCSIAENNEETLEALRLKHPAPGRPLNFPPEPASSDEYLVVEVGDVARAIGSFNNGSAAGLDGIRPELLKELTSSGAGDNGATLLQSICNLSNFLLRGLVNREVCPFLYGASLCALKKKDGGIRPIAVGSVLRRLVAKLGCAAVRDVMSQRLQPHQLGFGVPLGCEAAIHATRSFAFSRDGSDDVIIKVDLRNAFNTVERDIILARVRDHTPALYPFLHQCYSKPSNLFYGDSLVESRVGVQQGDPLGPLIFSLATQDVVAHLRSPLNVWYLDDGTLGGSPEVVLADIETLKQGLSNLGLCLNTQKCELFPCSGQLPSDTRMRVEAAVPGVNLLVKSDFTLLGAPIFAEGVPGVILSKLRNLTDTKPHLKQLSAHVALTILRSCLSIPRLTYTLRTAPVWLCGEESLRYDNMLRELLESVLNVGMSDLQWSQAALPIRHGGLGIRRLQDIELPAFLASASGVLELVTRILQVNGDDFSIPFAEEALSLWRARCPGCDDPDFPERQRAWDEEICRVSLDGLLGHSSGAERARLLAVSRPEFGLWLHALPSPHLGTLLDNNSLRVAVALRLGCDVCQPHRCVCGANVDVQGRHGLHCVRSAGRISRHHAINDIVRRALISADIPAVLEPPGLSRSDGRRPDGLTLIPWEKGRCLLWDATCVCTFAPSHVGHTAGTVGAAAEAAARQKCVKYGQLIAGGYIFVPLAIETTGVWGEQGRQFVREIGRRLRSRGFDYRSGAYLAQRISLAVQRGNAASVMGTFGSGASWGGLFS

SEQ ID NO: 18218 - protein, 951 aa, Plutella xylostella
MPDSRAVCPHCPGSSRQFVAPRGLNVHISRVHKDVLSHRHQATAQNEIGDDPPQSPQSALGNLSQLRRNVRVLKHVPKGARSLAASKLSQLIERCVQSNDTGDWYALLSFSYTCLRVPCPGDKSRSLTSKVKANILASDLGDSLSQNVAPSNVVVGHRALYRAVETKVHDGDLSGAVRILLSDCSIAENNEETLEALRLKHPAPGRPLNFPPEPASSDEYLVVEVGDVARAIGSFNNGSAAGLDGIRPELLKELTSSGAGDNGATLLQSICNLSNFLLRGLVNREVCPFLYGASLCALKKKDGGIRPIAVGSVLRRLVAKLGCAAVRDVMSQRLQPHQLGFGVPLGCEAAIHATRSFAFSRDGSDDVIIKVDLRNAFNTVERDIILARVRDHTPALYPFLHQCYSKPSNLFYGDSLVESRVGVQQGDPLGPLIFSLATQDVVAHLRSPLNVWYLDDGTLGGSPEVVLADIETLKQGLSNLGLCLNTQKCELFPCSGQLPSDTRMRVEAAVPGVNLLVKSDFTLLGAPIFAEGVPGVILSKLRNLTDTKPHLKQLSAHVALTILRSCLSIPRLTYTLRTAPVWLCGEESLRYDNMLRELLESVLNVGMSDLQWSQAALPIRHGGLGIRRLQDIELPAFLASASGVLELVTRILQVNGDDFSIPFAEEALSLWRARCPGCDDPDFPERQRAWDEEICRVSLDGLLGHSSGAERARLLAVSRPESGLWLHALPSPHLGTLLDDNSLRVAVALRLGCDVCQPHRCVCGANVDVQGRHGLHCVRSAGRISRHHAINEIVRRALISADIPAVLEPPGLSRSDGRRPDGLTLIPWEKGRCLLWDATCVCTFAPSHVGHTAGTVGAAAEAAARQKCVKYGQLIAGGYIFVPLAIETTGVWGEQGRQFVREIGRRLRSRGFDYRSGAYLAQRISLAVQRGNAASVMGTFGSGASWGGLFS

SEQ ID NO: 18219 - protein, 948 aa, Plutella xylostella
MTESRAVCPHCPGSSRQFVVPRGLNVHISRVHRGALPHRSQATAQDGTDDGPPQPALGNLSQLRRNVRVLKHVPKGARSLAAGRLSQLIESCLQSNDTGDWYALLSFPYTCLRVPCPGDKSRSLTSKVKANILAGDLGDSLLRNGAPLDGAVGHRALYRAVETKVHDGDLSGAVRILLSDCSVAEDNEETLEALRLKHPAPGRHLEFPPEPGSSDEYLVVEVGEVSRAIGSFNNCSAAGLDGIRPELLKELTSSGAGDNGATLLQSICNLSNFMLRGLVNREVCPFLYGASLCALKKKDGGIRPIAVGSVLRRLVAKLGCAAVRDVMSQRLQPHQLGFGVPLGCEAAIHATRSFAFSGDGSDDVIIKVDLRNAFNTVERDIILARVRDHIPALYPFLHQCYSKPSNLFYGDSLVESRVGVQQGDPLGPLIFSLATQDVVAHLRSPLNVWYLDDGTLGGSPEVVLADIETLKQGLSNLGLCLNTQKCELFPCSGQLPSDTRMRVEAAVPGVNLLDRSDFTLLGAPIFAEGVPGVILSKVRNLTDTKPHLKQLSAHVALTILRSCLSMPRLTYTLRTAPVWMCGEESLRYDNMLRELLECVLNVGMSDLQWSQAALPIRHGGLGIRRLQDIELPAFLASASGVLELVTRILQVNGDDFSIPFAEEALTLWRARCPGCDDPDFPERQRAWDEEICQVSLDGLLGHSSGAERARLLAVSRPESGLWLHALPSPHLGTLLDDNSLRVAVALRLGCDVCQPHRCVCGANVDVQGRHGLHCVRSAGRISRHHSINDIVRRALISADIPAVLEPPGLSRSDGRRPDGLTLIPWEKGRCLLWDATCVCTFAPSHVGSTAGTVGAAAEAAARQKCVKYGQLIAGGYIFVPLAIETTGVWGEQGRQFIREIGRRLRSRGFDCRSGAYLAQRISLAVQRGNAASVMGTFGSGASWGGLFN

SEQ ID NO: 18220 - protein, 975 aa, Plutella xylostella
MHAVLTFLIIFVNFSIVNDVNIFCAKSVMSSFASCPHCPGTSRLYVVPRGLNVHISRVHGGFRSQQTEQASSVQGEVDEGVAPAFDRLPILKSKIRVLKHIPKGARSLAAAKLSEVIEKCIQTNGTEDWYELLTFSYRYLRIPLSEDRSRSLTSKLKENLNNADARGLPTLDSAPRSGGVNRRSLCKLVESKVHDGDLSGAVRILLSDCSLADNSEETVESLRQKHPAPGRTLNFPSEPDASSEFLAVEVSDITEAISSFNNGSAAGLDGIRPEHLKELTSVGAGDSGVNLLGSICSLANFMLKGMVNREVCPYLYGASLFALKKKDGGIRPIAIGNVIRRLVAKLGCRAVRQGMSSYLQPRQLGFGVPLGCEAAIHATRSFALSRGNSDDVIVKVDIRNAFNTVERDMVLSKVLEKIPSLYPFLHQCYSRPSNLFFGDSLMESRVGVQQGDPLGPLLFSLAIQDVIVALRSPLNVWYLDDGTIGGRPEVVSEDLRSLAEGFRRMGLEVNAQKCELYSCSGQASQEILSQVESVVPGLKILDRSNFLLLGAPIFAEGIPEVLASKMRALRATKCHLSQLSAHVALTILRSCLSMPRMTYTLRTAPVWLYRQETAGYDAILKDLSETVLNIEMTSSQWSQASLPIRHGGLGIRRLQDTELPAFLSSSFGVLDLVTRILTIHGDGFSIPFAEEALELWQARCPGSDLPETPQSQRSWDEVLCNNAIDSLLSSQSGVELARLRAVTQPESGIWLHALPSPQLGTLMDDDSLRVAVALRLGCNVCHPHRCVCGAQVDARGRHGLHCVRSAGRLSRHCSINDIVKRALIAANIPSVLEPQGLSRTDGKRPDGLTMIPWERGRCLLWDATCVCTFAPSHVASTSLTPGAAAEEAARLKCQKYGPLLSSYIFAPLALETTGVWGVQGKAFVKEIGRRLRNRGLDFRSGAYLMQRISLAVQRGNAASVLGTFGSDMARVGLVV

SEQ ID NO: 18221 - protein, 947 aa, Plutella xylostella
MSSFASCPHCPGTSRLYVVPRGLNVHISRVHGGLRSQQTDQASSARGDVDEGVTPAFDHLPSLKSKVRVLKHIPKGVRSLAAAKLSEVIEKCIQTNGTDDWYELLTFSYRYLRIPLSEDRSRSLTSKLKENLNNADAQGLPTLDSAPCSGGVNRRSLCKLVESKVHDGDLSGAIRILLSDCSLADNSEETVESLRQKHPAPGRTLNFPSEPDASSEFLAVEVSDITEAIASFNNGSAAGLDGIRPEHLKELTSVGAGDSGVNLLGSICSLANYMLKGMVNREVCPYLYGATLCALKKKDGGIRPIAVGNVIRRLVAKLGCRAVREGMSSYLQPRQLGFGVPLGCEAAIHATRSFALSRANSDDVIVKVDIRNAFNTVERDTVLSEVLDKIPSLYPFLHQCYSRPSNLFFGDSLMESRVGVQQGDPLGPLLFSLAIQDVIVALRSSLNVWYLDDGTIGGRPEVVSEDLRSLVEGFRRMGLEVNAQKCELYSCSGQASQEVLSQVESVVPGLKILDRSNFLLLGAPIFAEGIPEVLASKMRALRATKCHLSQLSAHVALTILRSCLSMPRMTYTLRTAPVWLYRQETAGYDATLKDLSETVLNIEMTSSQWSQASLPIRHGGLGIRRLQDTELPAFLSSSFGVLDLVTRILAIHGDGFSIPFAEEALELWQARCPGSDLPETPQSQRSWDEVLCKNAIDFLLSSHSGAELARLRAVTQPESGIWLHALPSPQLGTLMDDDSLRVAVALRLGCNVCHPHRCVCGAQVDAGGRHGLHCVRSAGRLSRHCSINDIVKRALIAANIPSVLEPQGLSRTDGKRPDGLTMIPWERGRCLVWDATCVCTFAPSHVASTSVTPGAAAEEAARLKCQKYGPLLGSYIFAPLALETTGVWGVQGKAFVKEIGRRLRNRGLDFRSGAYLMQRISLAVQRGNAATVLGTFGSDMARVGLLV

SEQ ID NO: 18222 - protein, 954 aa, Plutella xylostella
MRDNIKSICPHCPGSSRQYVVPRGLNVHISRVHGHGYPRQPPSSAPALQGDSQNAAQVDPIAPSLSQVPLFRRNVRVLKHVPKGARCLAANKLSQIMEKCVQTNNSEDWYELLTFSFTSLRVPSSDDRKQSLTSKVKKNINDGNSINLSASDFATGSHSQRSLYSYKAVEQKVNDGDLSGAVRILLSDSCLADDNQATLDILRQKHPSPGRPLNLPGEPDQSSEFLSVEVEDVSEAIASFKNGSAGGLDGLRPEHLKELTSFAAGDGGVALLHSICNLVNFMMKGMVNRTICPFLYGASLCALKKRDGGIRPIAVGSVIRRLVAKLCCRALGQALASELQPHQLGFGVPLGSEAAIHATRSFAMSEARRNDIIVKVDVRNAFNSIERDVILSKVKSSAPNLYPFVHQCYSSPSNLFYGVNLIESQVGVQQGDPLGPLLFSLAVQDVIASLHSPLNIWYLDDGTIGGSPEVVIEDLKILVEGFGDLGLRLNSQKCELFSCSGDVPQELRSELESVIPGVVYVDKAEFTLLGAPIFPEGIPAVLMSKLNTLLATKPHLKHLSAHVALTILRGSLSMPRLTYSLRTAPVWRHGEAASQYDKALKELLECIINIEMTPPQWDQAALPIRHGGLGVRRLQDTELPAFLASSYGVIDLVIRILNVNGDEFKIPYAEEAFDLWRARCPASDVPQQPECQRSWDEPICKITLNGLIGQSVGSELARLRAAAEHESGLWLHALPSPQLGTLLDNDSLRVAVALRLGCNICEPHRCVCGAWVDAQGHHGLYCVRSAGRFSRHHSINDIIRRALASANIPSVLEPPGLSRTDGKRPDGLTLVPWERGRCLLWDATCVCTFAQSHVAFTAATAGAAAEAAARQKCAKYRALMTSYIFVPLALETTGVWGTQGRAFIKELGRRLRDRGHDKRSGAYLMQRISLAVQRGNAASVMGTFGSGASWGGLF

SEQ ID NO: 18223 - protein, 960 aa, Plutella xylostella
MVNDVNIFCAKSVMSSFASCPHCPGTSRLYVVPRGLNVHISRVHGGFRSQQTEQASSVQGDVDEGVAPAFDRLPILKSKIRVLKHIPKGARSLAAAKLSEVIEKCIQSNGTEDWYELLTFSYRYLRIPLSEDRSRSLTSKLKENLNNADARGLPTLDSAPCSGGVNRRSLCKLVESKVHDGDLSGAVRILLSDCSLADNSEETVESLRQKHPAPGRTLNFPSEPDASSEFLAVEVSDITEAIASFNNGSAAGLDGIRPEHLKELTSVGAGDSGVNLLGSICSLANFMLKGMVNREVCPYLYGASLFALKKKDGGIRPIAVGNVIRRLVAKLGCRAVRQGMSSYLQPRQLGFGVPLGCEAAIHATRSFALSRGDSDDVIVKVDIRNAFNTVERDTVLSKVLEKIPSLYPFLHQCYSRPSNLFFGDSLMESRVGVQQGDPLGPLLFSLAIQDVIVALRSPLNVWYLDDGTIGGRPEVVSEDLRSLAEGFRRMGLEVNAQKCELYSCSGQASQEILSQVESVVPGLKILDRSNFLLLGAPIFAEGIPEVLASKMRALRATKCHLSQLSAHVALTILRSCLSMPRMTYTLRTAPVWLYRQETAGYDAILKDLSETVLNIEMTSSQWSQASLPIRHGGLGIRRLQDTELPAFLSSSFGVLDLVTRILTIHGDGFSIPFAEEALELWQARCPGSDLPETPQSQRSWDEVLCNNAIDSLLSSQSGVELARLRAVTQPESGIWLHALPSPQLGTLMDDDSLRVAVALRLGCNVCHPHRCVCGAQVDARGRHGLHCVRSAGRLSRHCSINDIVKRALIAANIPSVLEPQGLSRTDGKRPDGLTMIPWERGRCLVWDATCVCTFAPSHVASTSLTPGAAAEEAARLKCQKYGPLLSSYIFAPLALETTGVWGVQGKAFVKEIGRRLRNRGLDFRSGAYLMQRISLAVQRGNAASVLGTFGSDMARVGLVV

SEQ ID NO: 18224 - protein, 948 aa, Plutella xylostella
MNVSRAVCPHCPGSSRLYVVPRGLNVHISRIHRGGPAQQPQPLGDGQSDLDDDPPTLFDSLPLLRRKVRVLKHIPKGARYLAAGKLSQTIERCVQANGVQDWYNLMTFAYRCLRVPSSENRGRSLTSKVKDTITAGSIDSSSFADTPLRASAHNNRAVCKLVEAKAYDGDLNGAVRILLSDCSVAEDNDATLSALRLKHPVPGRGLDWPPEPNRTDEFLMVDVADVTQAIGGFHNGSAPGLDGIRPELLKELTSAGAGDNSAVLLGSICSLANFMLKGMVNREVTPFLYGATLCALTKKDGGIRPIAVGSALRRLVAKLGCSAVRGVMSAHLQPRQLGFGVPLGCEAAIHATRAFALDRDGSESIIFKVDLENAFNMVERDVILRKVKEQVPPLYPFLHQCYSMPSNLFYRSNLIESQVGVQQGDPLGPLLFSLAIQDVVSSLHSPLNTWYLDDGCLGGRAEEVLEDIETLIRSLNALGLRLNPRKCELFSCSGQLSQNVSARCDALVPGFVQLDKAHFTLLGAPVFPEGVPSVLLSKMRALADTKPLLGQLSAHVALTILRSCLSIPRLTYTLRTSPVWLCGVESAMYDETLKDLLGGIINTNMTELQWSQAALPIRHGGLGIRRLQDTELPAFLASSSGVLQLVTRILPFNGDELYIPYAEEALELWRARCPSGTEPEQPQRQRDWDEEMCRVAVDALLAQTTGAELARLRAVSQPESGLWLHALPSPQMGTLLDDDSLRVAVALRLGCNICEPHSCACGATVDRLGRHGLHCVRSAGRLSRHQAINDIVRRALVTAGVPTVLEPPGLCRSDGKRPDGLTLIPWERGRSVLWDATCVCTFAPSHVGLTAVTAGAAAEAAARQKCKKYRELMATYIFVPLALETTGVWGEQGKAFVRAIGHRLRSRGYDNRSGAYLMQRISLAVQRGNAASIMGTFSSVMSRGGLFT

SEQ ID NO: 18225 - protein, 669 aa, Plutella xylostella
MLKGMVNREVCPYLYGASLFALKKKDGGIRPIAVGNVIRRLVAKLGCRAVRQGMSSYFQPRQLGFGVPLGCEAAIHATRSFALSRGNSDDVIVKVDIRNAFNTVERDTVLSKVLEKIPYLYPFLHQCYSRPSNLFFGDSLMESRVGVQQGDPLGPLLFSLAIQDVIFALRSPLNVWYLDDGTIGGRPEVVSEDLRSLAEGFRRMGLEVNAQKCELYSCSGQASQEILSQVESVVPGLKILDRSNFLLLGAPIFAEGIPEVLASKMRALRATKCHLSQLSAHVALTILRSCLSMPRMTYTLRTAPVWLYRQETAGYDAILKDLSETVLNIEMTSSQWSQASLPIRHGGLGIRRLQDTELPAFLSSSFGVLDLVTRILTIHGDGFSIPFAEEALELWQARCPGSDLPETPQSQRSWDEVLCNNAIDSLLSSQSGVELARLRAVTQPESGIWLHALPSPQLGTLMDDDSLRVAVALRLGCNVCHPHRCVCGAQVDARGRHGLHCVRSAGRLSRHCSINDIVKRALIAANIASVLEPQGLSRTDGKRPDGLTMIPWERGRCLLWDATCVCTFAPSHVASTSLTPGAAAEEAARLKCLKYGPLLSSYIFAPLALETTGVWGVQGKVFVKEIGRRLRNRGLDFRSGAYLMQRIFSVETLQASWGLLGRIWPESDW

SEQ ID NO: 18226 - protein, 948 aa, Plutella xylostella
MNVSRAVCPHCPGSSRLYVVPRGLNVHISRIHRSGPAQQPQPLGDGQSDLDDDPPTLFDSLPLLRRKVRVLKHIPKGARYLAAGKLSQTIERCVQSNGVQDWYNLMTFAYRCLRVPSSENRGRSLTSKVKDTITAGSIDSSSFADTPFCGSARNNRAVCKLVEAKAYDGDLNGAVRILLSDCSVAEDNDATLSALRLKHPVPGRGLDWPPEPNRTDEFLMVDVADVTQAIGGFHNGSAPGLDGIRPELLKELTSAGAGDNSAVLLGSICSLANFMLKGMVNREVTPFLYGASLCALTKKDGGIRPIAVGSALRRLVAKLGCSAVRGAMSAHLQPRQLGFGVPLGCEAAIHATRAFALDRDGSESIIFKVDLENAFNMVERDVILRKVKEQVPTLYPFLHQCYSMPSNLFYRSNLIESQVGVQQGDPLGPLLFSLAIQDVVSSLHSPLNTWYLDDGCLGGRAEEVLQDIETLIRSLNALGLRLNPRKCELFSCSGQLSQNVSARCDALVPGFVQLDKAHFTLLGAPVFPEGVPSVLLSKTRALADTKPLLGQLSAHVALTILRSCLSIPRLTYTLRTSPVWLCAVESAMYDETLKDLLGGIINTNMTELQWSQAALPIRHGGLGIRRLQDTELPAFLASSSGVLQLVTRILPFNGDELYIPYAEEALELWRARCPSGTEPEQPQRQRDWDEEMCRVAVDALLAQTTGAELARLRAVSQPESGLWLHALPSPQMGTLLDDDSLRVAVALRLGCNICEPHSCACGATVDRLGRHGLHCVRSAGRLSRHQAINDIVRRALVTAGVPTVLEPPGLCRSDGKRPDGLTLIPWERGRSVLWDATCVCTFAPSHVGLTAVTARAAAEAAARQKSNKYRQLMATYIFVPLALETAGVWGEQGKAFVRAIGHRLRSRGYDNRSGAYLMQRISLAVQRGNAASIMGTFSSVMSRGGLFT

SEQ ID NO: 18227 - protein, 948 aa, Plutella xylostella
MNVSRAVCPHCPGSSRLYVVPRGLNVHISRIHHGGPSQQPQPLGDGQRDVGDDPSTLFDSLPLLRRKVRVLKHIPKGARHLAAGKLSQIIERCVQSNGAQDWYDLMTFAYRCLRVPSSDDRGRSLTSKVKEIIIAGSLDGSLFADMPLRGSARNDRALCKLVEAKVYEGDLSGAVRILLSDCSVAEDNDATLSALRLKHPEPSRGLDWPPEPNRTDDFLSVDAADVIQAIGSFHNGSAPGLDGIRPELLKELTSAGAGDNGAVLLGSICSLANFMLKGMVNREVTPFLYGASLCALMKKDGGIRPIAVGSALRRLVAKLGCNAVRGVMSAQLQPRQLGFGVPLGCEAAIHATRAFAFDRDGSETVIFKVDLENAFNMVERDVILRKVKEQVPSLYPFLHQCYSMPSNLFYRSSLLESQVGVQQGDPLGPLLFSLAIQDVVSSLRSPLNTWYLDDGCLGGRPEEVLEDIEILIRNLNALGLRLNPQKCELFSCSGQLSQNVSGRFNALVPGFVQLDKAHFTLLGAPVFPEGVPSVLLSKMTALADTKPLLGQLSAHVALTILRSCLSIPRLTYTLRTSPVWLCGVEAAMYYEALKDLLGGIINSSMTELQWSQAALPIRHGGLGIRRLQDTELPAFLASSSGVLQLVTRILPFNGDELCIPYADEALELWRARCPSGTVPELPQRQRDWDEEMCRVTVAALLAQNTGAELARLRAVSQLESGLWLQALPSPQMGTLLDDDSLRVAVALRLGCDICEPHSCVCGATVDRLGRHGLHCVRSAGRLSRHQAINDIVRRALVTAGVPAVLEPPGLCRSDGKRPDGLTLIPWERGRSVLWDATCVCTFAPSHVGLTAVTAGSAAEAAARQKCIKYGQLMATYIFVPLALETAGVWGEQGRDFVRAIGRRLRSRGYDNRSGAYLMQRISLAVQRGNAASIMGTFSSVMSRGGLLT

SEQ ID NO: 18228 - protein, 952 aa, Plutella xylostella
MRDNIKSICPHCPGSSRQYVVPRGLNVHISRVHGDGYPRQPPSSAPALQGDSQNAAQVDPIAPSLSQVPLFRRNVRVLKHVPKGARCLAANKLSQIMEKCVQTNNSEDWYELLTFSFTSLRVPSSDDRKQSLTSKVKKNINDGNSINLSASDFATGSHSQRSLYKAVEQKVNDGDLSGAVRILLSDSCLADDNQATLDILRQKHPSPGRPLNLPGEPDQSSEFLSVEVEDVSEAIASFKNGSAGGLDGLRPEHLKELTSFAAGDGGVALLHSICNLVNFMMKGMVNRTICPFLYGASLCALKKRDGGIRPIAVGSVIRRLVAKLCCRALGQALASELQPHQLGFGVPLGSEAAIHATRSFAMSEARRNDIIVKVDVRNAFNSIERDVILSKVKSSAPNLYPFVHQCYSSPSNLFYGVNLIESQVGVQQGDPLGPLLFSLAVQEVIASLHSPLNIWYLDDGTIGGSPEVVIEDLKILVEGFGDLGLRLNSQKCELFSCSGDVPQELRSELESVIPGVVYVDKAEFTLLGAPIFPEGIPAVLMSKLNTLLATKPHLKHLSAHVALTILRGSLSMPRLTYSLRTAPVWRHGEAASQYDKALKELLECIINIEMTPPQWDQAALPIRHGGLGVRRLQDTELPAFLASSYGVIDLVIRILNVNGDEFKIPYAEEALDLWRARCPASDVPQQPECQRSWDEPICKITLNGLIGQSVGSELARLRAAAEHESGLWLHALPSPQLGTLLDNDSLRVAVALRLGCNICEPHRCVCGAWVDAQGHHGLYCVRSAGRFSRHHSINDIIRRALASANIPSVLEPPGLSRTDGKRPDGLTLVPWERGRCLLWDATCVCTFAQSHVAFTAATAGAAAEAAARQKCAKYRALMTSYIFVPLALETTGVWGTQGRAFIKELGRRLRDRGHDKRSGAYLMQRISLAVQRGNAASVMGTFGSGASWGGLF

SEQ ID NO: 18229 - protein, 952 aa, Plutella xylostella
MRDNIKSICPHCPGSSRQYVVPRGLNVHISRVHGDGYPRQPPSSAPALQGDSQNAAQVDPIAPSLSQVPLFRRNVRVLKHVPKGARCLAANKLSQIMEKCVQTNNSEDWYELLTFSFTSLRVPSSDDRKQSLTSKVKKNINDGNSINLSASDFATGSHSQRSLYKAVEQKVNDGDLSGAVRILLSDSCLADDNQATLDILRQKHPSPGRPLNLPGEPDQSSEFLSVEVEDVLEAIATFKNGSAGGLDGLRPEHLKELTSFAAGDGGVALLHSICKLVNFMMKGMVNRTICPFLYGASLCALKKRDGGIRPIAVGSVIRRLVAKLCCRALGQALASELQPHQLGFGVPLGSEAAIHATRSFAMSEARRNDIIVKVDVRNAFNSIERDVILSKVKSSAPNLYPFVHQCYSSPSNLFYGVNLIESQVGVQQGDPLGPLLFSLAVQDVIASLHSPLNIWYLDDGTIGGSPEVVIEDLKILVEGFGDLGLRLNSQKCELFSCSGDVPQELWSELESVIPGVVYVDKAEFTLLGAPIFPEGIPAVLMSKLNTLLATKPHLKHLSAHVALTILRGSLSMPRLTYSLRTAPVWRHGEAASQYDKALKELLECIINIEMTPPQWDQAALPIRHGGLGVRRLQDTELPAFLASSYGVIDLVIRILNVNGDEFNIPYAEEALDLWRARCPASDVPQQPECQRSWDEPICKITLNGLIGQSVGSELARLRAAAEHESGLWLHALPSPQLGTLLDNDSLRVAVALRLGCNICEPHRCVCGAWVDAQGHHGLYCVRSAGRFSRHHSINDIIRRALASANIPSVLEPPGLSRTDGKRPDGLTLVPWERGRCLLWDATCVCTFAQSHVAFTAATAGAAAEAAARQKCAKYRALMTSYIFVPLALETTGVWGTQGRAFIKELGRRLRDRGHDKRSGAYLMQRISLAVQRGNAASVMGTFGSGASWGGLF

SEQ ID NO: 18230 - protein, 952 aa, Plutella xylostella
MRDNIKSICPHCPGSSRQYVVPRGLNVHISRVHGDGYPRQPPSSAPALQGDSQNAAQVDPIAPSLSQVPLFRRNVRVLKHVPKGARCLAANKLSQIMEKCVQTNNSEDWYELLTFSFTSLRVPSSDDRKQSLTSKVKKNINDGNSINLSASDFATGSHSQRSLYKAVEQKVNDGDLSGAVRILLSDSCLADDNQATLDILRQKHPSPGRPLNLPGEPDQSSEFLSVEVEDVSEAIASFKNGSAGGLDGLRPEHLKELTSFAAGDGGVALLHSICNLVNFMMKGMVNRTICPFLYGASLCALKKRDGGIRPIAVGSVIRRLVAKLCCRALGQALASELQPHQLGFGVPLGSEAAIHATRSFAMSEARRNDIIVKVDVRNAFNSIERDVILSKVKSSAPNLYPFVHQCYSSPSNLFYGVNLIESQVGVQQGDPLGPLLFSLAVQDVIASLHSPLNIWYLDDGTIGGSPEVVIEDLKILVEGFGDLGLRLNSQKCELFSCSGDVPQELRLELESVIPGVVYVDKAEFTLLGAPIFPEGIPAVLMSKMNTLLATKPHLKHLSAHVALTILRGSLSMPRLTYSLRTAPVWRHGEAASQYDKALKELLECIINIEMTPPQWDQAALPIRHGGLGVRRLQDTELPAFLASSYGVIDLVIRILNVNGDEFKIPYAEEALDLWRARCPASNVPQQPECQRSWDEPICKITLNGLIGQSVGSELARLRAAAEHESGLWLHALPSPQLGTLLDNDSLRVAVALRLGCNICEPHRCVCGAWVDAQGHHGLYCVRSAGRFSRHHSINDIIRRALASANIPSVLEPPGLSRTDGKRPDGLTLVPWERGRCLLWDATCVCTFAQSHVAFTAATAGAAAEAAARQKCAKYRALMTSYIFVPLALETTGVWGTQGRAFIKELGRRLRDRGHDKLSGAYLMQRISLAVQRGNAASVMGTFGSGASWGGLF

SEQ ID NO: 18231 - protein, 947 aa, Plutella xylostella
MRDNIKSICPHCPGSSRQYVVPRGLNVHISRVHGDGYPRQPPSSAPALQGDSQNAAQVDPIAPSLSQVPLFRWNVRVLKHVPKGARCLAANKLSQIMEKCVQTNNSEDWYELLTFSFTSLRVPSSDDRKQSLTSKVKKNINDGNSINLSASDFATGSHSQRSLYKAVEQKVNDGDLSGAVRILLSDSCLADDNQATLDILRQKHPSPGRPLNLPGEPDQSSEFLSVEVEDVSEAIASFKNGSAGGLDGLRPEHLKELTSFAAGDGGVALLHSICNLVNFMMKGMVNRTICPFLYGASLCALKKRDGGIRPIAVGSVIRRLVAKLCCRALGQALASELQPHQLGFGVPLGSEAAIHATVIVKANDIIVKVDVRNAFNSIERDVILSKVKSSAPNLYPFVHQCYSSPSNLFYGVNLIESQVGVQQGDPLGPLLFSLAVQDVIASLHSPLNIWYLDDGTIGGSPEVVIEDLKILVEGFGDLGLRLNSQKCELFSCSGDVPQELRSELESVIPGVVYVDKAEFTLLGAPIFPEGIPAVLMSKLNTLLATKPHLKHLSAHVALTILRGSLSMPRLTYSLRTAPVWRHGEAASQYDKALKELLECIINIEMTPPQWDQAALPIRHGGLGVRRLQDTELPAFLASSYGVIDLVIRILNVNGDEFKIPYAEEALDLWRARCPASDVPQQPECQRSWDEPICKITLNGLIGQSVGSELARLRAAAEHESGLWLHALPSPQLGTLLDNDSLRVAVALRLGCNICEPHRCVCGAWVDAQGHHGLYCVRSAGRFSRHHSINDIIRRALASANIPSVLEPPGLSRTDGKRPDGLTLVPWERGRCLLWDATCVCTFAQSHVAFTAATAGAAAEAAARQKCAKYRALMTSYIFVPLALETTGVWGTQGRAFIKELGRRLRDRGHDKRSGAYLMQRISLAVQRGNAASVMGTFGSGASWGGLF

SEQ ID NO: 18232 - protein, 952 aa, Plutella xylostella
MRDNIKSICPHCPGSSRQYVVPRGLNVHISRVHGDGYPRQPPSSAPALQGDSQNAAQVDPIAPSLSQVPLFRRNVRVLKHVPKGARCLAANKLSQIMEKCVQTNNSEDWYELLTFSFTSLRVPSSDDRKQSLTSKVKKNINDGNSINLSASDFATGSHSQRSLYKAVEQKVNDGDLSGAVRILLSDSCLADDNQATLDILRQKHPSPGRPLNLPGEPDQSSEFLSVEVEDVSEAIASFKNGSAGGLDGLRPEHLKELTSFAAGDGGVALLHSICNLVNFMMKGMVNRTICPFLYGASLCALKKRDGGIRPIAVGSVIRRLVAKLCCRALGQALASELQPHQLGFGVPLGSEAAIHATRSFAMSEARRNDIIVKVDVRNAFNSIERDVILSKVKSSAPNLYPFVHQCYSSPSNLFYGVNLIESQVGVQQGDPLGPLLFSLAVQDVIASLHSPLNIWYLDDGTIGGSPEVVIEDLKILVEGFGDLGLRLNSQKCELFSCSGDVPQELRSELESVIPGVVYVDKAEFTLLGAPIFPEGIPAVLMSKLNTLLATKPHLKHLSAHVALTILRGSLSMPRLTYSLRTAPVWRHGEAASQYDKALKELLECIINIEMTPPQWDQAALPIRHGGLGVRRLQDTELPAFLASSYGVIDLVIRILNVNGDEFKIPYAEEALDLWRARCPASDVPQQPECQRSWDEPICKITLNGLIGQSVGSELARLRAAAEHESGLWLHALPSPQLGTLLDNDSLRVAVALRLGCNICEPHRCVCGAWVDAQGHHGLYCVRSAGRFSRHHSINDIIRRALASANIPSVLEPPGLSRTDGKRPDGLTLVPWERGRCLLWDATCVCTFAQSHVAFTAATAGAAAEAAARQKCAKYRALMTSYIFVPLALETTGVWGTQGRAFIKELGRRLRDRGHDKRSGAYLMQRISLAVQRGNAASVMGTFGSGASWGGLF

SEQ ID NO: 18233 - protein, 945 aa, Plutella xylostella
MNVSRAVCPHCPGSSRQFVIPRGLNVHISRVHRDVASQPSVDVQGDDASNSRSLFEDLPMWKKRVRILKHIPKGARCLAAEKLSQAIEKCIQSNTTQDWFELQSFAYTCLRVPSSADRGRSLTSKVKENLTAGGLGVPLPTDVTSRCVSASGRALYKLVETKVFDGDVSGAVRILLSDSSLADDSDATVEALRLKHPIPSRDLQFPPEPNLSSVFLTVEVKDVAQAIESFNSGSAGGLDGIRPGHLKELTSPAAGDAGATLLRSLCSLANFMLKGMVNREVCPFLYGASLCALNKKDGGIRPIAVGSVFRRLVAKLGCSAVREEMSEYLQPLQLGFGVPLGCEAAIHAARSFAYLRDGSDSIIFKVDLENAFNTVERDVFLKRVLERVPSLFPFLHQCYARPSNLFFGTIPVESQVGAQQGDPLGPLIFSLAIHDVVSSLRSPLNLWYLDDGTVGGDADEVLSDIESLVQGLAALGLRINPRKSEVFACAGQLSPATQERLDVLVPGAKVLDRTTFMLLGAPIFPEGVPALVLSKMRTLAETKSHLCQLSAHVALSILRGCLSIPRLTYSLRTAPVWLHREESKQYDEVLKDLLEAIVNISMSNEQWSQAALPVRYGGLGLRRLEDTQLPAFLASSCGVLRLVTRILHVNGDEFSIPHAAEALELWQSVCPESAVPVQPERQRDWDEEQCRLQLNMLMLRNAGAELARLRAVSQPESGLWLHALPSPQLGTLLDNDSLRVAVALRLGCTVVEPHVCVCGARVDQSGRHGLHCVRSAGRFSRHHAINDIVRRALVSADVPAVLEPPGLSRADGKRPDGLTMVPWEKGRSLLWDATCVCTLAPSHVQSTAANAGAAAEAAARLKKLKYSQLMQRYLFVPLAVETMGVWGEEGRAFLREITRRLRSRGLGSSSGAHLMQRLSLAVQRGNAASVMGTFGSGVARRGIFD

SEQ ID NO: 18234 - protein, 945 aa, Plutella xylostella
MNVSRAVCPHCPGSSRQFVIPRGLNVHISRVHRDVASQPSVDVQGDDASNSRSLFEDLPMWKKRVRILKHIPKGARCLAAEKLSQAIEKCIQSNTTQDWFELQSFAYTCLRVPSSADRGRSLTSKVKENLTAGGLGVPLPTDVTSRCVSASGRALYKLVETKVFDGDVSGAVRILLSDSSLADDSDATVEALRLKHPIPSRDLQFPPEPNLSSVFLTVEVKDVAQAIESFNSGSAGGLDGIRPGHLKELTSLAAGDAGATLLRSLCSLANFMLKGMVNREVCPFLYGASLCALNKKDGGIRPIAVGSVFRRLVAKLGCSAVREEMSEYLQPLQLGFGVPLGCEAAIHAARSFAYLRDGSDSIIFKVDLENAFNMVERDVFLKRVLERVPSLFPFLHQCYSRPSNLFFGTIPVESQVGAQQGDPLGPLIFSLAIHDVVSSLRSPLNLWYLDDGTVGGDADEVLSDIESLVQGLAALGLRINPRKSEVFACAGQLSPTTQERLDVLVPGAKVLDRTTFMLLGAPIFPEGVPALVLSKMRTLAETKSHLCQLSAHVALSILRGCLSIPRLTYSLRTAPVWLHREESKQYDEVLKDLLEAIVNISMSNEQWSQAALPVRYGGLGLRRLEDTQLPAFLASSCGVLRLVTRILHVNGDEFSIPHAAEALELWQSVCPESAVPVQPERQRAWDEEQCRLQLNMLMLRNAGAELARLRAVSQPESGLWLHALPSPQLGTLLDNDSLRVAVALRLGCTVVEPHVCVCGARVDQSGRHGLHCVRSAGRFSRHHAINDIVRRALVSADVPAVLEPPGLSRADGKRPDGLTMVPWEKGRSLLWDATCVCTLAPSHVQSTAANAGAAAEAAARLKKLKYSQLMQRYLFVPLAVETMGVWGEEGRAFLREITRRLRSRGLVSSSGAHLMQRLSLAVQRGNAASVMGTFGSGVARRGIFD

SEQ ID NO: 18235 - protein, 944 aa, Plutella xylostella
MNVSRAVCPHCPGSSRQFVIPRGLNVHISRVHRDVASQPSVVQGDDASNSRSLFEDLPMWKKRVRILKHIPKGARCLAAEKLSQAIEKCIQSNTTQDWFELQSFAYICLRVPSSADRGRSLTSKVKENLTAGGLGVPLPTDVTSRCVSASGRALYKLVETKVFDGDVSGAVRILLSDSSLADDSDATVEALRLKHPIPSRDLQFPPEPNLSSVFLTVEVKDVAQAIESFNSGSAGGLDGIRPGHLKELTSPAAGDAGATLLRSLCSLANFMLKGMVNREVCPFLYGASLCALNKKDGGIRPIAVGSVFRRLVAKLGCSAVREEMSEYLQPLQLGFGVPLGCEAAIHAARSFAYLRDGSDSIIFKVDLENAFNTVERDVFLKRVLERVPSLFPFLHQCYARPSNLFFGTIPVESQVGAQQGDPLGPLIFSLAIHDVVSSLRSPLNLWYLDDGTVGGDADEVLSDIESLVQGLAALGLRINPRKSEVFACAGQLSPATQERLDVLVPGAKVLDRTTFMLLGAPIFPEGVPALVLSKMRTLAETKSHLCQLSAHVALSILRGCLSIPRLTYSLRTAPVWLHREESKQYDEVLKDLLEAIVNISMSNEQWSQAALPVRYGGLGLRRLEDTQLPAFLASSCGVLRLVTRILHVNGDEFSIPHAAEALELWQSVCPESAVPVQPERQRAWDEEQCRLQLNMLMLRNAGAELARLRAVSQPESGLWLHALPSPQLGTLLDNDSLRVAVALRLGCTVVEPHVCVCGARVDQSGRHGLHCVRSAGRFSRHHAINDIVRRALVSADVPAVLEPPGLSRADGKRPDGLTMVPWEKGRSLLWDATCVCTLAPSHVQSTAANAGAAAEAAARLKKLKYSQLMQRYLFVPLAVETMGVWGEEGRAFLREITRRLRSRGLGSSSGAHLMQRLSLAVQRGNAASVMGTFGSGVARRGIFD

SEQ ID NO: 18236 - protein, 922 aa, Trachelipus rathkii
MRVHQQGRHRAEYDAMVLERLPPQRKTPWSNEEISLLAREEIRLVAEGVLHINQGLLQVFPHRTLEAIKGKRKEVGYKRLLEEMEVPEQLSSPPRVVAHQAAPEGRLDPLPIIPPRPPPPISEAELEELLRSCGFVLDLPVDPPWRGRQNPQYQQAAAPPPQSRSKIKRKEFAKIQELYCRDKGEAHKFITDRDSYVENSRPSEEICEEWRQYLARQEDLPIRNDFDEMRSEQDQDALRGLDDWVSEEEVEWALKSMEKKGATGLDRVSLEDLSNIRRQTLVKILNGIFAFAPEGMLRGRVTLIPKINNPVGFGDFRPITVLPIVTRLLHKILARRLGMVISHNPFQAGFRSGRSTSENIHLLKLILNSRISRRSSTYLAFIDFKKAFDSVHHGNLLALFEGVGLPEALIGYIRNVYVRASLKVGSGWIKPGRGVLQGDPLSPILFNLVLDFILTDGTADWHQTARSFADVALMASTRYGLQANISTMAETAASLGLTMGINKCATIGLRWLGKEKKIVHDLDPFFINADPIPSMDHTGVYKYLGIPMTSAGVGKWTGGKLRDSLGKLTTCFLKPQQKLHLLKNFLILKMFYLLRQVTINIKSLRNADRQIRAAIRKILHLPKDTPVPMFSRPPYEGGIGIPELETTILTQLEGLKQVLTNRGPLWALVADSIKVPLSTRPRRERVVEFQDGLGLAEAAKRGGCYSWINDGTRMMKGADYVEAIKIRHNLCNTKERNSRGRRVEAWEKTCDLGCHKLETLGHILQECPAVAPLRVIRHDRLNSILKSELEKRNWIVSLEPTIPTPAGIRRPDVVCHKGTRALVIDSTVAADAHGANLNIVTQRKIEYYDTPAIRDWVTNRTGCQNVEIQAMTFNWRGDLSGKSHKLLKSLNLLTSIKLLEVSLMECNANILRFFKQASGRWG

SEQ ID NO: 18237 - protein, 947 aa, Trachelipus rathkii
MAEQHSPVRCPNCTAAFPTLRGMRVHQQGRHRAEYDAMVLARLPQNRKTPWSDEEISLLAREELRLVADGVLHINQGLLQVFPHRTLEAIRGKRKQVGYKRLLEEMRAAPEPPSPPRVVAHQAAPEGRLDPLPIVPPRPPPPISEAELDESLRSCGFVLDLPVDPPRRGRQNPQYQQVAAPPPRSRNKNKRKEFAKIQELYSRDKGEALKFITDRDSYVENSRPSEEICEEWRQYLARQEDLPIRNDFDEMRSEQDQDALRGLDDWVSEDEVEWALKSMKKKGATGLDRVSLEDLTNIRRQTLVKILNGIFAFAPEGLLRGRVTLIPKTNNPVGFGDFRPITVLPIVTRLLHKILARRLGMVISHNPFQAGFQSGRSTSENIHLLKLTLNSRVSRRSSTYLAFIDFKKAFDSVHHGNLLALLEGVGLPEALVGYTRNVYVRASLKVGSGWIKPGRGVLQGDPLSPILFNLVLDFILSQTVRQIGIKLQGHVVSSLAFADDVALMASTRYGLQANISTMAETASSLGLTMGINKCATIGLRWLGKEKKIVHDLDPFFINADPIPSMDHTGVYRYLGIPMTSAGVGKWTGGKLRDSLGKLTTCFLKPQQKLHLLKNFLIPKMFYLLKHVTINIKSLRNADRQIRGAIRKILHLPKDTPVPMFSRPPYEGGIGIRELETTILTQLEGLKQVLTNRGPLWALVADSIKVPLSTRPRRERVIEFQDGLGLAEAAKRGGCYSWINDGTRMMKGADFVEAIKIQHNLCNTKERNSRGRQVEAWEKTCDLGCHKLETLGHILQECPGVAPLRVTRHDRLNSILKSELEKKNWTVALEPTIPTPAGIRRPDLVCHNGTRALVIDSTVAADAHGANLNIVTQRKIEYYDTPAINRTGCQNVEIQAMAFNWRGDLSGKSHSLLKSLNLLTSIKLLEVSLMESNANILKFFKQASGRWG

SEQ ID NO: 18238 - protein, 952 aa, Trachelipus rathkii
MAEQHSPVRCPNCTAAFPTLRGMRVHQQGRHRAEYDAMVLARLPQQRKTPWSNEEISLLAREELRLVAEGVLHINQGLLQVFPHRTLEAIKGKRKQVGYKRLLEELRAAPEPPSPPRVVAQQAAPEGGLVPLPIVPPRPPPPISEAELEESLRSYGFVLDLPVDPPRRGRQNPQYQQAAPPPPRSRKKNRRREFAKIQELYSRDKGEALKFITDRDSYVENSRPSEEICEEWRQYLARQEDLPIRNDFDEMRSEQDQDALRGLDDWVSEEEVEWALKSMKKKGATGLNRVSLEDLSNIRRQTLVKILNGIFFFAPEGLLRGRVTLIPKTNNPVGFGDFRPITVLPIVTRLLHKILARRLGMVISHNPFQAGFQSGRSTSENTHLLKLILNSRVSRRSSTYLAFIDFKKAFDSVHHGNLLALLEGVGLPEALVGYIRNVYVRASLKVGSGWIKPGRGVLQGDPLSPILFNLVLDFILSQTVRQIGIKLQDHVVSSLAFADDVALMASTRYGLQANISTMAETASSLGLTMGINKCATIGLRWLGKEKKIVHDLDPFFIDADPIPSMDHSAVYKYLGIPMTSAGVGKWTGGKLRDSLGKLTTCFLKPQQKLHLLKNFLITKMFYLLKHVTINIKSLRNADRQIRAAIRKILHLPKDTPVPMFSRPPYEGGIGIPELETTIITQLEGLKQVLTNRGPLWALVADSIKVPLSTRPRRERVIEFQDGLGLAEATKRGGCYSWINDGTRMMKGADYVEAIKIRHNLCNTKERNSRGREVEAWEKTCDLGCHKLETLGHILQECPAVAPLRVMRHDRLNSILKSELEKKNWTVALEPTIPTPAGIRRPDLVCYKGTRALVIDSTVAADAHGANLNIVTQRKIDYYDTPAVRDWVNNRTGCQNVEIQAMAFNWRGDLSLKSHNLLKSLNLLTSIKLLEVSLMESNANILKFFKQASGRWG

SEQ ID NO: 18239 - protein, 891 aa, Trachelipus rathkii
MGGKIFEKNRSNGRKKEQKPSWEIRLERDIARLRKEISLIKEYEEGNITIESKIRQAQNMIRRSRGRNRVTHAISSRKLELAAKAKKLSSYKKEEQRKRQNKMYQTDKGKFYRELRGENIKVDKPPERDRLDAFWRSIYEDQRTHNEEAEWIETTRRNPQIEEINEMEFQPLTEREVMEMIRRTSNWKTPGPDMVQNIWLKKITVLREPLTKCFNRILNGTAEIPEWMTKGETVLIPKTGETQNPGKYRPITCLPTIYKILTAILTERIYKHTIENNIIAEEQKGCSKGSHGTKDQLLINKMILEDSRQRQKNLSMTWIDYKKAYDSVPHSWIKEVLKIYKINNKIREFMEKVMQIWKINIKLHHENGTIQINDVKIRRGIFQGDSLSPLLFVLSLNPLSSLINNLHNGYRIGSRNEKKGKNISHLFYMDDIKLYSPNKQQTIEQIEVVKKFSSDIQMEFGLDKCAFLELKKGKRIDSGNIRIEDEIIRQLEQEDTYKYLGIEENEKIEHKMKEKLMKEYEKRLKLILKSELKCKFKIEAVRTLAVPVLSYGFGIIDWFQEDLNKLDIKTRKMLHAHKLTYKNQCLARMYVPRDQGGMGLQEIDAIYREEVIGLTTYIEESDSKFIRWVKEHETGKAMRTSLTAKKRDYLRKYDIPNDDPTTEGMTKKEKMKHLRNEHRKARRKKHENNWKEHAFAKEYKNIIEQVYIDKEKSIEAVCRGNLRKEDERTIVGAQDLALRTNWFKREIEKENISNKCRMCKVSPETVSHILSSCDTLLQRKQYTERHNTICKLIHFRICEKYKITIEASKYWEHNPNAIEENNHALILYDYSIPTDVPIRHNRPDIVVKDKRERKAYIIEIGIPWDGRVSAYETEKEVTYQIRRLLITRMLE

SEQ ID NO: 18240 - protein, 1234 aa, Trachelipus rathkii
MESYYIGMLIPEKEGKTDFWKYVVDNEIIGANDVMEYEFNKKYTGVERRKLIAQKQAIINFNKERNQGAIKKRKATLPTNEDLKEIERRAKERIKNEIQITPEMIGDIKQKSKETLYQGNRIKTGKNTEKSLEEQNKMTDNEDLIDGELDETEIVGEEISEAAEILNKEIMNRTDSESNNDSDTGSHYEETEEQGDEEIIENDRNENGDRMQEEEEMINKIAHYRDEDIYTNMEDRKGINKIDNWMKINKYAGIANRVLPRLLPERCDISEVNRLYYATARAITDLMGGKIFEKNRSNGRKKEQKPSWEIRLERDIARLRKEISLIKEYEEGNITLESKIRQAENMIRRSRGRNRVTHAISSRKLELAAKAKRLSSYKKEEQRKRQNKMYQTDKGKFYRELRGENIKVDKPPERDRLDAFWRSIYEDQRTHNEEAEWLETTRRNPQIEEINEMEFEPLTEREVMEKIRRTSNWKTPGPDMVQNIWLKKITVLREPLTKCFNRILNGTAEIPEWMTKGETVLIPKTGETQNPGKYRPITCLPTIYKILTAILTERIYKHTIENNIIAEEQKGCSKGSHGTKDQLLINKMILEDSRQRQKNLSMTWIDYKKAYDSVPHSWIKEVLKIYKINNKIRDFMEKVMQIWKINIKLHHENGTIQINDVKIRRGIFQGDSLSPLLFVLSLNPLSSLINNLHNGYRIGSRNEKKGKNISHLFYMDDIKLYSPNKQQTIEQIEVVKKFSSDIQMEFGLDKCAFLELKKGKRIDSGNIRINDEIIRQLEQEDTYKYLGIEENEKIEHKKMKEKLKKEYEKRLKLILKSELKCKFKVEAVRTLAVPVLSYGFGIIDWFQEDLNKLDIKTRKMLHAHKLIYKNQCLARMYVPRDQGGMGLQEIDAVYREEVIGLTTYIEESDSKFIRWVKEHETGKAMRTSLTAKKRDYLRKYDIPNDDPTTEGMTKKEKMKHLRNEHRKARRKKHENNWKEHAFAKEYKNIIEQVYIDKEKSIEAVCRGNLRKEDERTIVGAQDLALRTNWFKREIEKENISNKCRMCKVSPETVSHILSSCDTLLQRKTYTERHNTICKLIHFRICEKYKIPIEASKYWEHNPNAIEENNHALILYDYSIPTDVPVRHNKPDIVVKDKRERKAYIIEIGIPWDGRVSAYETEKEVKYQTLKYSLQGMWNDIDRAEVIPVVIGSMGVIKKSLNQYIERLPVEVTTLEMSSIIIRQSARILRMVLGC

SEQ ID NO: 18241 - protein, 889 aa, Trachelipus rathkii
MIRRSRGRNRVTHAISSRKLELAAKAKRLSSYKKEEQRKRQNKMYQTDKGKFYRELRGENIKVDKPPERDRLDAFWRSIYEDQRTHNEEAEWLETTRRNPQIEEINEMEFEPLTEREVMEKIRRTSNWKTPGPDMVQNIWLKKITVLREPLTKCFNRILNGTAEIPEWMTKGETVLIPKTGETQNPGKYRPITCLPTIYKILTAIITERIYKHTIENNIIAEEQKGCSKGSHGTKDQLLINKMILEDSRQRQKNLSMTWIDYKKAYDSVPHSWIKEVLKIYKINNKIRDFMEKVMQIWKINIKLHHENGTIQINDVKIRRGIFQGDSLSPLLFVLSLNPLSSLINNLHNGYRIGSRNEKKGKNISHLFYMDDIKLYSPNKQQTIEQIEVVKKFSSDIQMEFGLDKCAFLELKKGKRIDSGNIRINDEIIRQLEQEDTYKYLGIEENEKIEHKKMKEKLMKEYEKRLKLILKSELKCKFKVEAVRTLAVPVLSYGFGIIDWFQEDLNKLDIKTRKMLHAHKLIYKNQCLARMYVPRDQGGMGLQEIDAVYREEVIGLTTYIEESDSKFIRWVKEHETGKAMRTSLTAKKRDYLRKYDIPNDDPTTEGMTKKEKMKHLRKEHRSARRKKHENNWKEHAFAKEYKNIIEQVYIDKEKSIEAVCRGNLRKEDERTIVGAQDLALRTNWFKREIEKENISNKCRMCKVSPETVSHILSSCDTLLQRKTYTERHNTICKLIHFRICEKYKIPIEASKYWEHNPNAIEENNHALILYDYSIPTDVPVRHNKPDIVVKDKRERKAYIIEIGIPWDGRVSAYETEKEVKYQTLKYSLQGMWNDIDRAEVIPVVIGSMGVIKKSLNQYIERLPVEVTTLEMSSIIIRQSARILRMVLGC

SEQ ID NO: 18242 - protein, 1376 aa, Trachelipus rathkii
MNRQRGLRLLPTHQNNQKSKKKRCNPYNRRGGDRLEYTVEEKKRDILWCVTYGRHKMFPKKGTTKRTRNMLEQRGEIDKIKLERIPDARFASIATNINNKKTPITHEQIKQIEEEVDQYVEKMNKVEEEGEWEWTKEKNEYLMESYYIGMLIPEKEGKTDFWKYVVDNEIIGANDVMEYEFNKKYTGVERRKLIAQKQAIINFNKERNQGAIKKRKATLPTNEDLKEIERRAKERIKNEIQITPEMIGDIKQKSKETLYQGNRMKTGKNTEKSLEEQNKMTDNEELIDGELDETEIVGEEISEAAEILNKEIMNRTDSESNNDSDTGSHYEETEEQGDEEIIENDRSENGDRMQEEEEMISKIAHYRDEDIYTNMEDRKGINKIDNWMKINKYAGIANRVLPRLLPERCDISEVNRLYYATARAITDLMGGKIFEKKRSNGRKKEKKPSWEIRLERDIARLRKEISLIKEYEEGNITMESKIRQAQNMIRRSRGRNRVTHAISSRKLELAAKAKRLSSYKIEEQRKRQNKMYQTDKGKFYRELRGENIKVDKPPERDRLDAFWRSIYEDQRTHNEEAEWIETTRRNPQIEEINEMEFEPLTEREVMEKIRRTSNWKTPGPDMVQNIWLKKITVLREPLTKCFNRILNGTAEIPEWMTKGETVLIPKTRETQNPGKYRPITCLPTIYKILTAIITERIYKHTIENNIIPEEQKGCSKGSHGTKDQLLINKMILEDSRQRQKNLSMTWIDYKKAYDSVPHSWIKEVLKIYKINNKIREFMEKVMQIWKINIKLHHENGTIQINDVKIRRGIFQGDSLSPLLFVLSLNPLSSLIINLHNGYRIGSRNEKKGKNISHLFYMDDIKLYSPNKQQTIEQIEVVKKFSSDIQMEFGLDKCAFLELKKGKRIDSGNIRIEDQIIRQLEQEDTYKYLGIEENEKIEHKKMKEKLMKEYEKRLKLILKSELKCKFKIEAVRTLAVPVLSYGFGIIDWFQEDLNKLDIKTRKMLHAHKLTYKNQCLARMYVPRDQGGMGLQEIDAIYREEVIGLTTYIEESDSKFIRWVKEHETGKAMRTSLTAKKRDYLRKYDIPNDDPTTEGMTKKEKMKHLRNEHRKARRKKHENNWKEHAFAKEYKNIIEQVYIDKEKSIEAVCRGNLRKEDERTIVGAQDLALRTNWFKREIEKENISNKCRMCKVSPETVSHILSSCDTLLRRKTYTERHNTICKLIHFRICEKYKIPIEASKYWEHNPNAIEENNHALILYDYSIPTDVPITHNKPDIVVKDKRERKAYIIEIGIPWDGRVSAYEREKEMKYERLKYSLQGMWNDIDRAEVIPVIIGSMGVIKKSLNQYIERLPVEVTTLEMSSIIIRQSARILRMVLGC

SEQ ID NO: 18243 - protein, 1266 aa, Trachelipus rathkii
MLEQRGEIDKIKLERIPDARFASIATNINNKKTPITHEQIKQIEEEVDQYVGKMNKVEGEGEWEWTKEKNEYLMESYYIGMLIPEKEGKTDFWKYVVDNEIIGANDVMEYEFNKKYTGVERRKLIAQKQAIINFNKERNQGAIKKRKATLPTNEDLKEIERRAKERIKNEIQITPEMIGDIKQKSKETLYQGNRIKTGKNTEKSLEEQNKMTDNEDLIDGELDETEIVGEEISEAAEILNKEIMNRTDSESNNDSDTGSHYEETEEQGDEEIIENDRNENGDRMQEEEEMINKIAHYRDEDIYTNMEDRKGINKIDNWMKINKYAGIANRVLPRLLPERCDISEVNRLYYATARAITDLMGGKIFEKNRSNGRKKEQKPSWEIRLERDIARLRKEISLIKEYEEGNITLESKIRQAENMIRRSRGRNRVTHAISSRKLELAAKAKRLSSYKKEEQRKRQNKMYQTDKGKFYRELRGENIKVDKPPERDRLDAFWRSIYEDQRTHNEEAEWLETTRRNPQIEEINEMEFEPLTEREVMEKIRRTSNWKTPGPDMVQNIWLKKITVLREPLTKCFNRILNGTAEIPEWMTKGETVLIPKTGETQNPGKYRPITCLPTIYKILTAIITERIYKHTIENNIIAEEQKGCSKGSHGTKDQLLINKMILEDSRQRQKNLSMTWIDYKKAYDSVPHSWIKEVLKIYKINNKIRDFMEKVMQIWKINIKLHHENGTIQINNVKIRRGIFQGDSLSPLLFVLSLNPLSSLINNLHNGYRIGSRNEKKGKNISHLFYMDDIKLYSPNKQQTIEQIEVVKKFSSDIQMEFGLDKCAFLELKKGKRIDSGNIRINDEIIRQLEQEDTYKYLGIEENEKIEHKKMKEKLKKEYEKRLKLILKSELKCKFKVEAVRTLAVPVLSYGFGIIDWFQEDLNKLDIKTRKMLHAHKLIYKNQCLARMYVPRDQGGMGLQEIDAVYREEVIGLTTYIEESDSKFIRWVKEHETGKAMRTSLTAKKRDYLRKYDIPNDDPTTEGMTKKEKMKHLRNEHRKARRKKHENNWKEHAFAKEYKNIIEQVYIDKEKSIEAVCRGNLRKEDERTIVGAQDLALRTNWFKREIEKENISNKCRMCKVSPETVSHILSSCDTLLQRKTYTERHNTICKLIHFRICEKYKIPIEASKYWEHNPNAIEENNHALILYDYSIPTDVPIRHNKPDIVVKDKRERKAYIIEIGIPWDGRVSAYETEKEVKYQTLKYSLQGMWNDIDRAEVIPVVKVWE

SEQ ID NO: 18244 - protein, 1461 aa, Trachelipus rathkii
MLTHQNIKLYEATICGGYYWKLSMAGKNKNIKCQELGRPGAGPTSFLEGDEGGRSSDEQIKLSLPGNRKNTPVRCGILTPNTPLPPDESSERPKTSPDSSKQPKIQKKRCNPYNRRGGDRLEYTVEEKKEIFWCVTYGRHKMFPKKGTTKRTRNMLEQRGEIDKIKLERIPDARFASIATNINNKKTPITHEQIKQIEEEVDQYVEKMNKVEGEGEWEWTKEKNEYLMESYYIGMLIPEKEGKTDFWKYVVDNEIIGANDVMEYEFNKKYTGVERRKLIAQKQAIINFNKERNQGAIKKRKATLPTNEDLKEIERRAKERIKNEIQITPEMIGDIKQKSKETLYQGNRIKTGKNTEKSLEEQNKMTDNEDLIDGELDETEIVGEEISEAAEILNKEIMNRTDSESNNDSDTGSHYEETEEQGDEEIIENDRNENGDRMQEEEEMINKIAHYRDEDIYTNMEDRKGINKIDNWMKINKYAGIANRVLPRLLPERCDISEVNRLYYATARAITDLMGGKIFEKNRSNGRKKEQKPSWEIRLERDIARLRKEISLIKEYEEGNITLESKIRQAENMIRRSRGRNRVTHAISSRKLELAAKAKRLSSYKKEEQRKRQNKMYQTDKGKFYRELRGENIKVDKPPERDRLDAFWRSIYEDQRTHNEEAEWLETTRRNPQIEEINEMEFEPLTEREVMEKIRRTSNWKTPGPDMVQNIWLKKITVLREPLTKCFNRILNGTAEIPEWMTKGETVLIPKTGETQNPGKYRPITCLPTIYKILTAIITERIYKHTIENNIIAEEQKGCSKGSHGTKDQLLINKMILEDSRQRQKNLSMTWIDYKKAYDSVPHSWIKEVLKIYKINNKIGDFMEKVMQIWKINIKLHHENGTIQINDVKIRRGIFQGDSLSPLLFVLSLNPLSSLINNLHNGYRIGSRNEKKGKNISHLFYMDDIKLYSPNKQQTIEQIEVVKKFSSDIQMEFGLDKCAFLELKKGKRIDSGNIRINDEIIRQLEQEDTYKYLGIEENEKIEHKKMKEKLKKEYEKRLKLILKSELKCKFKIEAVRTLAVPVLSYGFGIIDWFQEDLNKLDIKTRKMLHAHKLIYKNQCLARMYVPRDQGGMGLQEIDAVYREEVIGLTTYIEESDSKFIRWVKEHETGKAMRTSLTAKKRDYLRKYDIPNDDPTTEGMTKKEKMKHLRNEHRKARRKKHENNWKEHAFAKEYKNIIEQVYIDKEKSIEAVCRGNLRKEDERTIVGAQDLALRTNWFKREIEKENISNKCRMCKVSPETVSHILSSCDTLLQRKTYTERHNTICKLIHFRICEKYKIPIEASKYWEHNPNAIEENNHALILYDYSIPTDVPVRHNKPDIVVKDKRERKAYIIEIGIPWDGRVSAYETEKEVKYQTLKYSLQGMWNDIDRAEVIPVVIGSMGVIKKSLNQYIERLPVEVTTLEMSSIIIRQSARILRMVLGC

SEQ ID NO: 18245 - protein, 846 aa, Trachelipus rathkii
MYQTDKGKFYRELRGENIKVDKPPERDKLDAFWRSIYEDQRTHNEEAEWIETTRRNPQIEEINEMEFQPLTEREVMEMIRRTSNWKTPGPDMVQNIWLKKITVLREPLTKCFNRILNGTAEIPEWMTKGETVLIPKTGETQNPGKYRPITCLPTIYKILTAILTERIYKHTIENNIIAEEQKGCSKGSHGTKDQLLINKMILEDSRQRQKNLSMTWIDYKKAYDSVPHSWIKEVLKIYKINNKIREFMEKVMQIWKINIKLHHENGTIQINDVKIRRGIFQGDSLSPLLFVLSLNPLSSLINNLHNGYRIGSRNEKKGKNISHLFYMDDIKLYSPNKQQTIEQIEVVKKFSSDIQMEFGLDKCAFLELKKGKRSDSGNIRIEDQIIRQLEQEDTYKYLGIEENEKIEHKKMKEKLMKEYEKRLKLILKSELKCKFKIEAVRTLAVPVLSYGFGIIDWFQEDLNKLDIKTRKMLHAHKLTYKNQCLARMYVPRDQGGMGLQEIDAIYREEVIGLTTYIEESDSKFIRWVKEHETGKAMRTSLTAKKRDYLRKYDIPNDDPTTEGMTKKEKMKHLRNEHRKARRKKHENNWKEHAFAKEYKNIIEQVYIDKEKSIEAVCRGNLRKEDERTIVGAQDLALRTNWFKREIEKENISNKCRMCKVSPETVSHILSSCDTLLGRKHYTERHNTICKLIHFRICEKYKITIEASKYWEHNPNAIEENNHALILYDYSIPTDVPIRHNKPDIVVKDKRERKAYIIEIGIPWDGRVSAYETEKEVKYQTLKYSLQGMWNDIDRAEVIPVVIGSMGVIKKSLNQYIERLPVEVTTLEMSSIIIRQSARILRMVLGC

SEQ ID NO: 18246 - protein, 1438 aa, Trachelipus rathkii
MAGKNKNIKCQELGRPGAGPTPFLEGDEGGRSSDEQIKLSLPGNRKNTPVRCGTITPNSPLPPDESSERPKASPDSSKQPKIQKKRCNPYNRRGGERLEYTVEEKKEIFWCVTYGRHKVFPKKGTTKRTRNMLEQRGEIDKIKLERIPDARFASIATNINNKKTPITHEQIKQIEEEVDQYVGKMNKMEGEGEWEWTKEKNEYLMESYYIGMLIPEKEGKTDFWKYVVDNEIIGANDVMEYEFNKKYTGVERRKLIAQKQAIINFNKERNQGAIKKRKATLPTNEDLKEIERRAKERIKNEIQITPEMIGDIKQKNKETLYQGNRIKTGKNTEKSLEEQNKMTDNEDLIDGELDETEIVGEEISEAAEILNKEIMNRTDSESNNDSDTGSHYEETEEQGDEEIIENDRNENGDRMQEEEEMINKIAHYRDEDIYTNMEDRKGINKIDNWMKINKYAGIANRVLPRLLPERCDISEVNRLYYATARAITDLMGGKIFEKNRSNGRKKEQKPSWEIRLERDIARLRKEISLIKEYEEGNITIESKIRQAQNMIRRSRGRNRVTHAISSRKLELAAKAKKLSSYKKEEQRKRQNKMYQTDKGKFYRELRGENIKVDKPPERDRLDAFWRSIYEDQRTHNEEAEWLETTRRNPQIEEINEMEFEPLTEREVMEMIRRTSNWKTPGPDMVQNIWLKKITVLREPLTKCFNRILNGTAEIPEWMTKGETVLIPKTGETQNPGKYRPITCLPTIYKILTAIITERIYKHTIENNIIAEEQKGCSKGSHGTKDQLLINKMILEDSRQRQKNLSMTWIDYKKAYDSVPHSWIKEVLKIYKINNKIRDFMEKVMQIWKINIKLHHENGTIQINDVKIRRGIFQGDSLSPLLFVLSLNPLSSLINNLHNGYRIGSRNEKKGKNISHLFYMDDIKLYSPNKQQTIEQIEVVKKFSSDIQMEFGLDKCAFLELKKGKRIDSGNIRINDEIIRQLEQEDTYKYLGIEENEKIEHKKMKEKLKKEYEKRLKLILKSELKCKFKVEAVRTLAVPVLSYGFGIIDWFQEDLNKLDIKTRKMLHAHKLIYKNQCLARMYVPRDQGGMGLQEIDAVYREEVIGLTTYIEESDSKFIRWVKEHETGKAMRTSLTAKKRDYLRKYDIPNDDPTTEGMTKKEKMKHLRNEHRKARRKKHENNWKEHAFAKEYKNIIEQVYIDKEKSIEAVCRGNLRKEDERTIVGAQDLALRTNWFKREIEKENISNKCRMCKVSPETVSHILSSCDTLLGRKHYTERHNTICKLIHFRICEKYKIPIEASKYWEHNPNAIEENNHALILYDYSIPTDVPIRHNKPDIVVKDKRERKAYIIEIGIPWDGRVSAYETEKEVKYQTLKYSLQGMWNDIDRAEVIPVVIGSMGVIKKSLNQYIERLPVEVTTLEMSSIIIRQSARILRMVLGC

SEQ ID NO: 18247 - protein, 1002 aa, Trachelipus rathkii
MEDRKGINKIDNWMKINKYAGIANRVLPRLLPERCDISEVNRLYYATARAITDLMGGKIFEKNRSNGRKKEQKPSWEIRLERDIARLRKEISLIKEYEEGNITLESKIRQAENMIRRSRGRNRVTHAISSRKLELAAKAKRLSSYKKEEQRKRQNKMYQTDKGKFYRELRGENIKVDKPPERDRLDAFWRSIYEDQRTHNEEAEWLETTRRNPQIEEINEMEFEPLTEREVMEKIRRTSNWKTPGPDMVQNIWLKKITVLREPLTKCFNRILNGTAEIPEWMTKGETVLIPKTGETQNPGKYRPITCLPTIYKILTAIITERIYKHTIENNIIAEEQKGCSKGSHGTKDQLLINKMILEDSRQRQKNLSMTWIDYKKAYDSVPHSWIKEVLKIYKINNKIRDFMEKVMQIWKINIKLHHENGTIQINDVKIRRGIFQGDSLSPLLFVLSLNPLSSLINNLHNGYRIGSRNEKKGKNISHLFYMDDIKLYSPNKQQTIEQIEVVKKFSSDIQMEFGLDKCAFLELKKGKRIDSGNIRINDEIIRQLEQEDTYKYLGIEENEKIEHKKMKEKLKKEYEKRLKLILKSELKCKFKVEAVRTLAVPVLSYGFGIIDWFQEDLNKLDIKTRKMLHAHKLIYKNQCLARMYVPRDQGGMGLQEIDAVYREEVIGLTTYIEESDSKFIRWVKEHETGKAMRTSLTAKKRDYLRKYDIPNDDPTTEGMTKKEKMKHLRNEHRKARRKKHENNWKEHAFAKEYKNIIEQVYIDKEKSIEAVCRGNLRKEDERTIVGAQDLALRTNWFKREIEKENISNKCRMCKVSPETVSHILSSCDTLLQRKTYTERHNTICKLIHFRICEKYKIPIEASKYWEHNPNAIEENNHALILYDYSIPTDVPIRHNKPDIVVKDKRERKAYIIEIGIPWDGRVSAYETEKEVKYQTLKYSLQGMWNDIDRAEVIPVVIGSMGVIKKSLNQYIERLPVEVTTLEMSSIIIRQSARILRMVLGC

SEQ ID NO: 18248 - protein, 1536 aa, Trachelipus rathkii
MRDKYLPSRSGRKKKKKKKILKLFKCSECSYECNQKGSLKTHLLTHSNSPPENCLRCRRGGAQGDTVRRKIYRPRCVFLRKGSRHEATICGGYYWKLSMAGKNKNIKCQELGRPGAGPTSFLEGDEGGRSSDEQIKLSLPGNRKNTPVRCGILTPNTPLPPDESSERPKTSPDSSKQPKIQKKRCNPYNRRGGDRLEYTVEEKKEIFWCVTYGRHKMFPKKGTTKRTRNMLEQRGEIDKIKLERIPDARFASIATNINNKKTPITHEQIKQIEEEVDQYVEKMNKVEEEGEWEWTKEKNEYLMESYYIGMLIPEKEGKTDFWKYVVDNEIIGANDIMEYEFNKKYTGVERRKLIAQKQAIINFNKERNQGAIKKRKATLPTNEDLKEIERRAKERIKNEIQITPEMIGDIKQKSKETLYQGNRMKTGKNTEKSLEEQNKMTDNEELIDGELDETEIVGEEISEAAEILNKEIMNRTDSESNNDSDTGSHYEETEEQGDEEIIENDRSENGDRMQEEEEMISKIAHYRDEDIYTNMEDRKGINKIDNWMKINKYAGIANRVLPRLLPERCDISEVNRLYYATARAITDLMGGKIFEKNRSNGRKKEQKPSWEIRLERDIARLRKEISLIKEYEEGNITIESKIRQAQNMIRRSRGRNRVTHAISSRKLELAAKAKRLSSYKKEEQRKRQNKMYQTDKGKFYRELRGENIKVDKPPERDRLDAFWRSIYEDQRTHNEEAEWIETTRRNPQIEEINEMEFEPLTEREVMEKIRRTSNWKTPGPDMVQNIWLKKITVLREPLTKCFNRILNGTAEIPEWMTKGETVLIPKTGETQNPGKYRPITCLPTIYKILTAIITERIYKHTIENNIIAEEQKGCSKGSHGTKDQLLINKMILEDSRQRQKNLSMTWIDYKKAYDSVPHSWIKEVLKIYKINNKIRDFMEKVMQIWKINIKLHHENGTIQINDVKIRRGIFQGDSLSPLLFVLSLNPLSSLINNLHNGYRIGSRNEKKGKNISHLFYMDDIKLYSPNKQQTIEQIEVVKKFSSDIQMEFGLDKCAFLELKKGKRIDSGNIRINDEIIRQLEQEDTYKYLGIEENEKIEHKKMKEKLKKEYEKRLKLILKSELKCKFKVEAVRTLAVPVLSYGFGIIDWFQEDLNKLDIKTRKMLHAHKLIYKNQCLARMYVPRDQGGMGLQEIDAVYREEVIGLTTYIEESDSKFIRWVKEHETGKAMRTSLTAKKRDYLRKYDIPNDDPTTEGMTKKEKMKHLRNEHRKARRKKHENNWKEHAFAKEYKNIIEQVYIDKEKSIEAVCRGNLRKEDERTIVGAQDLALRTNWFKREIEKENISNKCRMCKVSPETVSHILSSCDTLLQRKTYTERHNTICKLIHFRICEKYKIPIEASKYWEHNPNAIEENNHALILYDYSIPTDVPIRHNKPDIVVKDKRERKAYIIEIGIPWDGRVSAYETEKEVKYQTLKYSLQGMWNDIDRAEVIPVVIGSMGVIKKSLNQYIERLPVEVTTLEMSSIIIRQSARILRMVLGC

SEQ ID NO: 18249 - protein, 989 aa, Trachelipus rathkii
MKINKYAGIANRVLPRLIPERCDISEVNRLYYATARAITDLMGGKIFEKNRSNGRKKEQKPSWEIRLERDIARLRKEISLIKEYEEGNITLESKIRQAENMIRRSRGRNRVTHAISSRKLELAAKAKRLSSYKKEEQRKRQNKMYQTDKGKFYRELRGENIKVDKPPERDRLDAFWRSIYEDQRTHNEEAEWLETTRRNPQIEEINEMEFEPLTEREVMEKIRRTSNWKTPGPDMVQNIWLKKITVLREPLTKCFNRILNGTAEIPEWMTKGETVLIPKTGETQNPGKYRPITCLPTIYKILTAIITERIYKHTIENNIIAEEQKGCSKGSHGTKDQLLINKMILEDSRQRQKNLSMTWIDYKKAYDSVPHSWIKEVLKIYKINNKIRDFMEKVMQIWKINIKLHHENGTIQINDVKIRRGIFQGDSLSPLLFVLSLNPLSSLINNLHNGYRIGSRNEKKGKNISHLFYMDDIKLYSPNKQQTIEQIEVVKKFSSDIQMEFGLDKCAFLELKKGKRIDSGNIRINDEIIRQLEQEDTYKYLGIEENEKIEHKKMKEKLKKEYEKRLKLILKSELKCKFKVEAVRTLAVPVLSYGFGIIDWFQEDLNKLDIKTRKMLHAHKLIYKNQCLARMYVPRDQGGMGLQEIDAVYREEVIGLTTYIEESDSKFIRWVKEHETGKAMRTSLTAKKRDYLRKYDIPNDDPTTEGMTKKEKMKHLRNEHRKARRKKHENNWKEHAFAKEYKNIIEQVYIDKEKSIEAVCRGNLRKEDERTIVGAQDLALRTNWFKREIEKENISNKCRMCKVSPETVSHILSSCDTLLQRKTYTERHNTICKLIHFRICEKYKIPIEASKYWEHNPNAIEENNHALILYDYSIPTDVPVRHNKPDIVVKDKRERKAYIIEIGIPWDGRVSAYETEKEVKYQTLKYSLQGMWNDIDRAEVIPVVIGSMGVIKKSLNQYIERLPVEVTTLEMSSIIIRQSARILRMVLGC

SEQ ID NO: 18250 - protein, 1438 aa, Trachelipus rathkii
MAGKNKNIKCQELGRPGAGPTPFLERDEGGRSSDEQIKLSLPGNRKNTPVRCGIITPNTPLPPDESSERSKTSPDSSKQPKIQKKRCNPYNRRGGDRLEYTVEEKKEIFWCVTYGRHKMFPKKGTTKRTRNMLEQRGEIDKIKLERIPDARFASIATNINNKKTPITHEQIKQIEEEVDQYVGKMNKVEEEGEWEWTREKNEYLMESYYIGMLIPEEEGKTDFWKYVVDNEIIGANDVMEYEFNKKYTGVERRKLIAQKQAILNFNKERNQGAIKKRKATLPTNEDLKEIERRAKERIKNEIQITPEMIGDIKQKSKETLYQGNRIKTGKNTEKSLEEQNKMTDNEELIDGELDETEIVGEEISEAAEILNKEIMNRTDSESNNDSDTGSHYEETEEQGDEEIIENDRNENGDRMQEEEEMINKIAHYRDEDIYTNMEDRKGINKIDNWMKINKYAGIANRVLPRLLPERCDISEVNRLYYATARAITDLMGGKIFEKNRSNGRKKEQKPSWEIRLERDIARLRKEISLIKEYEEGNITIESKIRQAQNMIRRSRGRNRVTHAISSRKLELAAKAKRLSSYKKEEQRKRQNKMYQTDKGKFYRELRGENIKVDKPPERDRLDAFWRSIYEDQRTHNEEAEWIETTRRNPQIEEINEMEFEPLTEREVMEMIRRTSNWKTPGPDMVQNIWLKKITVLREPLTKCFNRILNGTAEIPEWMTKGETVLIPKTGETQNPGKYRPITCLPTIYKILTAIITERIYKHTIENNIIAEEQKGCSKGSHGTKDQLLINKMILEDSRQRQKNLSMTWIDYKKAYDSVPHSWIKEVLKIYKINNKIREFMEKVMQIWKINIKLHHENGTIQINDVKIRRGIFQGDSLSPLLFVLSLNPLSSLINNLHNGYRIGSRNEKKGKNISHLFYMDDIKLYSPNKQQTIEQIEVVKKFSSDIQMEFGLDKCAFLELKKGKRIDSGNIRIEDEIIRQLEQEDTYKYLGIEENEKIEHKKMKEKLMKEYEKRLKLILKSELKCKFKVEAIRTLAVPVLSYGFGIIDWFQEDLNKLDIKTRKMLHAHKLTYKNQCLARMYVPRDQGGMGLQEIDAIYREEVIGLTTYIEESDSKFIRWVKEHETGKAMRTSLTAKKRDYLRKYDIPNDDPTTEGMTKKEKMKHLRNEHRKARRKKHENNWKEHAFAKEYKNIIEQVYIDKEKSIEAVCRGNLRKEDERTIVGAQDLALRTNWFKREIEKENISNKCRMCKVSPETVSHILSSCDTLLQRKQYTERHNTICKLIHFRICEKYKITIEASKYWEHNPNAIEENNHALILYDYSIPTDVPIRHNKPDIVVKDKRERKAYIIEIGIPWDGRVSAYEREKEVKYQTLKYSLQGMWNDIDRAEVIPVVIGSMGVIKKSLQQYIDRLPVEVTTLEMSSIIIRQSARILRMVLGC

SEQ ID NO: 18251 - protein, 1255 aa, Trachelipus rathkii
MFPKKGTTKRTRNMLEQRGEIDKIKLERIPDARFASIATNINNKKTPITHEQIKQIEEEVDQYVGKMNKMEEEGEWEWTKEKNEYLMESYYIGILIPEEEGKTDFWKYVVDNEIIGANDIMEYEFNKKYTGVERRKLIAQKQAIINFNKERNQGAIKKRKATLPTNEDLKEIERRAKERIKNEIQITPEMIRDIKQKSKETLYQGNRIKTGKNTEKRLEEQNKMTDNEELIDEELDETEIVGEEISEAAEILNKEIMNRTDSESNNDSDTGSHYEETEEQGDEEIIENDRNENGDRMQEEEEMINKIAHYRDEDIYTNMEDRKGINKIDNWMKINKYAGIANRVLPRLLPERCDISEVNRLYYATARAITDLMGGKIFEKNRSNGRKKEQKPSWEIRLERDIARLRKEISLIKEYEEGNITIESKIRQAQNMIRRSRGRNRVTHAISSRKLELAAKAKRLSSYKKEEQRKRQNKMYQTDKGKFYRELRGENIKVDKPPERDRLDAFWRSIYEDQRTHNEEAEWIETTRRNPQIEEINEMEFEPLTEREVMEMIRRTSNWKTPGPDMVQNIWLKKITVLREPLTKCFNRILNGTAEIPEWMTKGETVLIPKTGETQNPGKYRPITCLPTIYKILTAIITERIYKHTIENNIIAEEQKGCSKGSHGTKDQLLINKMILEDSRQRQKNLSMTWIDYKKAYDSVPHSWIKEVLKIYKINNKIREFMEKVMQIWKINIKLHHENGTIQINDVKIRRGIFQGDSLSPLLFVLSLNPLSSLINNLHNGYRIGSRNEKKGKNISHLFYMDDIKLYSPNKQQTIEQIEVVKKFSSDIQMEFGLDKCAFLELKKGKRIDSGNIRIEDQIIRQLEQEDTYKYLGIEENEKIEHKKMKEKLMKEYEKRLKLILKSELKCKFKIEAVRTLAVPVLSYGFGIIDWFQEDLNKLDIKTRKMLHAHKLTYKNQCLARMYVPRDQGGMGLQEIDAIYREEVIGLTTYIEESDSKFIRWVKEHETGKAMRTSLTAKKRDYLRKYDIPNDDPTTEGMTKKEKMKHLRNEHRKARRKKHENNWKEHAFAKEYKNIIEQVYIDKEKSIEAVCRGNLRKEDERTIVGAQDLALRTNWFKREIEKENISNKCRMCKVSPETVSHILSSCDTLLQRKTYTERHNTICKLIHFRICEKYKIPIEASKYWEHNPNAIEENNHALILYDYSIPTDVPIAHNRPDIVVKDKRERKAYIIEIGIPWDGTEYQHMKGKRKLSTKD

SEQ ID NO: 18252 - protein, 1196 aa, Trachelipus rathkii
MEYEFNKKYTGVERRKLIAQKQAIINFNKERNQGAIKKRKATLPTNEDLKEIERRAKERIKNEIQITPEMIGDIKQKSKETLYQGNRIKTGKNTEKSLEEQNKMTDNEDLIDGELDETEIVGEEISEAAEILNKEIMNRTDSESNNDSDTGSHYEETEEQGDEEIIENDRNENGDRMQEEEEMINKIAHYRDEDIYTNMEDRKGINKIDNWMKINKYAGIANRVLPRLLPERCDISEVNRLYYATARAITDLMGGKIFEKNRSNGRKKEQKPSWEIRLERDIARLRKEISLIKEYEEGNITMESKIRQAQNMIRRSRGRNRVTHAISSRKLELAAKAKRLSSYKKEEQRKRQNKMYQTDKGKFYRELRGENIKVDKPPERDRLDAFWRSIYEDQRTHNEEAEWLETTRRNPQIEEINEMEFEPLTEREVMEMIRRTSNWKTPGPDMVQNIWLKKITVLREPLTKCFNRILNGTAEIPEWMTKGETVLIPKTGETQNPGKYRPITCLPTIYKILTAIITERIYKHTIENNIIAEEQKGCSKGSHGTKDQLLINKMILEDSRQRQKNLSMTWIDYKKAYDSVPHSWIKEVLKIYKINNKIRDFMEKVMQIWKINIKLHHENGTIQINDVKIRRGIFQGDSLSPLLFVLSLNPLSSLINNLHNGYRIGSRNEKKGKNISHLFYMDDIKLYSPNKQQTIEQIEVVKKFSSDIQMEFGLDKCAFLELKKGKRIDSGNIRINDEIIRQLEQEDTYKYLGIEENEKIEHKKMKEKLKKEYEKRLKLILKSELKCKFKVEAVRTLAVPVLSYGFGIIDWFQEDLNKLDIKTRKMLHAHKLIYKNQCLARMYVPRDQGGMGLQEIDAVYREEVIGLTTYIEESDSKFIRWVKEHETGKAMRTSLTAKKRDYLRKYDIPNDDPTTEGMTKKEKMKHLRNEHRKARRKKHENNWKEHAFAKEYKNIIEQVYIDKEKSIEAVCRGNLRKEDERTIVGAQDLALRTNWFKREIEKENISNKCRMCKVSPETVSHILSSCDTLLQRKQYTERHNTICKLIHFRICEKYKIPIEASKYWEHNPNAIEENNHALILYDYSIPTDVPVRHNKPDIVVKDKRERKAYIIEIGIPWDGRVSAYETEKEVKYQTLKYSLQGMWNDIDRAEVIPVVIGSMGVIKKSFIQYIWKGLRWEVTNVWDMSSIINTTERQEY

SEQ ID NO: 18253 - protein, 1608 aa, Trachelipus rathkii
MVTLKKGEKKKKKKNSKLFKCSECSYECNHKVSLKLHLLAHSNLKLFKCSECSYECNQKGHLKIHLLTHNNFKLFKCSECSYECNRKYHLKRHLLIHRKFKCSECNYECNRKGDLKIHLLTPPENCLRCRRGGAQGDTVRRNIYRPRCVFLRKGSRHEATICGGYYWKLSMAGKNKNIKCQELGRPGAGPTPFLEGDEGGRSSDEQIKLSLPGNRKNTPVRCGILTPNTPLPPDESSERPKTSPDSSKQPKIQKKRCNPYNRRGGDRLEYTVEEKKEIFWCVTYGRHKMFPKKGTTKRTRNMLEQRGEIDKIKLERIPDARFASIATNINNKKTPITHEQIKQIEEEVDQYVGKMNKMEGEGEWEWTKEKNEYLMESYYIGMLIPEKEGKTDFWKYVVDNEIIGANDVMEYEFNKKYTGVERRKLIAQKQAIINFNKERNQGAIKKRKATLPTNEDLKEIERRAKERIKNEIQITPEMIGDIKQKSKETLYQGNRIKTGKNTEKSLEEQNKMTDNEDLIDGELDETEIVGEEISEAAEILNKEIMNRTDSESNNDSDTGSHYEETEEQGDEEIIENDRNENGDRMQEEEEMINKIAHYRDEDIYTNMEDRKGINKIDNWMKINKYAGIANRVLPRLLPERCDISEVNRLYYATARAITDLMGGKIFEKNRSNGRKKEQKPSWEIRLERDIARLRKEISLIKEYEEGNITLESKIRQAENMIRRSRGRNRVTHAISSRKLELAAKAKRLSSYKKEEQRKRQNKMYQTDKGKFYRELRGENIKVDKPPERDRLDAFWRSIYEDQRTHNEEAEWLETTRRNPQIEEINEMEFEPLTEREVMEKIRRTSNWKTPGPDMVQNIWLKKITVLREPLTKCFNRILNGTAEIPEWMTKGETVLIPKTGETQNPGKYRPITCLPTIYKILTAIITERIYKHTIENNIIAEEQKGCSKGSHGTKDQLLINKMILEDSRQRQKNLSMTWIDYKKAYDSVPHSWIKEVLKIYKINNKIRDFMEKVMQIWKINIKLHHENGTIQINDVKIRRGIFQGDSLSPLLFVLSLNPLSSLINNLHNGYRIGSRNEKKGKNISHLFYMDDIKLYSPNKQQTIEQIEVVKKFSSDIQMEFGLDKCAFLELKKGKRIDSGNIRINDEIIRQLEQEDTYKYLGIEENEKIEHKKMKEKLKKEYEKRLKLILKSELKCKFKVEAVRTLAVPVLSYGFGIIDWFQEDLNKLDIKTRKMLHAHKLIYKNQCLARMYVPRDQGGMGLQEIDAVYREEVIGLTTYIEESDSKFIRWVKEHETGKAMRTSLTAKKRDYLRKYDIPNDDPTTEGMTKKEKMKHLRNEHRKARRKKHENNWKEHAFAKEYKNIIEQVYIDKEKSIEAVCRGNLRKEDERTIVGAQDLALRTNWFKREIEKENISNKCRMCKVSPETVSHILSSCDTLLQRKTYTERHNTICKLIHFRICEKYKIPIEASKYWEHNPNAIEENNHALILYDYSIPTDVPIRHNKPDIVVKDKRERKAYIIEIGIPWDGRVSAYETEKEVKYQTLKYSLQGMWNDIDRAEVIPVVIGSMGVIKKSLNQYIERLPVEVTTLEMSSIIIRQSARILRMVLGC

SEQ ID NO: 18254 - protein, 1002 aa, Trachelipus rathkii
MEDRKGINKIDNWMKINKYAGIANRVLPRLLPERCDISEVNRLYYATARAITDLMGGKIFEKNRSNGRKKEQKPSWEIRLERDIARLRKEISLIKEYEEGNITMESKIRQAQNMIRRSRGRNRVTHAISSRKLELAAKAKRLSSYKKEEQRKRQNKMYQTDKGKFYRELRGENIKVDKPPERDRLDAFWRSIYEDQRTHNEEAEWIETTRRNPQIEEINEMEFEPLTEREVMEMIRRTSNWKTPGPDMVQNIWLKKITVLREPLTKCFNRILNGTAEIPEWMTKGETVLIPKTGETQNPGKYRPITCLPTIYKILTAIITERIYKHTIENNIIAEEQKGCSKGSHGTKDQLLINKMILEDSRQRQKNLSMTWIDYKKAYDSVPHSWIKEVLKIYKINNKIREFMEKVMQIWKINIKLHHENGTIQINDVKIRRGIFQGDSLSPLLFVLSLNPLSSLINNLHNGYRIGSRNEKKGKNISHLFYMDDIKLYSPNKQQTIEQIEVVKKFSSDIQMEFGLDKCAFLELKKGKRIDSGNIRIEDQIIRQLEQEDTYKYLGIEENEKIEHKKMKEKLMKEYEKRLKLILKSELKCKFKIEAVRTLAVPVLSYGFGIIDWFQEDLNKLDIKTRKMLHAHKLTYKNQCLARMYVPRDQGGMGLQEIDAIYREEVIGLTTYIEESDSKFIRWVKEHETGKAMRTSLTAKKRDYLRKYDIPNDDPTTEGMTKKEKMKHLRNEHRKARRKKHENNWKEHAFAKEYKNIIEQVYIDKEKSIEAVCRGNLRKEDERTIVGAQDLALRTNWFKREIEKENISNKCRMCKVSPETVSHILSSCDTLLQRKTYTERHNTICKLIHFRICEKYKIPIEASKYWEHNPNAIEENNHALILYDYSIPTDVPITHNKPDIVVKDKRERKAYIIEIGIPWDGRVSAYERQKEMKYERLKYSLQGMWNDIDRAEVIPVIIGSMGVIKKSLKQYIERLPVEVTTLEMSSIIIRQSARILRMVLGC

SEQ ID NO: 18255 - protein, 1200 aa, Trachelipus rathkii
MEYEFNKKYTGVERRKLIAQKQAIINFNKERNQGAIKKRKATLPTNEDLKEIERRAKERIKNEIQITPEMIGDIKQKSKETLYQGNRIKTGKNTEKSLEEQNKMTDNEDLIDGELDETEIVGEEISEAAEILNKEIMNRTDSESNNDSDTGSHYEETEEQGDEEIIENDRNENGDRMQEEEEMINKIAHYRDEDIYTNMEDRKGINKIDNWMKINKYAGIANRVLPRLLPERCDISEVNRLYYATARAITDLMGGKIFEKNRSNGRKKEQKPSWEIRLERDIARLRKEISLIKEYEEGNITLESKIRQAENMIRRSRGRNRVTHAISSRKLELAAKAKRLSSYKKEEQRKRQNKMYQTDKGKFYRELRGENIKVDKPPERDRLDAFWRSIYEDQRTHNEEAEWLETTRRNPQIEEINEMEFEPLTEREVMEKIRRTSNWKTPGPDMVQNIWLKKITVLREPLTKCFNRILNGTAEIPEWMTKGETVLIPKTGETQNPGKYRPITCLPTIYKILTAIITERIYKHTIENNIIAEEQKGCSKGSHGTKDQLLINKMILEDSRQRQKNLSMTWIDYKKAYDSVPHSWIKEVLKIYKINNKIRDFMEKVMQIWKINIKLHHENGTIQINDVKIRRGIFQGDSLSPLLFVLSLNPLSSLINNLHNGYRIGSRNEKKGKNISHLFYMDDIKLYSPNKQQTIEQIEVVKKFSSDIQMEFGLDKCAFLELKKGKRIDSGNIRINDEIIRQLEQEDTYKYLGIEENEKIEHKKMKEKLKKEYEKRLKLILKSELKCKFKVEAVRTLAVPVLSYGFGIIDWFQEDLNKLDIKTRKMLHAHKLIYKNQCLARMYVPRDQGGMGLQEIDAVYREEVIGLTTYIEESDSKFIRWVKEHETGKAMRTSLTAKKRDYLRKYDIPNDDPTTEGMTKKEKMKHLRNEHRKARRKKHENNWKEHAFAKEYKNIIEQVYIDKEKSIEAVCRGNLRKEDERTIVGAQDLALRTNWFKREIEKENISNKCRMCKVSPETVSHILSSCDTLLQRKTYTERHNTICKLIHFRICEKYKIPIEASKYWEHNPNAIEENNHALILYDYSIPTDVPIRHNKPDIVVKDKRERKAYIIEIGIPWDGRVSAYETEKEVKYQTLKYSLQGMWNDIDRAEVIPVVIGSMGVIKKSLNQYIERLPVEVTTLEMSSIIIRQSARILRMVLGC

SEQ ID NO: 18256 - protein, 1262 aa, Trachelipus rathkii
MFPKKGTTKRTRNMLEQRGEIDKIKLERIPDARFASIATNINNKKTPITHEQIKQIEEEVDQYVEKMNKVEGEGEWEWTKEKNEYLMESYYIGMLIPEKEGKTDFWKYVVDNEIIGANDVMEYEFNKKYTGVERRKLIAQKQAIINFNKERNQGAIKKRKATLPTNEDLKEIERRAKERIKNEIQITPEMIGDIKQKSKETLYQGNRIKTGKNTEKSLEEQNKMTDNEDLIDGELDETEMVREEISEAAEILNKEIMNRTDSESNNDSDTGSHYEETEEQGDEEIIENDRNENGDRMQEEEEMINKIAHYRDEDIYTNMEDRKGINKIDNWMKINKYAGIANRVLPRLLPERCDISEVNRLYYATARAITDLMGGKIFEKNRSNGRKKEQKPSWEIRLERDIARLRKEISLIKEYEEGNITMESKIRQAQNMIRRSRGRNRVTHAISSRKLELAAKAKRLSSYKKEEQRKRQNKMYQTDKGKFYRELRGENIKVDKPPERDRLDAFWRSIYEDQRTHNEEAEWIETTRRNPQIEEINEMEFEPLTEREVMEMIRRTSNWKTPGPDMVQNIWLKKITVLREPLTKCFNRILNGTAEIPEWMTKGETVLIPKTGETQNPGKYRPITCLPTIYKILTAIITERIYKHTIENNIIAEEQKGCSKGSHGTKDQLLINKMILEDSRQRQKNLSMTWIDYKKAYDSVPHSWIKEVLKIYKINNKIREFMEKVMQIWKINIKLHHENGTIQINDVKIRRGIFQGDSLSPLLFVLSLNPLSSLINNLHNGYRIGSRNEKKGKNISHLFYMDDIKLYSPNKQQTIEQIEVVKKFSSDIQMEFGLDKCAFLELKKGKRIDSGNIRINDEIIRQLEQEDTYKYLGIEENEKIEHKKMKEKLKKEYEKRLKLILKSELKCKFKVEAVRTLAVPVLSYGFGIIDWFQEDLNKLDIKTRKMLHAHKLIYKNQCLARMYVPRDQGGMGLQEIDAVYREEVIGLTTYIEESDSKFIRWVKEHETGKAMRTSLTAKKRDYLRKYDIPNDDPTTEGMTKKEKMKHLRNEHRKARRKKHENNWKEHAFAKEYKNIIEQVYIDKEKSIEAVCRGNLRKEDERTIVGAQDLALRTNWFKREIEKENISNKCRMCKVSPETVSHILSSCDTLLQRKTYTERHNAICKLIHFRICEKYKIPIEASKYWEHNPNAIEENNHALILYDYSIPTDVPVRHNKPDIVVKDKRERKAYIIEIGIPWDGRVSAYETEKEVPNSEILITRNVE

SEQ ID NO: 18257 - protein, 907 aa, Trachelipus rathkii
MGGKIFEKNRSNGRKKEQKPSWEIRLERDIARLRKEISLIKEYEEGNITMESKIRQAQNMIRRSRGRNRVTHAISSRKLELAAKAKRLSSYKKEEQRKRQNKMYQTDKGKFYRELRGENIKVDKPPERDRLDAFWRSIYEDQRTHNEEAEWIETTRRNPQIEEINEMEFEPLTEREVMEMIRRTSNWKTPGPDMVQNIWLKKITVLREPLTKCFNRILNGTAEIPEWMTKGETVLIPKTGETQNPGKYRPITCLPTIYKILTAIITERIYKHTIENNIIAEEQKGCSKGSHGTKDQLLINKMILEDSRQRQKNLSMTWIDYKKAYDSVPHSWIKEVLKIYKINNKIREFMEKVMQIWKINIKLHHENGTIQINDVKIRRGIFQGDSLSPLLFVLSLNPLSSLINNLHNGYRIGSRNEKKGKNISHLFYMDDIKLYSPNKQQTIEQIEVVKKFSSDIQMEFGLDKCAFLELKKGKRIDSGNIRIEDQIIRQLEQEDTYKYLGIEENEKIEHKKMKEKLMKEYEKRLKLILKSELKCKFKIEAVRTLAVPVLSYGFGIIDWFQEDLNKLDIKTRKMLHAHKLTYKNQCLARMYVPRDQGGMGLQEIDAIYREEVIGLTTYIEESDSKFIRWVKEHETGKAMRTSLTAKKRDYLRKYDIPNDDPTTEGMTKKEKMKHLRNEHRKARRKKHENNWKEHAFAKEYKNIIEQVYIDKEKSIEAVCRGNLRKEDERTIVGAQDLALRTNWFKREIEKENISNKCRMCKVSPETVSHILSSCDTLLQRKTYTERHNTICKLIHFRICEKYKIPIEASKYWEHNPNAIEENNHALILYDYSIPTDVPITHNKPDIVVKDKRERKAYIIEIGIPWDGRVSAYEREKEMKYERLKYSLQGMWNDIDRAEVIPVIIGAW

SEQ ID NO: 18258 - protein, 1412 aa, Trachelipus rathkii
MRGDGALMSKSNYPSPEMEKIHQTRCGFITPNTPLPPDESSERPKTSPDSSKQPKIQKKRCNPYNRRGGDRLEYTVEEKKEIFWCVTYGRHKMFPKKGTTKRTRNMLEQRGEIDKIKLERIPDARFASIATNINNKKTPITHEQIKQIEEEVDQYVGKMNKMEEEGEWEWTKEKNEYLMESYYIGILIPEEEGKTDFWKYVVDNEIIGANDVMEYEFNKKYTGVERRKLIAQKQAILNFNKERNQGAIKKRKATLPTNEDLKEIERRAKERIKNEIQITPEMIGDIKQKSKETLYQGNRMKTGKNTEKSLEEQNKMTDNEEIIDGELDETEIVGEEISEAAEILNKEIMNRTDSESNNDSDTGSHYEETEEQGDEEIIENDRNENGDRMQEEEEMISKIAHYRDEDINTNMEDRKGINKIDNWMKINKYAGIANRVLPRLLPERCDISEVNRLYYATARAITDLMGGKIFEKNRSNGRKKEQKPSWEIRLERDIARLRKEISLIKEYEEGNITMESKIRQAQNMIRRSRGRNRVTHAISSRKLELAAKAKRLSSYKKEEQRKRQNKMYQTDKGKFYRELRGENIKVDKPPERDRLDAFWRSIYEDQRTHNEEAEWIETTRRNPQIEEINEMEFEPLTEREVMEMIRRTSNWKTPGPDMVQNIWLKKITVLREPLTKCFNRILNGTAEIPEWMTKGETVLIPKTGETQNPGKYRPITCLPTIYKILTAIITERIYKHTIENNIIAEEQKGCSKGSHGTKDQLLINKMILEDSRQRQKNLSMTWNDYKKAYDREPHSWIKEVLKIYKINNKIRDFMEKVMQIWKINIKLHHENGTIQINDVKIRRGIFQGDSLSPLLFVLSLNPLSSLINNLHNGYRIGSRNEKKGKNISHLFYMDDIKLYSPNKQQTIEQIEVVKKFSSDIQMEFGLDKCAFLELKKGKRIDSGNIRINDEIIRQLEQEDTYKYLGIEENEKIEHKKMKEKLMKEYEKRLKLILKSELKCKFKVEAVRTLAVPVLSYGFGIIDWFQEDLNKLDIKTRKMLHAHKLIYKNQCLARMYVPRDQGGMGLQEIDAVYREEVIGLTTYIEESDSKFIRWVKEHETGKAMRTSLTAKKRDYLRKYDIPNDDPTTEGMTKKEKMKHLRNEHRKARRKKHENNWKEHAFAKEYKNIIEQVYIDKEKSIEAVCRGNLRKEDERTIVGAQDLALRTNWFKREIEKENISNKCRMCKVSPETVSHILSSCDTLLQRKTYTERHNTICKLIHFRICEKYKIPIEASKYWEHNPNAIEENNHALILYDYSIPTDVPVRHNKPDIVVKDKRERKAYIIEIGIPWDGRVSAYETEKEVKYQTLKYSLQGMWNDIDRAEVIPVVIGSMGVIKKSLNQYIERLPVEVTTLEMSSIIIRQSARILRMVLGC

SEQ ID NO: 18259 - protein, 1440 aa, Trachelipus rathkii
MAGKNKNIKCQELGRPGAGPTPFLEGDEGGRSSDEQIKLSLPGNRKNTPVRCGILTPNTPLPPDESSERPKTSPDSSKQPKIQKKRCNPYNRRGGDRLEYTVEEKKEIFWCVTYGRHKMFPKKGTTKRTRNMLEQRGEIDKIKLERIPDARFASIATNINNKKTPITHEQIKQIEEEVDQYVGKMNKMEGEGEWEWTKEKNEYLMESYYIGMLIPEKEGKTDFWKYVVDNEIIGANDVMEYEFNKKYTGVERRKLIAQKQAIINFNKERNQGAIKKRKATLPTNEDLKEIERRAKERIKNEIQITPEMIGDIKQKSKETLYQGNRIKTGKNTEKSLEEQNKMTDNEDLIDGELDETEIVGEEISEAAEILNKEIMNRTDSESNNDSDTGSHYEETEEQGDEEIIENDRNENGDRMQEEEEMINKIAHYRDEDIYTNMEDRKGINKIDNWMKINKYAGIANRVLPRLLPERCDISEVNRLYYATARAITDLMGGKIFEKNRSNGRKKEQKPSWEIRLERDIARLRKEISLIKEYEEGNITLESKIRQAENMIRRSRGRNRVTHAISSRKLELAAKAKRLSSYKKEEQRKRQNKMYQTDKGKFYRELRGENIKVDKPPERDRLDAFWRSIYEDQRTHNEEAEWLETTRRNPQIEEINEMEFEPLTEREVMEKIRRTSNWKTPGPDMVQNIWLKKITVLREPLTKCFNRILNGTAEIPEWMTKGETVLIPKTGETQNPGKYRPITCLPTIYKILTAIITERIYKHTIENNIIAEEQKGCSKGSHGTKDQLLINKMILEDSRQRQKNLSMTWIDYKKAYDSVPHSWIKEVLKIYKINNKIRDFMEKVMQIWKINIKLHHENGTIQINDVKIRRGIFQGDSLSPLLFVLSLNPLSSLINNLHNGYRIGSRNEKKGKNISHLFYMDDIKLYSPNKQQTIEQIEVVKKFSSDIQMEFGLDKCAFLELKKGKRIDSGNIRINDEIIRQLEQEDTYKYLGIEENEKIEHKKMKEKLKKEYEKRLKLILKSELKCKFKVEAVRTLAVPVLSYGFGIIDWFQEDLNKLDIKTRKMLHAHKLTYKNQCLARMYVPRDQGGMGLQEIDAVYREEVIGLTTYIEESDSKFIRWVKEHETGKAMRTSLTAKKRDYLRKYDIPNDDPTTEGMTKKEKMKHLRNEHRKARRKKHENNWKEHAFAKEYKNIIEQVQVYIDKEKSIEAVCRGNLRKEDERTIVGAQDLALRTNWFKREIEKENISNKCRMCKVSPETVSHILSSCDTLLQRKTYTERHNTICKLIHFRICEKYKIPIEASKYWEHNPNAIEENNHALILYDYSIPTDVPIRHNKPDIVVKDKRERKAYIIEIGIPWDGRVSAYETEKEVKYQTLKYSLQGMWNDIDRAEVIPVVIGSMGVIKKSLNQYIERLPVEVTTLEMSSIIIRQSARILRMFLGC

SEQ ID NO: 18260 - protein, 889 aa, Trachelipus rathkii
MIRRSRGRNRVTHAISSRKLELAAKAKRLSSYKKEEQRKRQNKMYQTDKGKFYRELRGENIKVDKPPERDRLDAFWRSIYEDQRTHNEEAEWIETTRRNPQIEEINEMEFEPLTEREVMEMIRRTSNWKTPGPDMVQNIWLKKITVLREPLTKCFNRILNGTAEIPEWMTKGETVLIPKTGETQNPGKYRPITCLPTIYKILTAIITERIYKHTIENNIIAEEQKGCSKGSHGTKDQLLINKMILEDSRQRQKNLSMTWIDYKKAYDSVPHSWIKEVLKIYKINNKIRDFMEKVMQIWKINIKLHHENGTIQINDVKIRRGIFQGDSLSPLLFVLSLNPLSSLINNLHNGYRIGSRNEKKGKNISHLFYMDDIKLYSPNKQQTIEQIEVVKKFSSDIQMEFGLDKCAFLELKKGKRIDSGNIRINDEIIRQLEQEDTYKYLGIEENEKIEHKKMKEKLKKEYEKRLKLILKSELKCKFKVEAVRTLAVPVLSYGFGIIDWFQEDLNKLDIKTRKMLHAHKLIYKNQCLARMYVPRDQGGMGLQEIDAVYREEVIGLTTYIEESDSKFIRWVKEHETGKAMRTSLTAKKSDYLRKYDIPNDDPTTEGMTKKEKMKHLRNEHRKARRKKHENNWKEHAFAKEYKNIIEQVYIDKEKSIEAVCRGNLRKEDERTIVGAQDLALRTNWFKREIEKENISNKCRMCKVSPETVSHILSSCDTLLGRKHYTERHNTICKLIHFRICEKYKIPIEASKYWEHNPNAIEENNHALILYDYSIPTDVPVRHNKPDIVVKDKRERKAYIIEIGIPWDGRVSAYETEKEVKYQTLKYSLQGMWNDIDRAEVIPVVIGSMGVIKKSLNQYIERLPVEVTTLEMSSIIIRQSARILRMVLGC

SEQ ID NO: 18261 - protein, 1214 aa, Trachelipus rathkii
MESYYIGMLIPEKEGKTDFWKYVVDNEIIGANDVMEYEFNKKYTGVERRKLIAQKQAIINFNKERNQGAIKKRKATLPTNEDLKEIERRAKERIKNEIQITPEMIGDIKQKSKETLYQGNRIKTGKNTEKSLEEQNKMTDNEDLIDGELDETEIVGEEISEAAEILNKEIMNRTDSESNNDSDTGSHYEETEEQGDEEIIENDRNENGDRMQEEEEMINKIAHYRDEDIYTNMEDRKGINKIDNWMKINKYAGIANRVLPRLLPERCDISEVNRLYYATARAITDLMGGKIFEKNRSNGRKKEQKPSWEIRLERDIARLRKEISLIKEYEEGNITLESKIRQAENMIRRSRGRNRVTHAISSRKLELAAKAKRLSSYKKEEQRKRQNKMYQTDKGKFYRELRGENIKVDKPPERDRLDAFWRSIYEDQRTHNEEAEWLETTRRNPQIEEINEMEFEPLTEREVMEKIRRTSNWKTPGPDMVQNIWLKKITVLREPLTKCFNRILNGTAEIPEWMTKGETVLIPKTGETQNPGKYRPITCLPTIYKILTAIITERIYKHTIENNIIAEEQKGCSKGSHGTKDQLLINKMILEDSRQRQKNLSMTWIDYKKAYDSVPHSWIKEVLKIYKINNKIRDFMEKVMQIWKINIKLHHENGTIQINDVKIRRGIFQGDSLSPLLFVLSLNPLSSLINNLHNGYRIGSRNEKKGKNISHLFYMDDIKLYSPNKQQTIEQIEVVKKFSSDIQMEFGLDKCAFLELKKGKRIDSGNIRINDEIIRQLEQEDTYKYLGIEENEKIEHKKMKEKLKKEYEKRLKLILKSELKCKFKVEAVRTLAVPVLSYGFGIIDWFQEDLNKLDIKTRKMLHAHKLIYKNQCLARMYVPRDQGGMGLQEIDAVYREEVIGLTTYIEESDSKFIRWVKEHETGKAMRTSLTAKKRDYLRKYDIPNDDPTTEGMTKKEKMKHLRNEHRKARRKKHENNWKEHAFAKEYKNIIEQVYIDKEKSIEAVCRGNLRKEDERTIVGAQDLALRTNWFKREIEKENISNKCRMCKVSPETVSHILSSCDTLLQRKTYTERHNTICKLIHFRICEKYKIPIEASKYWEHNPNAIEENNHALILYDYSIPTDVPIRHNKPDIVVKDKRERKAYIIEIGIPWDGRVSAYETEKEVKYQTLKYSLQGMWNDIDRAEVIPVVIGSMGVIKKSLNQYIERLPVEVTTL

SEQ ID NO: 18262 - protein, 1438 aa, Trachelipus rathkii
MAGKNKNIKCQELGRPGAGPTSFLEGDEGGRSSDEQIKLSLPGNRKNTPVRCGILTPNTPLPPDESSERPKTSPDSSKQPKIQKKRCNPYNRRGGDRLEYTVEEKKEIFWCVTYGRHKMFPKKGTTKRTRNMLEQRGEIDKIKLERIPDARFASIATNINNKKTPITHEQIKQIEEEVDQYVEKMNKVEEEGEWEWTKEKNEYLMESYYIGMLIPEKEGKTDFWKYVVDNEIIGTNDVMEYEFNKKYTGVERRKLIAQKQAIINFNKERNQGAIKKRKATLPTNEDLKEIERRAKERIKNEIQITPEMIGDIKQKSKETLYQGNRIKTGKNTEKSLEEQNKMTDNEDLIDGELDETEIVGEEISEAAEILNKEIMNRTDSESNNDSDTGSHYEETEEQGDEEIIENDRNENGDRMQEEEEMINKIAHYRDENIYTNMEDRKGINKIDNWMKINKYAGIANRVLPRLLPERCDISEVNRLYYATARAITDLMGGKIFEKNRSNGRKKEQKPSWEIRLERDIARLRKEISLIKEYEEGNITMESKIRQAQNMIRRSRGRNRVTHAISSRKLELAAKAKKLSSYKKEEQRKRQNKMYQTDKGKFYRELRGENIKVDKPPERDRLDAFWRSIYEDQRTHNEEAEWIETTRRNPQIEEINEMEFEPLTEREVMEMIRRTSNWKTPGPDMVQNIWLKKITVLREPLTKCFNRILNGTAEIPEWMTKGETVLIPKTGETQNPGKYRPITCLPTIYKILTAIITERIYKHTIENNIIAEEQKGCSKGSHGTKDQLLINKMILEDSRQRQKNLSMTWIDYKKAYDSVPHSWIKEVLKIYKINNKIREFMEKVMQIWKINIKLHHENGTIQINDVKIRRGIFQGDSLSPLLFVLSLNPLSSLINNLHNGYRIGSRNEKKGKNISHLFYMDDIKLYSPNKQQTIEQIEVVKKFSSDIQMEFGLDKCAFLELKKGKRIDSGNIRIEDQIIRQLEQEDTYKYLGIEENEKIEHKKMKEKLMKEYEKRLKLILKSELKCKFKIEAVRTLAVPVLSYGFGIIDWFQEDLNKLDIKTRKMLHAHKLTYKNQCLARMYVPRDQGGMGLQEIDAIYREEVIGLTTYIEESDSKFIRWVKEHETGKAMRTSLTAKKRDYLRKYDIPNDDPTTEGMTKKEKMKHLRNEHRKARRKKHENNWKEHAFAKEYKNIIEQVYIDKEKSIEAVCRGNLRKEDERTIVGAQDLALRTNWFKREIEKENISNKCRMCKVSPETVSHIISSCDTLLQRKTYTERHNTICKLIHFRICEKYKIPIEASKYWEHNPNAIEENNHALILYDYSIPTDVPIRHNKPDIVVKDKRERKAYIIEIGIPWDGRVSAYETEKEVKYQTLKYSLQGMWNDIDRAEVIPVVIGSMGVIKKSLNQYIERLPVEVTTLEMSSIIIRQSARILRMVLGC

SEQ ID NO: 18263 - protein, 1131 aa, Trachelipus rathkii
MIGDIKQKSKETLYQGNRIKTGKNTEKSLEEQNKMTDNEDLIDGELDETEIVGEEISEAAEILNKEIMNRTDSESNNDSDTGSHYEETEEQGDEEIIENDRNENGDRMQEEEEMINKIAHYRDEDIYTNMEDRKGINKIDNWMKINKYAGIANRVLPRLLPERCDISEANRLYYATARAITDLMGGKIFEKNRSNGRKKEQKPSWEIRLERDIARLRKEISLIKEYEEGNITLESKIRQAENMIRRSRGRNRVTHAISSRKLELAAKAKRLSSYKKEEQRKRQNKMYQTDKGKFYRELRGENIKVDKPPERDRLDAFWRSIYEDQRTHNEEAEWLETTRRNPQIEEINEMEFEPLTEREVMEKIRRTSNWKTPGPDMVQNIWLKKITVLREPLTKCFNRILNGTAEIPEWMTKGETVLIPKTGETQNPGKYRPITCLPTIYKILTAIITERIYKHTIENNIIAEEQKGCSKGSHGTKDQLLINKMILEDSRQRQKNLSMTWIDYKKAYDSVPHSWIKEVLKIYKINNKIRDFMEKVMQIWKINIKLHHENGTIQINDVKIRRGIFQGDSLSPLLFVLSLNPLSSLINNLHNGYRIGSRNEKKGKNISHLFYMDDIKLYSPNKQQTIEQIEVVKKFSSDIQMEFGLDKCAFLELKKGKRIDSGNIRINDEIIRQLEQEDTYKYLGIEENEKIEHKKMKEKLKKEYEKRLKLILKSELKCKFKVEAVRTLAVPVLSYGFGIIDWFQEDLNKLDIKTRKMLHAHKLIYKNQCLARMYVPRDQGGMGLQEIDAVYREEVIGLTTYIEESDSKFIRWVKEHETGKAMRTSLTAKKRDYLRKYDIPNDDPTTEGMTKKEKMKHLRNEHRKARRKKHENNWKEHAFAKEYKNIIEQVYIDKEKSIEAVCRGNLRKEDERTIVGAQDLALRTNWFKREIEKENISNKCRMCKVSPETVSHILSSCDTLLQRKTYTERHNTICKLIHFRICEKYKIPIEASKYWEHNPNAIEENNHALILYDYSIPTDVPIRHNKPDIVVKDKRERKAYIIEIGIPWDGRVSAYETEKEVKYQTLKYSLQGMWNDIDRAEVIPVVIGSMGVIKKSLNQYIERLPVEVTTLEMSSIIIRQSARILRMVLGC

SEQ ID NO: 18264 - protein, 1107 aa, Trachelipus rathkii
MLTHTSRKERIKNEIQITPEMIGDIKQKSKETLYQGNRMKTGKNTEKSLEEQNKMTDNEELIDGELDETEIVGEEISEAAEILNKEIMNRTDSESNNDSDTGSHYEETEEQGDEEIIENDRSENGDRMQEEEEMISKIAHYRDEDIYTNMEDRKGINKIDNWMKINKYAGIANRVLPRLLPERCDISEVNRLYYATARAITDLMGGKIFEKNRSNGRKKEQKPSWEIRLERDIARLRKEISLIKEYEEGNITMESKIRQAQNMIRRSRGRNRVTHAISSRKLELAAKAKRLSSYKIEEQRKRQNKMYQTDKGKFYRELRGENIKVDKPPERDRLDAFWRSIYEDQRTHNEEAEWIETTRRNPQIEEINEMEFEPLTEREVMEKIRRTSNWKTPGPDMVQNIWLKKITVLREPLTKCFNRILNGTAEIPEWMTKGETVLIPKTGETQNPGKYRPITCLPTIYKILTAIITERIYKHTIENNIIAEEQKGCSKGSHGTKDQLLINKMILEDSRQRQKNLSMTWIDYKKAYDSVPHSWIKEVLKIYKINNKIRDFMEKVMQIWKINIKLHHENGTIQINDVKIRRGIFQGDSLSPLLFVLSLNPLSSLINNLHNGYRIGSRNEKKGKNISHLFYMDDIKLYSPNKQQTIEQIEVVKKFSSDIQMEFGLDKCAFLELKKGKRIDSGNIRIEDQIIRQLEQEDTYKYLGIEENEKIEHKKMKEKLMKEYEKRLKLILKSELKCKFKIEAVRTLAVPVLSYGFGIIDWFQEDLNKLDIKTRKMLHAHKLTYKNQCLARMYVPRDQGGMGLQEIDAIYREEVIGLTTYIEESDSKFIRWVKEHETGKAMRTSLTAKKRDYLRKYDIPNDDPTTEGMTKKEKMKHLRNEHRKARRKKHENNWKEHAFAKEYKNIIEQVYIDKEKSIEAVCRGNLRKEDERTIVGAQDLALRTNWFKREIEKENISNKCRMCKVSPETVSHILSSCDTLLQRKTYTERHNTICKLIHFRICEKYKIPIEASKYWEHNPNAIEENNHALILYDYSIPTDVPITHNKPDIVVKDKRERKAYIIEIGIPWDGRVSAYEREKEMKYERLKYSLQGMWNDIDRAEVIPVVI

SEQ ID NO: 18265 - protein, 1131 aa, Trachelipus rathkii
MIGDIKQKSKETLYQGNRIKTGKNTEKSLEEQNKMTDNEDLIDGELDETEIVGEEISEAAEILNKEIMNRTDSESNNDSDTGSHYEETEEQGDEEIIENDRNENGDRMQEEEEMINKIAHYRDEDIYTNMEDRKGINKIDNWMKINKYAGIANRVLPRLLPERCDISEVNRLYYATARAITDLMGGKIFEKNRSNGRKKEQKPSWEIRLERDIARLRKEISLIKEYEEGNITLESKIRQAENMIRRSRGRNRVTHAISSRKLELAAKAKRLSSYKKEEQRKRQNKMYQTDKGKFYRELRGENIKVDKPPERDRLDAFWRSIYEDQRTHNEEAEWLETTRRNPQIEEINEMEFEPLTEREVMEKIRRTSNWKTPGPDMVQNIWLKKITVLREPLTKCFNRILNGTAEIPEWMTKGETVLIPKTGETQNPGKYRPITCLPTIYKILTAIITERIYKHTIENNIIAEEQKGCSKGSHGTKDQLLINKMILEDSRQRQKNLSMTWIDYKKAYDSVPHSWIKEVLKIYKINNKIRDFMEKVMQIWKINIKLHHENGTIQINDVKIRRGIFQGDSLSPLLFVLSLNPLSSLINNLHNGYRIGSRNEKKGKNISHLFYMDDIKLYSPNKQQTIEQIEVVKKFSSDIQMEFGLDKCAFLELKKGKRIDSGNIRINDEIIRQLEQEDTYKYLGIEENEKIEHKKMKEKLKKEYEKRLKLILKSELKCKFKVEAVRTLAVPVLSYGFGIIDWFQEDLNKLDIKTRKMLHANKLIYKNQCLARMYVPRDQGGMGLQEIDAVYREEVIGLTTYIEESDSKFIRWVKEHETGKAMRTSLTAKKRDYLRKYDIPNDDPTTEGMTKKEKMKHLRNEHRKARRKKHENNWKEHAFAKEYKNIIEQVYIDKEKSIEAVCRGNLRKEDERTIVGAQDLALRTNWFKREIEKENISNKCRMCKVSPETVSHILSSCDTLLQRKTYTERHNTICKLIHFRICEKYKIPIEASKYWEHNPNAIEENNHALILYDYSIPTDVPIRHNKPDIVVKDKRERKAYIIEIGIPWDGRVSAYETEKEVKYQTLKYSLQGMWNDIDRAEVIPVVIGSMGVIKKSLNQYIERLPVEVTTLEMSSIIIRQSARILRMVLGC

SEQ ID NO: 18266 - protein, 1438 aa, Trachelipus rathkii
MAGKNKNIKCQELGRPGAGPTSFLEGDEGGRSSDEQIKLSLPGNRKNTPVRCGILTPNTPLPPDESSERPKTSPDSSKQPKIQKKRCNPYNRRGGDRLEYTVEEKKEIFWCVTYGRHKMFPKKGTTKRTRNMLEQRGEIDKIKLERIPDARFASIATNINNKKTPITHEQIKQIEEEVDQYVEKMNKVEEEGEWEWTKEKNEYLMESYYIGMLIPEKEGKTDFWKYVVDNEIIGANDVMEYEFNKKYTGVERRKLIAQKQAILNFNKERNQGAIKKRKATLPTNEDLKEIERRAKERIKNEIQITPEMIGDIKQKSKETLYQGNRIKTGKNTEKSLEEQNKMTDNEDLIDGELDETEIVGEEISEAAEILNKEIMNRTDSESNNDSDTGSHYEETEEQGDEEIIENDRNENGDRMQEEEEMINKIAHYRDEDIYTNMEDRKGINKIDNWMKINKYAGIANRVLPRLLPERCDISEVNRLYYATARAITDLMGGKIFEKNRSNGRKKEQKPSWEIRLERDIARLRKEISLIKEYEEGNITIESKIRQAQNMIRRSRGRNRVTHAISSRKLELAAKAKRLSSYKKEEQRKRQNKMYQTDKGKFYRELRGENIKVDKPPERDRLDAFWRSIYEDQRTHNEEAEWIETTRRNPQIEEINEMEFEPLTEREVMEMIRRTSNWKTPGPDMVQNIWLKKITVLREPLTKCFNRILNGTAEIPEWMTKGETVLIPKTGETQNPGKYRPITCLPTIYKILTAIITERIYKHTIENNIIAEEQKGCSKGSHGTKDQLLINKMILEDSRQRQKNLSMTWIDYKKAYDSVPHSWIKEVLKIYKINNKIREFMEKVMQIWKINIKLHHENGTIQINDVKIRRGIFQGDSLSPLLFVLSLNPLSSLINNLHNGYRIGSRNEKKGKNISHLFYMDDIKLYSPNKQQTIEQIEVVKKFSSDIQMEFGLDKCAFLELKKGKRIDSGNIRIEDQIIRQLEQEDTYKYLGIEENEKIEHKKMKEKLMKEYEKRLKLILKSELKCKFKIEAVRTLAVPVLSYGFGIIDWFQEDLNKLDIKTRKMLHAHKLTYKNQCLARMYVPRDQGGMGLQEIDAIYREEVIGLTTYIEESDSKFIRWVKEHETGKAMRTSLTAKKRDYLRKYDIPNDDPTTEGMTKKEKMKHLRNEHRKARRKKHENNWKEHAFAKEYKNIIEQVYIDKEKSIEAVCRGNLRKEDERTIVGAQDLALRTNWFKREIEKENISNKCRMCKVSPETVSHILSSCDTLLQRKTYTERHNTICKLIHFRICEKYKIPIEASKYWEHNPNAIEENNHALILYDYSIPTDVPVRHNKPDIVVKDKRERKAYIIEIGIPWDGRVSAYETEKEVKYQTLKYSLQGMWNDIDRAEVIPVVIGSMGVIKKSLNQYIERLPVEVTTLEMSSIIIRQSARILRMVLGC

SEQ ID NO: 18267 - protein, 1493 aa, Trachelipus rathkii
MLTHQNITENCLRCRRGGAQGDTVRRKIYRPRCVFLRKGSRHEATKCGGYYWKLSMAEKNKNIKCQELGRPGAGPTPFLEGDEGGRSSDEQIKLSLPGNRKNTPVRCGTITPNSPLPPDESSERPKTSPDSSKQPKIQKKRCNPYNRRGGERLEYTVEEKKEIFWCVTYGRHKMFPKKGTTKRTRNMLEQRGEIDKIKLERIPDARFASIATNINNKKTPITHEQIKQIEEEVDQYVGKMNKMEGEGEWEWTKEKNEYLMESYYIGMLIPEKEGKTDFWKYVVDNEIIGANDVMEYEFNKKYTGVERRKLIAQKQAIINFNKERNQGAIKKRKATLPTNEDLKEIERRAKERIKNEIQITPEMIGDIKQKSKETLYQGNRIKTGKNTEKSLEEQNKMTDNEDLIDGELDETEIVGEEISEAAEILNKEIMNRTDSESNNDSDTGSHYEETEEQGDEEIIENDRNENGDRMQEEEEMINKIAHYRDEDIYTNMEDRKGINKIDNWMKINKYAGIANRVLPRLLPERCDISEVNRLYYATARAITDLMGGKIFEKNRSNGRKKEQKPSWEIRLERDIARLRKEISLIKEYEEGNITLESKIRQAQNMIRRSRGRNRVTHAISSRKLELAAKAKRLSSYKKEEQRKRQNKMYQTDKGKFYRELRGENIKVDKPPERDRLDAFWRSIYEDQRTHNEEAEWLETTRRNPQIEEINEMEFEPLTEREVMEMIRRTSNWKTPGPDMVQNIWLKKITVLREPLTKCFNRILNGTAEIPEWMTKGETVLIPKTGETQNPGKYRPITCLPTIYKILTAIITERIYKHTIENNIIAEEQKGCSKGSHGTKDQLLINKMILEDSRQRQKNLSMTWIDYKKAYDSVPHSWIKEVLKIYKINNKIRDFMEKVMQIWKINIKLHHENGTIQINDVKIRRGIFQGDSLSPLLFVLSLNPLSSLINNLHNGYRIGSRNEKKGKNISHLFYMDDIKLYSPNKQQTIEQIEVVKKFSSDIQMEFGLDKCAFLELKKGKRIDSENIRINDEIIRQLEQEDTYKYLGIEENEKIEHKKMKEKLKKEYEKRLKLILKSELKCKFKVEAVRTLAVPVLSYGFGIIDWFQEDLNKLDIKTRKMLHAHKLIYKNQCLARMYVPRDQGGMGLQEIDAVYREEVIGLTTYIEESDSKFIRWVKEHETGKAMRTSLTAKKSDYLRKYDIPNDDPTTEGMTKKEKMKHLRNEHRKARRKKHENNWKEHAFAKEYKNIIEQVYIDKEKSIEAVCRGNLRKEDERTIVGAQDLALRTNWFKREIEKENISNKCRMCKVSPETVSHILSSCDTLLGRKHYTERHNTICKLIHFRICEKYKIPIEASKYWEHNPNAIEENNHALILYDYSIPTDVPVRHNKPDIVVKDKRERKAYIIEIGIPWDGRVSAYETEKEVKYQTLKYSLQGMWNDIDRAEVIPVVIGSMGVIKKSLNQYIERLPVEVTTLEMSSIIIRQSARILRMVLGC

SEQ ID NO: 18268 - protein, 1234 aa, Trachelipus rathkii
MESYYIGMLIPEKEGKTDFWKYVVDNEIIGANDVMEYEFNKKYTGVERRKLIAQKQAIINFNKERNQGAIKKRKATLPTNEDLKEIERRAKERIKNEIQITPEMIGDIKQKSKETLYQGNRIKTGKNTEKSLEEQNKMTDNEDLIDGELDETEIVGEEISEAAEILNKEIMNRTDSESNNDSDTGSHYEETEEQGDEEIIENDRNENGDRMQEEEEMINKIAHYRDEDIYTNMEDRKGINKIDNWMKINKYAGIANRVLPRLLPERCDISEVNRLYYATARAITDLMGGKIFEKNRSNGRKKEQKPSWEIRLERDIARLRKEISLIKEYEEGNITLESKIRQAENMIRRSRGRNRVTHAISSRKLELAAKAKRLSSYKKEEQRKRQNKMYQTDKGKFYRELRGENIKVDKPPERDRLDAFWRSIYEDQRTHNEEAEWLETTRRNPQIEEINEMEFEPLTEREVMEKIRRTSNWKTPGPDMVQNIWLKKITVLREPLTKCFNRILNGTAEIPEWMTKGETVLIPKTGETQNPGKYRPITCLPTIYKILTAIITERIYKHTIENNIIAEEQKGCSKGSHGTKDQLLINKMILEDSRQRQKNLSMTWIDYKKAYDSVPHSWIKEVLKIYKINNKIRDFMEKVMQIWKINIKLHHENGTIQINDVKIRRGIFQGDSLSPLLFVLSLNPLSSLINNLHNGYRIGSRNEKKGKNISHLFYMDDIKLYSPNKQQTIEQIEVVKKFSSDIQMEFGLDKCAFLELKKGKRIDSGNIRINDEIIRQLEQEDTYKYLGIEENEKIEHKKMKEKLKKEYEKRLKLILKSELKCKFKVEAVRTLAVPVLSYGFGIIDWFQEDLNKLDIKTRKMLHAHKLIYKNQCLARMYVPRDQGGMGLQEIDAVYREEVIGLTTYIEESDSKFIRWVKEHETGKAMRTSLTAKKRDYLRKYDIPNDDPTTEGMTKKEKMKHLRNEHRKARRKKHENNWKEHAFAKEYKNIIEQVYIDKEKSIEAVCRGNLRKEDERTIVGAQDLALRTNWFKREIEKENISNKCRMCKVSPETVSHILSSCDTLLQRKTYTERHNTICKLIHFRICEKYKIPIEASKYWEHNPNAIEENNHALILYDYSIPTDVPVRHNKPDIVVKDKRERKAYIIEIGIPWDGRVSAYETEKEVKYQTLKYSLQGMWNDIDRAEVIPVVIGSMGVIKKSLNQYIERLPVEVTTLEMSSIIIRQSARILRMVLGC

SEQ ID NO: 18269 - protein, 1438 aa, Trachelipus rathkii
MAGKNKNIKCQELGRPGAGPTPFLEGDEGGRSSDEQIKLSLPGNRKNTPVRCGIITPNTPLPPDESSERPKTSPDSSKQPKIQKKRCNPYNRRGGDRLEYTVEEKKEIFWCVTYGRHKMFPKKGTTKRTRNMLEQRGEIDKIKLERIPDARFASIATNINNKKTPITHEQIKQIEEEVDQYVGKMNKMEGEGEWEWTKEKNEYLMESYYIGMLIPEEEGKTDFWKYVVDNEIIGANDVMEYEFNKKYTGVERRKLIAQKQAIINFNKERNQGAIKKRKATLPTNEDLKEIERRAKERIKNEIQITPEMIGDIKQKSKETLYQGNRIKTGKNTEKSLEEQNKMTDNEDLIDGELDETEIVGEEISEAAEILNKEIMNRTDSESNNDSDTGSHYEETEEQGDEEIIENDRNENGDRMQEEEEMINKIAHYRDEDIYTNMEDRKGINKIDNWMKINKYAGIANRVLPRLLPERCDISEVNRLYYATARAITDLMGGKIFEKNRSNGRKKEQKPSWEIRLERDIARLRKEISLIKEYEEGNITIESKIRQAQNMIRRSRGRNRVTHAISSRKLELAAKAKRLSSYKKEEQRKRQNKMYQTDKGKFYRELRGENIKVDKPPERDRLDAFWRSIYEDQRTHNEEAEWLETTRRNPQIEEINEMEFEPLTEREVMEMIRRTSNWKTPGPDMVQNIWLKKITVLREPLTKCFNRILNGTAEIPEWMTKGETVLIPKTGETQNPGKYRPITCLPTIYKILTAIITERIYKHTIENNIIAEEQKGCSKGSHGTKDQLLINKMILEDSRQRQKNLSMTWIDYKKAYDSVPHSWIKEVLKIYKINNKIRDFMEKVMQIWKINIKLHHENGTIQINDVKIRRGIFQGDSLSPLLFVLSLNPLSSLINNLHNGYRIGSRNEKKGKNISHLFYMDDIKLYSPNKQQTIEQIEVVKKFSSDIQMEFGLDKCAFLELKKGKRIDSGNIRINDEIIRQLEQEDTYKYLGIEENEKIEHKKMKEKLKKEYEKRLKLILKSELKCKFKVEAVRTLAVPVLSYGFGIIDWFQEDLNKLDIKTRKMLHAHKLIYKNQCLARMYVPRDQGGMGLQEIDAVYREEVIGLTTYIEESDSKFIRWVKEHETGKAMRTSLTAKKRDYLRKYDIPNDDPTTEGMTKKEKMKHLRNEHRKARRKKHENNWKEHAFAKEYKNIIEQVYIDKEKSIEAVCRGNLRKEDERTIVGAQDLALRTNWFKREIEKENISNKCRMCKVSPETVSHILSSCDTLLQRKQYTERHNTICKLIHFRICEKYKITIEASKYWEHNPNTIEENNHALILYDYSIPTDVPIRHNKPDIVVKDKRERKAYIIEIGIPWDGRVSAYETEKEVKYQTLKYSLQGMWNDIDRAEVIPVVIGSMGVIKKRLKQYIERLPVEVTTLEMSSIIIRQSARILRMVLGC

SEQ ID NO: 18270 - protein, 1451 aa, Trachelipus rathkii
MLTNSQQFTGVTIQMAGKIKYCGQELGRPGAGPTPFLEGDEGGRSSDEQIKLSLPGNRKNTPVRCGILTPNTPLPPDESSERPKTSPDSSKQPKIQKKRCNPYNRRGGDRLEYTVEEKKEIFWCVTYGRHKMFPKKGTTKRTRNMLEQRGEIDKIKLERIPDARFASIATNINNKKTPITHEQIKQIEEEVDQYVEKMNKVEEEGEWEWTKEKNEYLMESYYIGMLIPEKEGKTDFWKYVVDNEIIGANDVMEYEFNKKYTGVERRKLIAQKQAIINFNKERNQGAIKKRKATLPTNEDLKEIERRAKERIKNEIQITPEMIGDIKQKSKETLYQGNRMKTGKNTEKSLEEQNKMTDNEELINAFADSQQFLYCILSEAAEILNKEIMNRTDSESNNDSDTGSHYEETEEQGDEEIIENDRSENGDRMQEEEEMISKIAHYRDEDIYTNMEDRKGINKIDNWMKINKYAGIANRVLPRLLPERCDISEVNRLYYATARAITDLMGGKIFEKNRSNGRKKEQKPSWEIRLERDIARLRKEISLIKEYEEGNITMESKIRQAQNMIRRSRGRNRVTHAISSRKLELAAKAKRLSSYKKEEQRKRQNKMYQTDKGKFYRELRGENIKVDKPPERDRLDAFWRSIYEDQRTHNEEAEWIETTRRNPQIEEINEMEFEPLTEREVMEKIRRTSNWKTPGPDMVQNIWLKKITVLREPLTKCFNRILNGTAEIPEWMTKGETVLIPKTGETQNPGKYRPITCLPTIYKILTAIITERIYKHTIENNIIAEEQKGCSKGSHGTKDQLLINKMILEDSRQRQKNLSMTWIDYKKAYDSVPHSWIKEVLKIYKINNKIREFMEKVMQIWKINIKLHHENGTIQINNVKIRRGIFQGDSLSPLLFVLSLNPLSSLINNLHSGYRIGSRNEKKGKNISHLFYMDDIKLYSPNKQQTIEQIEVVKKFSSDIQMEFGLDKCAFLELKKGKRIDSGNIRIDDEIIRQLDQEDTYKYLGIEENEKIEHKKMKEKLMKEYEKRLKLILKSELKCKFKIEAVRTLAVPVLSYGFGIIDWFQEDLNKLDIKTRKMLHAHKLTYKNQCLARMYVPRDQGGMGLQEIDAIYREEVIGLTTYIEESDSKFIRWVKEHETGKAMRTSLTAKKRDYLRKYDIPNDDPTTEGMTKKEKMKHLRNEHRKARRKKHENNWKEHAFAKEYKNIIEQVYIDKEKSIEAVCRGNLRKEDERTIVGAQDLALRTNWFKREIEKENISNKCRMCKVSPETVSHILSSCDTLLQRKTYTERHNTICKLIHFRICEKYKIPIEASKYWEHNPNAIEENNHALILYDYSIPTDVPITHNKPDIVVKDKRERKAYIIEIGIPWDGRVSAYEREKEMKYERLKYSLQGMWNDIDRAEVIPVVIGSMGVIKKSLNQYIERLPVEVTTLEMSSIIIRQSARILRMVLGC

SEQ ID NO: 18271 - protein, 1348 aa, Trachelipus rathkii
MAGKNKNIKCQELGRPGAGPTPFLEGDEGGRSSDEQIKLSLPGNRKNTPVRCGIITPNTPLPPDESSERPKTSPDSSKQPKIQKKRCNPYNRRGGERLEYTVEEKKEIFWCVTYGRHKMFPKKGTTKRTRNMLEQRGEIDKIKLERIPDARFASIATNINNKNSPANSQQIKQIEEEVDQYVGKMNKMEGEGEWEWTKEKNEYLMESYYIGMLIPEKEGKTDFWKYVVDNEIIGANDVMEYEFNKKYTGVERRKLIAQKQAIINFNKERNQGAIKKRKATLPTNEDLKEIERRAKERIKNEIQITPEMIGDIKQKSKETLYQGNRIKTGKNTEKSLEEQNKMTDNEDLIDGELDETEIVGEEISEAAEILNKEIMNRTDSESNNDSDTGSHYEETEEQGDEEIIENDRNENGDRMQEEEEMINKIAHYRDEDIYTNMEDRKGINKIDNWMKINKYAGIANRVLPRLLPERCDISEVNRLYYATARAITDLMGGKIFEKNRSNGRKKEQKPSWEIRLERDIARLRKEISLIKEYEEGNITIESKIRQAQNMIRRSRGRNRVTHAISSRKLELAAKAKRLSSYKKEEQRKRQNKMYQTDKGKFYRELRGENIKVDKPPERDRLDAFWRSIYEDQRTHNEEAEWLETTRRNPQIEEINEMEFEPLTEREVMEMIRRTSNWKTPGPDMVQNIWLKKITVLREPLTKCFNRILNGTAEIPEWMTKGETVLIPKTGETQNPGKYRPITCLPTIYKILTAIITERIYKHTIENNIIAEEQKGCSKGSHGTKDQLLINKMILEDSRQRQKNLSMTWIDYKKAYDSVPHSWIKEVLKIYKINNKIRDFMEKVMQIWKINIKLHHENGTIQINDVKIRRGIFQGDSLSPLLFVLSLNPLSSLINNLHNGYRIGSRNEKKGKNISHLFYMDDIKLYSPNKQQTIEQIEVVKKFSSDIQMEFGLDKCAFLELKKGKRIDSGNIRINDEIIRQLEQEDTYKYLGIEENEKIEHKKMKEKLKKEYEKRLKLILKSELKCKFKVEAVRTLAVPVLSYGFGIIDWFQEDLNKLDIKTRKMLHAHKLIYKNQCLARMYVPRDQGGMGLQEIDAVYREEVIGLTTYIEESDSKFIRWVKEHETGKAMRTSLTAKKRDYLRKYDIPNDDPTTEGMTKKEKMKHLRNEHRKARRKKHENNWKEHAFAKEYKNIIEQVYIDKEKSIEAVCRGNLRKEDERTIVGAQDLALRTNWFKREIEKENISNKCRMCKVSPETVSHILSSCDTLLGRKHYTERHNTICKLIHFRICEKYKIPIEASKYWEHNPNAIEENNHALILYDYSIPTDVPVRHNKPDIVVKIKEKERHTL

SEQ ID NO: 18272 - protein, 1251 aa, Trachelipus rathkii
MEGEGEWEWTKEKNEYLMESYYIGMLIPEKEGKTDFWKYVVDNEIIGANDVMEYEFNKKYTGVERRKLIAQKQAIINFNKERNQGAIKKRKATLPTNEDLKEIERRAKERIKNEIQITPEMIGDIKQKSKETLYQGNRIKTGKNTEKSLEEQNKMTDNEDLIDGELDETEIVGEEISEAAEILNKEIMNRTDSESNNDSDTGSHYEETEEQGDEEIIENDRNENGDRMQEEEEMINKIAHYRDEDIYTNMEDRKGINKIDNWMKINKYAGIANRVLPRLLPERCDISEVNRLYYATARAITDLMGGKIFEKNRSNGRKKEQKPSWEIRLERDIARLRKEISLIKEYEEGNITLESKIRQAENMIRRSRGRNRVTHAISSRKLELAAKAKRLSSYKKEEQRKRQNKMYQTDKGKFYRELRGENIKVDKPPERDRLDAFWRSIYEDQRTHNEEAEWIETTRRNPQIEEINEMEFEPLTEREVMEKIRRTSNWKTPGPDMVQNIWLKKITVLREPLTKCFNRILNGTAEIPEWMTKGETVLIPKTGETQNPGKYRPITCLPTIYKILTAIITERIYKHTIENNIIAEEQKGCSKGSHGTKDQLLINKMILEDSRQRQKNLSMTWIDYKKAYDSVPHSWIKEVLKIYKINNKIRDFMEKVMQIWKINIKLHHENGTIQINDVKIRRGIFQGDSLSPLLFVLSLNPLSSLINNLHNGYRIGSRNEKKGKNISHLFYMDDIKLYSPNKQQTIEQIEVVKKFSSDIQMEFGLDKCAFLELKKGKRIDSGNIRINDEIIRQLEQEDTYKYLGIEENEKIEHKKMKEKLKKEYEKRLKLILKSELKCKFKVEAVRTLAVPVLSYGFGIIDWFQEDLNKLDIKTRKMLHAHKLIYKNQCLARMYVPRDQGGMGLQEIDAVYREEVIGLTTYIEESDSKFIRWVKEHETGKAMRTSLTAKKRDYLRKYDIPNDDPTTEGMTKKEKMKHLRNEHRKARRKKHENNWKEHAFAKEYKNIIEQVYIDKEKSIEAVCRGNLRKEDERTIVGAQDLALRTNWFKREIEKENISNKCRMCKVSPETVSHILSSCDTLLQRKTYTERHNTICKLIHFRICEKYKIPIEASKYWEHNPNAIEENNHALILYDYSIPTDVPIRHNKPDIVVKDKRERKAYIIEIGIPWDGRVSAYETEKEVKYQTLKYSLQGMWNDIDRAEVIPVVIGSMGVIKKSLNQYIERLPVEVTTLEMSSIIIRQSARILRMVLGC

SEQ ID NO: 18273 - protein, 1437 aa, Trachelipus rathkii
MAGKNKNIKCQELGRPGAGPTSFLEGDEGGRSSDEQIKLSLPGNRKNTPVRCGILTPNTPLPPDESSERPKTSPDSSKQPKIQKKRCNPYNRRGGDRLEYTVEEKKEIFWCVTYGRHKMFPKKGTTKRTRNMLEQRGEIDKIKLERIPDARFASIATNINNKKTPITHEQIKQIEEEVDQYVEKMNKVEGEGEWEWTKEKNEYLMESYYIGMLIPEKEGKTDFWKYVVDNEIIGANDVMEYEFNKKYTGVERRKLIAQKQAIINFNKERNQGAIKKRKATLPTNEDLKEIERRAKERIKNEIQITPEMIGDIKQKSKETLYQGNRIKTGKNTEKSLEEQNKMTDNEDLIDGELDETEIVGEEISEAAEILNKEIMNRTDSESNNDSDTGSHYEETEEQGDEEIIENDRNENGDRMQEEEEMINKIAHYRDEDIYTNMEDRKGINKIDNWMKINKYAGIANRVLPRLLPERCDISEVNRLYYATARAITDLMGGKIFEKNRSNGRKKEQKPSWEIRLERDIARLRKEISLIKEYEEGNITLESKIRQAENMIRRSRGRNRVTHAISSRKLELAAKAKRLSSYKKEEQRKRQNKMYQTDKGKFYRELRGENIKVDKPPERDRLDAFWRSIYEDQRTHNEEAEWLETTRRNPQIEEINEMEFEPLTEREVMEKIRRTSNWKTPGPDMVQNIWLKKITVLREPLTKCFNRILNGTAEIPEWMTKGETVLIPKTGETQNPGKYRPITCLPTIYKILTAIITERIYKHTIENNIIAEEQKGCSKGSHGTKDQLLINKMILEDSRQRQKNLSMTWIDYKKAYDSVPHSWIKEVLKIYKINNKIRDFMEKVMQIWKINIKLHHENGTIQINDVKIRRGIFQGDSLSPLLFVLSLNPLSSLINNLHNGYRIGSRNEKKGKNISHLFYMDDIKLYSPNKQQTIEQIEVVKKFSSDIQMEFGLDKCAFLELKKGKRIDSGNIRINDEIIRQLEQEDTYKYLGIEENEKIEHKKMKEKLKKEYEKRLKLILKSELKCKFKVEAVRTLAVPVLSYGFGIIDWFQEDLNKLDIKTRKMLHAHKLIYKNQCLARMYVPRDQGGMGLQEIDAVYREEVIGLTTYIEESDSKFIRWVKEHETGKAMRTSLTAKKRDYLRKYDIPNDDPTTEGMTKKEKMKHLRNEHRKARRKKHENNWKEHAFAKEYKNIIEQVYIDKEKSIEAVCRGNLRKEDERTIVGAQDLALRTNWFKREIEKENISNKCRMCKVSPETVSHILSSCDTLLQRKTYTERHNTICKLIHFRICEKYKIIEASKYWEHNPNAIEENNHALILYDYSIPTDVPVRHNKPDIVVKDKRERKAYIIEIGIPWDGRVSAYETEKEVKYQTLKYSLQGMWNDIDRAEVIPVVIGSMGVIKKSLNQYIERLPVEVTTLEMSSIIIRQSARILRMVLGC

SEQ ID NO: 18274 - protein, 1438 aa, Trachelipus rathkii
MAGKNKNIKCQELGRPGAGPTSFLEGDEGGRSSDEQIKLSLPGNRKNTPVRCGILTPNTPLPPDESSERPKTSPDSSKQPKIQKKRCNPYNRRGGDRLEYTVEEKKEIFWCVTYGRHKMFPKKGTTKRTRNMLEQRGEIDKIKLERIPDARFASIATNINNKKTPITHEQIKQIEEEVDQYVEKMNKVEEEGEWEWTKEKNEYLMESYYIGMLIPEKEGKTDFWKYVVDNEIIGANDVMEYEFNKKYTGVERRKLIAQKQAIINFNKERNQGAIKKRKATLPTNEDLKEIERRAKERIKNEIQITPEMIGDIKQKSKETLYQGNRIKTGKNTEKSLEEQNKMTDNEELIDGESDETEIVGEEISEAAEILNKEIMNRTDSESNNDSDTGSHYEETEEQGDEEIIENDRSENGDRMQEEEEMISKIAHYRDEDIYTNMEDRKGINKIDNWMKINKYAGIANRVLPRLLPERCDISEVNRLYYATARAITDLMGGKIFEKNRSNGRKKEQKPSWEIRLERDIARLRKEISLIKEYEEGNITMESKIRQAQNMIRRSRGRNRVTHAISSRKLELAAKAKRLSSYKIEEQRKRQNKMYQTDKGKFYRELRGENIKVDKPPERDRLDAFWRSIYEDQRTHNEEAEWIETTRRNPQIEEINEMEFEPLTEREVMEKIRRTSNWKTPGPDMVQNIWLKKITVLREPLTKCFNRILNGTAEIPEWMTKGETVLIPKTGETQNPGKYRPITCLPTIYKILTAIITERIYKHTIENNIIAEEQKGCSKGSHGTKDQLLINKMILEDSRQRQKNLSMTWIDYKKAYDSVPHSWIKEVLKIYKINNKIREFMEKVMQIWKINIKLHHENGTIQINYVKIRRGIFQGDSLSPLLFVLSLNPLSSLINNLHNGYRIGSRNEKKGKNISHLFYMDDIKLYSPNKQQTIEQIEVVKKFSSDIQMEFGLDKCAFLELKKGKRIDSGNIRIDDEIIRQLEQEDTYKYLGIEENEKIEHKKMKEKLMKEYEKRLKLILKSELKCKFKIEAVRTLAVPVLSYGFGIIDWFQEDLNKLDIKTRKMLHAHKLTYKNQCLARMYVPRDQGGMGLQEIDAVYREEVIGLTTYIEESDSKFIRWVKEHETGKAMRTSLTAKKRDYLRKYDIPNDDPTTEGMTKKEKMKHLRNEHRKARRKKHENNWKEHAFAKEYKNIIEQVYIDKEKSIEAVCRGNLRKEDERTIVGAQDLALRTNWFKREIEKENISNKCRMCKVSPETVSHILSSCDTLLQRKTYTERHNTICKLIHFRICEKYKIPIEASKYWEHNPNAIEENNHALILYDYSIPTDVPITHNKPDIVVKDKRERKAYIIEIGIPWDGRVSAYEREKEMKYERLKYSLQGMWNDIDRAEVIPVIIGSMGVIKKSLNQYIERLPVEVTTLEMSSIIIRQSARILRMVLGC

SEQ ID NO: 18275 - protein, 1570 aa, Trachelipus rathkii
MVTLKKGEIKKKKKIFKCSECSYECNQKGSLKIHLLTHSNSKLFKCSECSYECNHKGSLKIHLLTHSNSKLFKCSECSYECNQKGNLKIHLLTHSNSKLFKCSECSYECNQKGSLKIHLLTHSNSKLFKCSECSYECNHKGSLKIHLLTHSNSKLFKCSECSYECNHKGSLKIHLLTHSNSKLFKCSECSYECNHKGSLKRHLLTPDSSKQPKIQKKRCNPYNRRGGDRLEYTVEEKKEIFWCVTYGRHKMFPKKGTTKRTRNMLEQRGEIDKIKLERIPDARFASIATNINNKKTPITHEQIKQIEEEVDQYVEKMNKVEGEGEWEWTKEKNEYLMESYYIGMLIPEKEGKTDFWKYVVDNEIIGANDVMEYEFNKKYTGVERRKLIAQKQAIINFNKERNQGAIKKRKATLPTNEDLKEIERRAKERIKNEIQITPEMIGDIKQKSKETLYQGNRIKTGKNTEKSLEEQNKMTDNEDLIDGELDETEIVGEEISEAAEILNKEIMNRTDSESNNDSDTGSHYEETEEQGDEEIIENDRNENGDRMQEEEEMINKIAHYRDEDIYTNMEDRKGINKIDNWMKINKYAGIANRVLPRLLPERCDISEVNRLYYATARAITDLMGGKIFEKNRSNGRKKEQKPSWEIRLERDIARLRKEISLIKEYEEGNITLESKIRQAENMIRRSRGRNRVTHAISSRKLELAAKAKRLSSYKKEEQRKRQNKMYQTDKGKFYRELRGENIKVDKPPERDRLDAFWRSIYEDQRTHNEEAEWLETTRRNPQIEEINEMEFEPLTEREVMEKIRRTSNWKTPGPDMVQNIWLKKITVLREPLTKCFNRILNGTAEIPEWMTKGETVLIPKTGETQNPGKYRPITCLPTIYKILTAIITERIYKHTIENNIIAEEQKGCSKGSHGTKDQLLINKMILEDSRQRQKNLSMTWIDYKKAYDSVPHSWIKEVLKIYKINNKIRDFMEKVMQIWKINIKLHHENGTIQINDVKIRRGIFQGDSLSPLLFVLSLNPLSSLINNLHNGYRIGSRNEKKGKNISHLFYMDDIKLYSPNKQQTIEQIEVVKKFSSDIQMEFGLDKCAFLELKKGKRIDSGNIRINDEIIRQLEQEDTYKYLGIEENEKIEHKKMKEKLKKEYEKRLKLILKSELKCKFKVEAVRTLAVPVLSYGFGIIDWFQEDLNKLDIKTRKMLHAHKLIYKNQCLARMYVPRDQGGMGLQEIDAVYREEVIGLTTYIEESDSKFIRWVKEHETGKAMRTSLTAKKRDYLRKYDIPNDDPTTEGMTKKEKMKHLRNEHRKARRKKHENNWKEHAFAKEYKNIIEQVYIDKEKSIEAVCRGNLRKEDERTIVGAQDLALRTNWFKREIEKENISNKCRMCKVSPETVSHILSSCDTLLQRKTYTERHNTICKLIHFRICEKYKIPIEASKYWEHNPNAIEENNHALILYDYSIPTDVPIRHNKPDIVVKDKRERKAYIIEIGIPWDGRVSAYETEKEVKYQTLKYSLQGMWNDIDRAEVIPVVIGSMGVIKKSLNQYIERLPVEVTTLEMSSIIIRQSARILRMVLGC

SEQ ID NO: 18276 - protein, 1438 aa, Trachelipus rathkii
MAGKNKNIKCQELGRPGAGPTSFLEGDEGGRSSDEQIKLSLPGNRKNTPVRCGILTPNTPLPPDESSERPKTSPDSSKQPKIQKKRCNPYNRRGGDRLEYTVEEKKEIFWCVTYGRHKMFPKKGTTKRTRNMLEQRGEIDKIKLERIPDARFASIATNINNKKTPITHEQIKQIEEEVDQYVEKMNKVEGEGEWEWTKEKNEYLMESYYIGMLIPEKEGKTDFWKYVVDNEIIGANDVMEYEFNKKYTGVERRKLIAQKQAIINFNKERNQGAIKKRKATLPTNEDLKEIERRAKERIKNEIQITPEMIGDIKQKSKETLYQGNRIKTGKNTEKSLEEQNKMTDNEDLIDGELDETEIVGEEISEAAEILNKEIMNRTDSESNNDSDTGSHYEETEEQGDEEIIENDRNENGDRMQEEEEMINKIAHYRDEDIYTNMEDRKGINKIDNWMKINKYAGIANRVLPRLLPERCDISEVNRLYYATARAITDLMGGKIFEKNRSNGRKKEQKPSWEIRLERDIARLRKEISLIKEYEEGNITIESKIRQAQNMIRRSRGRNRVTHAISSRKLELAAKAKRLSSYKKEEQRKRQNKMYQTDKGKFYRELRGENIKVDKPPERDRLDAFWRSIYEDQRTHNEEAEWLETTRRNPQIEEINEMEFEPLTEREVMEKIRRTSNWKTPGPDMVQNIWLKKITVLREPLTKCFNRILNGTAEIPEWMTKGETVLIPKTGETQNPGKYRPITCLPTIYKILTAIITERIYKHTIENNIIAEEQKGCSKGSHGTKDQLLINKMILEDSRQRQKNLSMTWIDYKKAYDSVPHSWIKEVLKIYKINNKIRDFMEKVMQIWKINIKLHHENGTIQINDVKIRRGIFQGDSLSPLLFVLSLNPLSSLINNLHNGYRIGSRNEKKGKNISHLFYMDDIKLYSPNKQQTIEQIEVVKKFSSDIQMEFGLDKCAFLELKKGKRIDSGNIRINDEIIRQLEQEDTYKYLGIEENEKIEHKKMKEKLKKEYEKRLKLILKSELKCKFKVEAVRTLAVPVLSYGFGIIDWFQEDLNKLDIKTRKMLHAHKLIYKNQCLARMYVPRDQGGMGLQEIDAVYREEVIGLTTYIEESDSKFIRWVKEHETGKAMRTSLTAKKRDYLRKYDIPNDDPTTEGMTKKEKMKHLRNEHRKARRKKHENNWKEHAFAKEYKNIIEQVYIDKEKSIEAVCRGNLRKEDERTIVGAQDLALRTNWFKREIEKENISNKCRMCKVSPETVSHILSSCDTLLQRKTYTERHNTICKLIHFRICEKYKIPIEASKYWEHNPNAIEENNHALILYDYSIPTDVPVRHNKPDIVVKDKRERKAYIIEIGIPWDGRVSAYETEKEVKYQTLKYSLQGMWNDIDRAEVIPVVIGSMGVIKKSLNQYIERLPVEVTTLEMSSIIIRQSARILRMVLGC

SEQ ID NO: 18277 - protein, 948 aa, Trachelipus rathkii
MGGKIFEKNRSNGRKKEQKPSWEIRLERDIARLRKEISLIKEYEEGNITLESKIRQAENMIRRSRGRNRVTHAISSRKLELAAKAKRLSSYKKEEQRKRQNKMYQTDKGKFYRELRGENIKVDKPPERDRLDAFWRSIYEDQRTHNEEAEWLETTRRNPQIEEINEMEFEPLTEREVMEKIRRTSNWKTPGPDMVQNIWLKKITVLREPLTKCFNRILNGTAEIPEWMTKGETVLIPKTGETQNPGKYRPITCLPTIYKILTAIITERIYKHTIENNIIAEEQKGCSKGSHGTKDQLLINKMILEDSRQRQKNLSMTWIDYKKAYDSVPHSWIKEVLKIYKINNKIRDFMEKVMQIWKINIKLHHENGTIQINDVKIRRGIFQGDSLSPLLFVLSLNPLSSLINNLHNGYRIGSRNEKKGKNISHLFYMDDIKLYSPNKQQTIEQIEVVKKFSSDIQMEFGLDKCAFLELKKGKRIDSGNIRINDEIIRQLEQEDTYKYLGIEENEKIEHKKMKEKLKKEYEKRLKLILKSELKCKFKVEAVRTLAVPVLSYGFGIIDWFQEDLNKLDIKTRKMLHAHKLIYKNQCLARMYVPRDQGGMGLQEIDAVYREEVIGLTTYIEESDSKFIRWVKEHETGKAMRTSLTAKKRDYLRKYDIPNDDPTTEGMTKKEKMKHLRNEHRKARRKKHENNWKEHAFAKEYKNIIEQVYIDKEKSIEAVCRGNLRKEDERTIVGAQDLALRTNWFKREIEKENISNKCRMCKVSPETVSHILSSCDTLLQRKTYTERHNTICKLIHFRICEKYKIPIEASKYWEHNPNAIEENNHALILYDYSIPTDVPIRHNKPDIVVKDKRERKAYIIEIGIPWDGRVSAYETEKEVKYQTLKYSLQGMWNDIDRAEVIPVVIGSMGVIKKSLNQYIERLPVEVTTLEMSSIIIRQSARILRMVLGC

SEQ ID NO: 18278 - protein, 1438 aa, Trachelipus rathkii
MAGKNKNIKCQELGRPGAGPTSFLEGDEGGRSSDEQIKLSLPGNRKNTPVRCGILTPNTPLPPDESSERPKTSPDSSKQPKIQKKRCNPYNRRGGDRLEYTVEEKKEIFWCVTYGRHKMFPKKGTTKRTRNMLEQRGEIDKIKLERIPDARFASIATNINNKKTPITHEQIKQIEEEVDQYVEKMNKVEEEGEWEWTKEKNEYLMESYYIGMLIPEKEGKTDFWKYVVDNEIIGANDVMEYEFNKKYTGVERRKLIAQKQAIINFNKERNQGAIKKRKATLPTNEDLKEIERRAKERIKNEIQITPEMIGDIKQKSKETLYQGNRIKTGKNTEKSLEEQNKMTDNEDLIDGELDETEIVGEEISEAAEILNKEIMNRTDSESNNDSDTGSHYEETEEQGDEEIIENDRNENGDRMQEEEEMINKIAHYRDEDIYTNMEDRKGINKIDNWMKINKYAGIANRVLPRLLPERCDISEVNRLYYATARAITDLMGGKIFEKNRSNGRKKEQKPSWEIRLERDIARLRKEISLIKEYEEGNITMESKIRQAQNMIRRSRGRNRVTHAISSRKLELAAKAKRLSSYKKEEQRKRQNKMYQTDKGKFYRELRGENIKVDKPPERDRLDAFWRSIYEDQRTHNEEAEWIETTRRNPQIEEINEMEFEPLTEREVMEMIRRTSNWKTPGPDMVQNIWLKKITVLREPLTKCFNRILNGTAEIPEWMTKGETVLIPKTGETQNPGKYRPITCLPTIYKILTAIITERIYKHTIENNIIAEEQKGCSKGSHGTKDQLLINKMILEDSRQRQKNLSMTWIDYKKAYDSVPHSWIKEVLKIYKINNKIREFMEKVMQIWKINIKLHHENGTIQINDVKIRRGIFQGDSLSPLLFVLSLNPLSSLINNLHNGYRIGSRNEKKGKNISHLFYMDDIKLYSPNKQQTIEQIEVVKKFSSDIQMEFGLDKCAFLELKKGKRIDSGNIRIEDQIIRQLEQEDTYKYLGIEENEKIEHKKMKEKLMKEYEKRLKLILKSELKCKFKIEAVRTLAVPVLSYGFGIIDWFQEDLNKLDIKTRKMLHAHKLTYKNQCLARMYVPRDQGGMGLQEIDAIYREEVIGLTTYIEESDSKFIRWVKEHETGKAMRTSLTAKKRDYLRKYDIPNDDPTTEGMTKKEKMKHLRNEHRKARRKKHENNWKEHAFAKEYKNIIEQVYIDKEKSIEAVCRGNLRKEDERTIVGAQDLALRTNWFKREIEKENISNKCRMCKVSPETVSHILSSCDTLLQRKTYTERHNTICKLIHFRICEKYKIPIEASKYWEHNPNAIEENNHALILYDYSIPTDVPIRHNKPDIVVKDKRERKAYIIEIGIPWDGRVSAYEREKEMKYERLKYSLQGMWNDIDRAEVIPVIIGSMGVIKKSLNQYIERLPVEVTTLEMSSIIIRQSARILRMVLGC

SEQ ID NO: 18279 - protein, 961 aa, Elymnias hypermnestra
MSNLVAPDTDKCSQTNDSVSGNLLKCNLCSQPRYFKGYRGLSIHVGKIHKKSLGATYSNPYNSSPASLSANKLSGNDFGNYLGYFKHNLPIVKRIPKGARITVAKALSKAINSVVAQNSKESWEHLLTFAYFILHSNKEGRSSLTASIKANCNNPVALQNLLSNAKFRPSTLKRKVEQKVSDGDLKGAAALLFSNDVIAPDCPETFSALKSKHPSPVLKDITSQPELEDVYLQAKHEDVLAAVMSFKNGSAAGLDGLSPQHLKDLLCRTTGEAGKTLLKDITLLINLMLSGRVHNEITNILYGANLCALKKKDGGIRPIAVGCTFRRLTSKICCKYIKPLANELLSPKQVGFGCRAGCEAAVHAARTFLGKGADDVLLKLDVKNAFNSLDRIALLTQMKKRTPQIYNYIQQCYGQTSKLYFNNNEIDSAVGCQQGDPLGPAMFSFAIHPIISKLSSEFNVWYLDDGTLGGKVNTILDDVKILIHEFHEIGLTLNFEKCELYLNTSFSEQQRLDTIREFNSLTPNIKIVDNTSLLLLGAPLLPDSIPAFIHNHISNFNQFTDRLTEIHPHVALTIIRFCLFVPQFTYFLRCSPLWMYTHLLDSLDNIVKNVLSTILNCFLDDRAWIQASLPIRYGGLGVRKISSVALPAFLASSYSTQNLVKNIVGNDLYNRINNIYLEDAKNAWFLACSSQNLPNILSSQKSWDEPLCKNVSFNLLQTSKNLTERARLLAVSERESGFWLHALPSASVGTLLDKTTLSLSTCLRLGVKTTEPHRCKCGEWVNQLGHHGLSCLRSAGRLPRHAGINDIIRRTLVTINVPAILEPNGIARDDGKRPDGMSLMPWKKGRSLVWDATCVDTLAPSHIDATSKSAGAAASLAENAKRRKYESLALEYIFVPFGVETLGPWGPEAKSFLKEISSHLVDVTRDPKAGWYFGQRISIAVQRGNAASLMGTHPFASDGAF

SEQ ID NO: 18280 - protein, 970 aa, Oikopleura albicans
MKRKNAQNSFPSPAGEYNPSRASKAPRILGEQLVYRSIPSDASPPLEAQSVSRNGDPPSPFLSFEDLGVNKNDYPRFLRPQVPSLVIINDQLKASATPVVDNATYVELLNFIKTKVSVSRRRKRGKSVRNTVNDRFNKDASKTVKDILGTPTSTALPSARNVRRFYNKLWVENTHPDLPQTPCTSQEIDWINALDVKDAIMTSKTKTAAGWSNVTMGQLKRFIRTNLDDLCVFFNALLRVDTLPSLLKKGRVSLLPKVSSAGDDPSLYRPLTVHCTLFRTLMKIIDVRLKQVLENADIISPYQLGLKSGTNGCAVGVISARAAVAHAQHNQRSIVVAALDMRKAFDTVKHRAIYDALIKARIPVYLINTILASLRGITRSIKTKNGLVFVKPTRGVAQGIAVSGTLFCLVTDIFRDVMVNEGYPLTDNIQAIPTVNQLYSGFMYHDDLMLADSSPYSIVHRVEKLVSLAEGIGLSLNWDKSSFFGTHRERTKAKKFTKLREDINIGQNVLKCVRCLTYLGGSLEMKRERPNFSNILSAKVDAIVNSKLSIKNKLTALKTHVFPTMLYKLSLHSTISYWRKSVRINKSRLYSTLDSVILNGIRSIMNIGAAGGTMKLVYVPYDMGGLGFTRYQDVVPGMRYRLMRSFDTSPSLSVIKRFCFADESQLFQHECGLNYKTREDRRSRVRLRKISEFTSLRNGAGNWCFSDPKVKYTSLCTPMLSGRSFLACFRLRSLLLGLKNNCRFCGRARETTIHLLCPYGNLRCNDRLKQYQINRHNYVSQLVFDNMAHQLNVPIGTVSLLKEESFVSGREQFRPDIVLIDKANFCVFVIDIQVTYGSKLQPNHMWCPDPTCDHSVLEGQAKKRIETLTIQGQKKVNKYRVYDSILEKLIPGEICTVFHMPIVVGAFGSYLTKYKSLTTMGKRNLEKLGVKTQLLHKIAAGGALRWGAVHLSNLLNNNIEPPLPRLRLDF

SEQ ID NO: 18281 - protein, 953 aa, Alatina alata
MIPFQETIEDDDLSDDSLHGDPNFKQGLKLPRSKDDWDFFESFVKAELPINQISDSTIDYNVSNFSTLVYNFLASNFGTVHRKPLNNDLFSSRYKCLSKSHLKKELMRLKNSIPKDVEAIKFVSRLLRQRLSNGQSSLSSGFVDHDFAIKRNFWDYVNKFVKDSQEKLQPTFTSMQCLNHFQKVFSSHIPKLKYVIPSWIPRLKDPQFDFNSTAPSYKEVTQAIRSMKSSGSPSPLDQIPIILFKRSPYLRSYITAVISVIWKSRTIPKDWKRAVTVLIHKRGSTDLPENFRPITLESVPLKIFTSVLRNRLFSYLKQNNFIESSVQKGFIKGISGTFEHTAHLAHVLKKAKLKQRSVFVTLLDLKNAFGEVNHSLIPTILEYHHVPDYVVQIVSNLYSHFYTSLTCDSFRSEFVQVGRGVLQGDCLSPLIFNLVVNSFIQYIKSDKFSQLGYSFSKLLKPRHWYQFADDAAVLSGQEHENQILLNAFSAWCTWSRMTIRVDKCKTFGLVKCNTLSKQVLPKLYLNGKLIPTVPINESFRYLGRYFNFEMNNSEHKNILIDTTDKILNKIDSLPLHPKNKLLLYQRFLLSKIAWHLTICDINITWIKTVLDLKCHNFFRRWLEIPPCGTLDIVMLSKNKFGLAIIDVSTKFTQCQVIMRKKLQGASDADIRHVFDTSKYRNAPYDSFKSSKAVLREIRDQKENRVNSELTSQGFIVKALNKECFKEHLQIWHKALDSLPRNIYNFTSRYLNNSLPTLKNLALWKQSGNSLCLSCLNPQTIQHVVSGCSVHLNEGRYNWRHDSVLKHIADFIRSCNLDLQLFCDVDGYQSPSVITGFDLRPDLIVNQDNKLFIVELTVGFETKLRDNFNRKAVKYKDLCSHLEKDYDVVFINLSMSAIGGIASDSKCFVEMLNNLRVPNKEYLIKKILICIIRTTYYIFCKRNLEWTNPDLLVW

SEQ ID NO: 18282 - protein, 727 aa, Alatina alata
MKSSGSPCPLDQISIILFKRSPYLHSFITAVITEIWKTGVVPPTWKRAITVLIHKKGSTDLPANFRPITLESVPLKIFTSVVRNRLYLYLKQNQFIESSIQKGFIKGLSGTFEHTAHLAQVLKKAKLKQRSVVVTLLDLKNAFGEVDHSLIPVILRYHKIPDFMIYAISNLYDQFYTSLTCENFHTDFVHVGRGVLQGDCLSPLIFNLVINTFVQYIKSQKFSQLGYSFSKLLQPRHWYQFADDACVLTGQEHENQILLNAFTAWCSWSRMTIRVDKCSTFGIVKYSTRSKQFLPKVFINSTLVPAVPLTESFRYLGRYFNFEMDNIDHKRILIETVDDILNKLDSLPLHPKHKLLVYQRYLLPKISWHLTICDINLTWVKNVLDFKCHNYFRRWLEIPPCGTLDIVLLGKNQFGLNLLDVSTKFVQCQVIMRKKLSSSDGPDIRYIFNDSKSNMIQYDRYQSSKEVIKDIRNHKEQRVTNCLTSQGFIVAALMKDGLKDHLDAWHKALNRLPRNIYNFTSRYLNNTLPTLKNLQLWKKTDNNLCFSCLCPQTLQHVVSGCSIHLQQGRYTWRHDSILSIIANHIRSIRNDISLFCDIPGYSSPSSITGDDLRPDMIVKSENTLYILELTVGFETNLRSNYERKETKYRDLCSNLQLKYDVHFINLSMSTIGGTYKLSNTFSNMLDTLRIDNKKYVLSKVISCAIRSTYFIFCRRDKDWPNPELLTW

SEQ ID NO: 18283 - protein, 847 aa, Alatina alata
MRLKNAIPKDVEAIKFISHLLRRKLSNGQSSLSSSCIDHDYAIKRNFWDYVKRFVKDSQENLKPTFTSLQCVDHFRKIFSCHLPKLKYVTPSWIPRLKDPQFDFNGKAPSYKEVTHAIRSMKSSGSPSPLDQISIILFKRSPYLRSYITAVISVIWKTRTIPTDWKRAVTVLIHKRGSTDLPENFRPITLESVPLKIFTSVLRNRLFYYLKQNSFIESSIQKGFIKSISGTFEHTAHLAHVLKKAKLKQRSVFVTLLDLKNAFGEVDHSLIPTILEYHHVPDYVVQIVNNLYSNFYTSLTCDSFHTEFVHVGRGVLQGDCLSPLIFNLVINSFIQYIKSDKFSQLGYSFSKLLKPRHWYQFADDAAVLSGQEHENQILLNAFSAWCTWSRMTIRVDKCKTFGLVKCNSLSKQILPKLYLNGKLIPTVPLSESFRYLGRYFNFEMDNSEHKKILVDTTDKLLNKIDSLPLHPKNKLLSYQRFLLSKIAWHLTICDINITWVKSVLDLKCHNFFRRWLEIPPCGTLDIVMMSKNKFGLAVVDISTKFTQCQVIMRKKLQRASDADIRHVFDISKYRHAQYDCFQSSKAVLRDIREQKENRVNTELTSQGFIVQALNKECFKEHLKIWHKALDSLPRNIYNFISRYLNNTLPTLKNLALWKQSGNSLCHSCLNPQTLQHVVSGCSIHLNEGRYNWRHDSVLKVIADFLHSSNQDITLYCDVDGYQSPSVVSGSELRPDLIVNKDNKLFFVELTVGFETKLGHNFNRKAVKYKDLCSQLERNFDVVFENLSMSAIGGIASESKCFMEMLNCLEISNKEYLIKKILICIIRTTYYIFCRRNSDWLQPDLLVW

SEQ ID NO: 18284 - protein, 1051 aa, Alatina alata
MKGISLFFFGLIFVVCNFCGKDFVSLGRHRWRCKAKHVVDPNLHEDTIRGEHHSINPDDVRSNSSHISCSCGKLCKNLRGLKAHQRSCRHIKGLSDELMIPFQETIEDDDLSDDTLHGDPNFKQGLKLPRSKDDWDFFESFVKAELPINQISDSTIDYNVSNFSTLVYNFLASNFGTVHRKPLNNDLFSSRYKCLSKSHLKKELMRLKNSIPKDVEAIKFVSRLLRQRLSNGQSSLSSGFVDHDFAIKRNFWDYVNKFVKDSQEKLQPTFTSMQCLNHFQNVFSSHIPKLKYVIPSWIPRLKDPQFDFNSTAPSYKEVTQAIRSMKSSGSPSPLDQIPIILFKRSPYLRSYITAVISVIWKSRTIPKDWKRAVTVLIHKRGSTDLPENFRPITLESVPLKIFTSILRNRLFSYLKQNNFIESSVQKGFIKGISGTFEHTAHLAHVLKKAKLKQRSVFVTLLDLKNAFGEVDHSLIPTILEYHHVPDYVVQIVSNLYSHFYTSLTCDSFRSEFVQVGRGVLQGDCLSPLIFNLVVNSFIQYIKSDKFSQLGYSFSKLLKPRHWYQFADDAAVLSGQEHENQILLNAFSAWCTWSRMTIRVDKCKTFGLVKCNTLSKQVLPKLYLNGKLIPTVPINESFRYLGRYFNFEMNNSEHKNILIDTTDKILNKIDSLPLHPKNKLLLYQRFLLSKIAWHLTICDINITWIKTVLDLKCHNFFRRWLEIPPCGTLDIVMLSKNKFGLAIIDVSTKFTQCQVIMRKKLQGASDADIRHVFDTSKYRNATYDSFKSSKAVLREIRDQKENRVNSELTSQGFIVKALNKECFKEHLQIWHKALDSLPRNIYNFTSRYLKNSLPTLKNLALWKQSGNSLCLSCLNPQTIQHVVSGCSVHLNEGRYNWRHDSVLKHIADFIRSCNLDLQLFCDVDGYQSPSVITGFDLRPDLIVNQDNKLFIVELTVGFETKLCDNFNRKAVKYKDLCSHLEKDYDVVFINLSMSAIGGIASDSKCFVEMLNDLRVPNKEYLIKKILICIIRTTYYIFCKRNSEWTHPDLLVW

SEQ ID NO: 18285 - protein, 847 aa, Alatina alata
MRLKNAIPKDVEAIKFISHLLRRKLSNGQSSLSSSCIDHDYAIKRNFWDYVKRFVKDSQENLKPTFTSLQCVDHFRKIFSCHIPKLKYVIPAWIPRLKDPQFDFNGKAPSYKEVTHAIRSMKSSGSPSPLDQISIILFKRSPYLRSYITAVISVIWKTRTIPTDWKRAVTVLIHKRGSTDLPENFRPITLESVPLKIFTSVLRNRLFYYLKQNSFIESSIQKGFIKGISGTFEHTAHLAHVLKKAKLKQRSVFVTLLDLKNAFGEVDHSLIPTILEYHHVPDYVVQIVNNLYSNFYTSLTCDSFHTEFVHVGRGVLQGDCLSPLIFNLVINSFIQYIKSDKFSQLGYSFSQLLKPRHWYQFADDAAVLSGQEHENQILLNAFSAWCTWSRMTIRVDKCKTFGLVKCNSLSKQILPKLYLNGKLIPTVPLNESFRYLGRYFNFEMDNIEHKKILVDTTDKLLNKIDSLPLHPKNKLLLYQRFLLSKIAWHLTICDINITWVKTVLDLKCHNFFRRWLEIPSCGTLDIVMTSKNKFGLAVVDISTKFTQCQVIMRKKLQRASDADIRHVFDISKYRHAPYDCFQSSKAVLREIREQKENRVNTELTSQGFIVQALNKECFKEHLKIWHKALDSLPRNIYNFTSRYLNNTLPTLKNLALWKQSGNSLCHSCLNPQTLQHVVSGCSIHLNEGRYNWRHDSVLKIIADFLHSSNQDIKLYCDVDGYQSPSVVSGSELRPDLIVNKDNKLFIVELTVGFETKLGHNFNRKAVKYKDLCSELERNFDVVFVNLSMSAIGGIASESKCFMDMLNCLEISNKEYLIKKILICIIRTTYYIFCRRNSDWLQPDLLVW

SEQ ID NO: 18286 - protein, 1001 aa, Alatina alata
MFTKERNISDVKKKNYYYYYYHYYYYYLRGLKAHQRSCRHIKGLNDELLIPLQETIEDDDLTDNYLHGDPNFKQGLKLPRSTNDWDFFESFVKAELPIGQISDSTIDHDISNFSTSVYNFLASNFGTVHRRPLNNDLLASRYNSLSKSYLKKELMRLKNAIPKDVEAIKFISHLLRRKLSNGQSSLSSSCIDHDYAIKRNFWDYVKRFVKDSQENLKPTFTSLQCVDHFRKIFSCHIPKLKYVIPAWIPRLKDPQFDFNGKTPSYKEVTHAIRSMKSSGSPSPLDQISIILFKRSPYLRSYITAVISVIWKTRTLPTDWKRAVTVLIHKRGSTDLPENFRPITLESVPLKIFTSVLRNRLFYYLKQNSFIESSIQKGFIKGISGTFEHTAHLAHVLKKAKLKQRSVFVTLLDLKNAFGEVDHSLIPTILEYHHVPDYVVQIVNNLYSNFYTSLTCDSFHTEFVHVGREVLQGDCLSPLIFNLVINSFIQYIKSDKFSQLGYSFSQLLKPRHWYQFADDAAVLSGQEHENQILLNAFSAWCTWSRMTIRVDKCKTFGLVKCNSLSKQVLPKLYLNGKLIPTVPLNESFRYLGRYFNFEMDNIEHKKILVDTTDKLLNKIDSLPLHPKNKLLLYQRFLLSKIAWHLTICDINITWVKTVLDLKCHNFFRRWLEIPSCGTLDIVMMSKNKFGLAVVDISTKFTQYQVIMRKKLQRASDADIRHVFDISKYRHAQYDCFQSSKAVLRDIREQKENRVNTELTSQGFIVQALNKECFKEHLKIWHKALDSLPRNIYNFTSRYLNNTLPTLKNLALWKQSGNSLCHSCLNPQTLQHIVSGCSIHLNEGRYNWRHDSVLKVIADFLHSSNQDITLYCDVDGYQSPSVVSGSELRPDLIVNKDNKLFIVELTVGFETKLGHNFNHKAVKYKDLCSQLERNFDVVFVTLSMSAIGRIASESKCFMEMLNCLEISNKEYLIKKILICIIRTTYYIFCRRNSDWLQPDLLVW

SEQ ID NO: 18287 - protein, 1051 aa, Alatina alata
MKGISLFFFGLIFVVCNFCGKDFVSLGRHRWRCKSKHVVDPNLHEDTIRGEHHSINPDDVRSNSSHISCSCGKLCKNLRGLKAHQRSCRHIKGLSDELMIPFQETIEDDDLSDDTLHGDPNFKQGLKLPRSKDDWDFFESFVKAELPINQISDSTIDYNVSNFSTLVYNFLASNFGTVHRKPLNNDLFSSRYKSLSKSHLKKELMRLKNSIPKDVEAIKFVSRLLRQRLSNGQSSLSSGFVDHDFAIKRNFWDYVNKFVKDSQEKLQPTFTSMQCLNHFQKVFSSHIPKLKYVIPSWIPRLKDPQFDFNSKAPSYKEVTQAIRSMKSSGSPSPLDQISIILFKRSPYLRSYITAVISVIWKTRTIPKDWKRAVTVLIHKRGSTDLPENFRPITLESVPLKIFTSVLRNRLFYYLKQNNFIESSIQKGFIKGMSGTFEHTAHLAHVLKKAKLKQRSVFVTLLDLKNAFGEVDHSLIPTILEYHHVPDYVIQIVNNLYSHFYTSLTCDSFRSEFVQVGRGVLQGDCLSPLIFNLVVNSFIQYIKSDKFSQLGYSFSKLLKPRHWYQFADDAAVLSGQEHENQILLNAFSAWCTWSRMTIRVDKCKTFGLVKCNTLSKQVLPKLYLNGKLIPTVPINESFRYLGRYFNFEMNNSEHKNILIDTTDKILNKIDSLPLHPKNKLLLYQRFLLSKIAWHLTICDINITWIKTVLDLKCHNFFRRWLEIPPCGTLDIVMLSKNKFGLAIIDVSTKFTQCQVIMRKKLQGASDADIRHVFDTSKYRNAPYDSFKNSKAVLREIRDQKENRVNTELTSQGFIVKALNKECYKEHLQIWHKALDSLPRNIYNFTSRYLNNSLPTLKNLALWKQSGNSLCLSCLNPQTIQHVVSGCSIHLNEGRYNWRHDSVLKHIADFIRTCNLDLQLFCDVDGYQSPSVITGFDLRPDLIVNQDNKLFIVELTVGFETKLRVNFNRKAAKYKDLCSHLEEDYDVVFINLSMSAIGGIASDSKCFVEMLNNLRVPNKEYLIKKILICIIRTTYYIFCKRNSEWTHPDLLVW

SEQ ID NO: 18288 - protein, 847 aa, Alatina alata
MRLKNAIPKDVEAIKFISHLLRRKLSNGQSSLSSSCIDHDYAIKRNFWDYVKRFVKDSQENLKPTFTSLQCVDHFRKIFSCHIPKLKYVIPAWIPRLKDPQFDFNGKAPSYKEVTHAIRSMKSSGSPSPLDQISIILFKRSPYLRSYITAVISVIWKTRTIPTDWKRAVTVLIHKRGSTDLPENFRPITLESVPLKIFTSVLRNRLFYYLKQNSFIESSIQKGFIKGISGTFEHTAHLAHVLKKAKLKQRSVFVTLLDLKNAFGEVDHSLIPTILEYHHVPDYVVQIVNNLYSNFYTSLTCDSFHTEFVHVGRGVLQGDCLSPLIFNLVINSFIQYIKSDKFSQLGYSFSQLLKPRHWYQFADDAAVLSGQEHENQILLNAFSAWCTWSRMTIRVDKCKTFGLVKCNSLSKQILPKLYLNGKLIPTVPLNESFRYLGRYFNFEMDNIEHKKILVDTTDKLLNKIDSLPLHPKNKLLLYQRFLLSKIAWHLTICDINITWVKTVLDLKCHNFFRRWLEIPSCGTLDIVMMSKNKFGLAVVDISTKFTQCQVIMRKKLQRASDADIRHVFDISKYRHAPYDYFQSSKAVLREIREQKENRVNTELTSQGFIVQALNKECFKEHLKIWHKALDSLPRNIYNFTSRYLNNTLPTLKNLALWKQSGNSLCHSCLNPQTLQHVVSGCSIHLNEGRYNWRHDSVLKIIADFLHSSNQDIKLYCDVDGYQSPSVVSGSELRPDLIVNKDNKLFIVELTVGFETKLGHNFNRKAVKYKDLCSELERNFDVVFVNLSMSAIGGIASESKCFMDMLNCLEISNKEYLIKKILICIIRTTYYIFCRRNSDWLQPDLLVW

SEQ ID NO: 18289 - protein, 1049 aa, Alatina alata
MKTIGFLAFALLFVVCDFCGLNFVSLGRHQWRCRSRTTREPDLNSIETIEGLEDSIRQGVPTNQTDHVLCTCGKRCKNLRGLKAHQRTCRNVNSLNDELIIPDQTATDDNITVSDFLPENPYFKTGVKLPRSSEDWLLLDSFLKAELPISTISSSDLDLTIRQLYEKLYDFLATNFGTVDSSSYEFTALYNHLSKAQLRKELKKLKHNSPRDVPAIKYVARRLRQTLSNGSSFTASVSVDHNEEIKRNFWDYVKRFVNVSRETPKATFTSAQCVQHFKKVLSTHFPVFNYIIPSWIPVLPDPKSNFNGEPPSYLEVTRAIRRMKSNGSPCPLDQISILLFKRSPFLRTYLTAVIEQVWKTRTVPKIWKRAVTVLIHKKGSTDLPENFRPISLESVPLKIFTSVLRNRLYDYLKTNKFIETMIQKGFTKGISGTFEHTAHLANLIRNAKLKQRSIFVTLLDLKNAFGEVDHKLIPVILKYHHIPDYIISMITNLYSDFYTSLTSDKFRTEFVHVGRGVLQGDCLSPLLFNLVVNTFIQYIRSDKFTQLGYNWDKYFKPRHWYQFADDAAVVTGQEYENQILLNAFSAWCTWSRMIVRVDKCQSFGIIKSNTLSKQILPKLYINGNLIPSIEINSSFRYLGRYFNFEMNNNDHKLILNDMIDKILTKIDSLPLHPKNKFLLYQRYLLPKISWHLTISDISITWIKSNLDMKCHNYFRRWLEMPACATLDVIMMSKHKFGLNLTELSTKFKQCQVIIRRKLQGASEPDIRQIYDLTHIKFIQYDHYKTSKEVVKEMRNLKEDRITNTLTSQGFIVKALLKECFKDHLDSWHKTLNSLPKNIYNFTCRYLNNSLPTLKNLQLWKQSDSSQCFFCLETQTLQHVVSGCVNHLEQGRYNWRHDSVLSIIANYVKDASYGFTIFCDLDGYPSPSTITGESLRPDLIIRKNNSLYILELTVGFETNLNINYNRKSLKYADLCTDLKKLFDVHFVNLSLSAIGGIASNSKEFVDLLHSLKIINPDYLCKKILACTIRCTYYLFCIRNKEWTQPELLNW

SEQ ID NO: 18290 - protein, 1005 aa, Alatina alata
MSTDDATGTVQSINPEVRANSNYVTCCCGKRCKNLRGLKAHQRTCRNINSLNDELLIPDQTSSDCDSDVLASLPENPFFKSGVKLPRSSQDWDFLELFLKAELPLSHISTMDSDLLIRQFYDKVYDFLATNFGTVYSSSKDFATIYDSLSKSQLRKELKRLKHESPPNVPAIKYVARLLRKSLSNNSSLTTSVLIDHNQEIKNNFWNYVKRFLVESNEAPKPTFTAAECVRHFKRVLSRHFPVFDYIIPSWIPKLHNPQLTFNGEPPSYQEITRSIRKMKSSGSPCPLDQISILLFKRSPYLRTYITAVIAQIWKTQNIPTIWKRAVTVLVHKKGSTDLPENFRPISLESVPLKIFTSVLRNRLYSYLKSNKLIETTVQKGFVKGISGTFEHTAHLSHIIRNAKLKQRSVFITLLDLKNAFGEVDHKLIPAILKYHHIPDYVIAMIVNLYSNFYTSLAGTNFHTEYIHVGRGVLQGDCLSPLIFNLVVNTFIQYIKSDNFAQLGYDWDKFFKPRHWFQFADDAAVVTGQQYENQILLNAFSAWCTWCRMMIRVDKCQSFGIIKSNTLSKQILPKLFINGALIPAVAIDNSFRYLGRHYNFKMDNANHKAILSDTVEKILNKTDALPLHPKNKLLIYQRFLLPKISWHLTICDINKTWIKNVLDLKCHNFFRRWLEIPPCGTLDIALLGKSRFGLNLLDVSTKFVQCQVLMRKKLQGASDADIRRVFDITKNRNVQYDCFKNSKAVLQEIRKEKENRINTELTSQGFIVQALNKECFKEHLQIWHKALNSLPRNIYNFTSRYLNNTLPTLKNLTLWKQSENSLCHFCLNPQTLQHVVSGCSYHLNEGRYNWRHDSVLKIIADFLRSCNHDLNIYCDVDGYQSPSILSGCNLRPDLIVKQDNNLFIVELTVGFETKLRDNFNRKLAKYKNLCSSLEKDFNISFINLSMSAIGGIASDSKCFMDMLNRLQIPNNEYLLRKVLVCIIRTTYYIFCRRNLEWLKPDLLTW

SEQ ID NO: 18291 - protein, 1063 aa, Alatina alata
MGRSSFTFVFAILVICSFCSLNFNSLGRHSWRCKARIYKKPLENSNHLNQSEDAVLDRMSTDDATGTVQSINPEVRANSNYVTCCCGKRCKNLRGLKAHQRTCRNINSLNDELLIPDQTSSDCNSDVLASLPENPFFKSGVKLPRSSQDWDFLELFLKAELPLSHISTMDSDLLIRQFYDKVYDFLATNFGTVYSSSKDFATIYDSLSKSQLRKELKRLKHESPPNVHAIKYVARLLRKSLSNNSSLTTSVLIDHNQEIKNNFWNYVKRFLVESNEAPKPTFTAAECVRHFKKVLSRHFPVFDYIIPSWIPKLHNPQLTFNGEPPSYQEITRSIRKMKSSGSPCPLDQISILLFKRSPYLRTYITAVIAQIWKTQNIPTIWKRAVTVLVHKKGSTDLPENFRPISLESVPLKIFTSVLRNRLYSYLKSNKLIETTVQKGFVKGISGTFEHTAHLSHIIRNAKLKQRSVFITLYDLKNAFGEVDHKLIPVILKYHLIPDYVIAMIVNLYSNFYTSLAGTNFHTEYIHVGKGVLQGDCLSPLIFNLVVNTFIQYIKSDKFAQLGYDWDRFFKPRHWFQFADDAAVVTGQEYENQILLNAFSAWCTWCRMMIRVDKCQSFGIIKSNTLSKQILPKLFINGALIPAVAIDNSFRYLGRHYNFKMDNANHKAILSDTAEKILNKTDALPLHPKNKLLIYQRFLLPKISWHLTICDINKTWIKNVLDLKCHNFFRRWLEIPPCGTLDIALLGKNRFGLNLLDVSTKFVQCQVLMRKKLQGASDADIRRVFEITKNRNVQYDCFKNSKAVLQEIRKEKENRINTELTSQGFIVQALNKECFKEHLQIWHKALNSLPRNIYNFTSRYLNNTLPTLKNLTLWKQSENSLCHFCLNPQTLQHVVSGCSYHLNEGRYNWRHDSVLKIIADFLRSCNHDLNIYCDVDGYQSPSILSGCKLRPDLIVKQDNNLFIVELTVGFETKLRDNFNRKLAKYKNLCSSLEKDFNVSFINLSMSAIGGIASDSKCFMDMLNRLQIPNNEYLLRKVLVCIIRTTYYIFCRRNLEWLKPDLLTW

SEQ ID NO: 18292 - protein, 1063 aa, Alatina alata
MGRSSFTFVFAILVICSFCSLNFNSLGRHSWRCKARIYKKPLENSNHLNQSEDAVLDRMSTDDATGTVQSINPEVRANSNYVTCCCGKRCKNLRGLKAHQRTCRNINSLNDELLIPDQTSSDCDSDVLASLPENPFFKSGVKLPRSSQDWDFLELFLKAELPLSHISTMDSDLLIRQFYDKVYDFLATNFGTVYSSSKDFATIYDSLSKSQLRKELKRLKHESPPNVPAIKYVARLLRKSLSNNSSLTTSVLIDHNQEIKNNVWNYVKRFLVESNEAPKPTFTAAECVRHFKKVLSRHFPVFDYIIPSWIPKLHNPQLTFNGEPPSYQEITRSIRKMKSSGSPCPLDQISILLFKRSPYLRTYITAVIAQIWKTQNIPTIWKRAVTVLVHKKGSTDLPENFRPISLESVPLKIFTSVLRNRLYSYLKSNKLIETTVQKGFVKGISGTFEHTAHLSHIIRNAKLKQRSVFITLLDLKNAFGEVDHKLIPVILKYHHIPDYVIAMIVNLYSNFYTSLAGTNFHTEYIHVGRGVLQGDCLSPLIFNLVVNTFIQYIKSDKFAQLGYDWDRFFKPRHWFQFADDAAVVTGQEYENQILLNAFSAWCTWCRMMIRVDKCQSFGIIKSNTLSKQILPKLFINGALIPAVAIDNSFRYLGRHYNFKMDNANHKAILSDTVEKILNKTDALPLHPKNKLLIYQRFLLPKISWHLTICDINKFWIKNVLDLKCHNFFRRWLEIPPCGTLDIALLGKNRFGLNLLDVSTKFVQCQVLMRKKLQGASDADIRRVFEITKNRNVQYDCFKNSKAVLQEIRKEKENRINTELTSQGFIVQALNKECFKEHLQIWHKALNSLPRNIYNFTSRYLNNTLPTLKNLTLWKQSENSLCHFCLNPQTLQHVVSGCSYHLNEGRYNWRHDSVLKIIADFLRSCNHDLNIYCDVDGYQSPSILSGCKLRPDLIVKQDNNLFIVELTVGFETKLRDNFNRKLAKYKNLCSSLEKDFNVSFINLSMSAIGGIASDSKCFMDMLNRLQIPNNEYLLRKVLVCIIRTTYYIFCRRNLEWLKPDLLTW

SEQ ID NO: 18293 - protein, 1207 aa, Alatina alata
MKRIKERWDSEFPNKKRTAQNLVDNAKRFAKEGWGKEEETVIQTIEVQKNIEWSTEMKLKLLLIDGEEREKGRGFMKRVKERWDVEYPEHAIASMQKLRDNASRFKKEPEIRNLILVKRRDKVASEKDNEQQEEENQETMLEHVSDLGAAGESVDLRESIESTGTRDIGVVDEELQQLFNQQLQDLKCSTKFEIEPRKRLCKLKLPTDIQDSADKILGQYLQVDDTIPEITDKVYAMGKAIAEKLGIVQNKEKMRMKQRPINGNRRERKLKTEMRELRQIIARASNELHRRKVRRKATVKEKKLLKELQIAMNGAEPTMSALRMHKEKWIDQLRYKIVKLQKMQERSNRIMDNALFERDQKSFFKKIEGNATHVGQLPEMEKFLEFWGGIWETDAKTPELPWMEKVREDLMGEIEHVKTFNITEKELVAEVKKKKNWTAPGIDGIQNFWWKRLKTAQKALRRAFVKITDDNNLIPVWWPSGRTVLIPKMKDLSDEKTFRPITCLNTSYKLLTGFIGKYMRDHAVENDIWDEGQLGAVEGVLGTVDQLIIDRCIMEEVRMHHRNLAVAFYDYKKAYDKVHHDWMLRVYNWFGIPSNVISLLRELMRKWKTRLEIWNQGEKKISRWINITCGFLQGDSFSPVGFCLSEVPVCRLLQETKGYRMGEPEMRDVVRTHSLFVDDLKVYQESHKNLKDVNEMIVQASHDTGACYGVAKCAEVVFERGKMVKGEGLQVLEEKMKTMDPDQKEIYRFLGIEQADGIKTKDVYNRVINEVLRRLKLLTKTELNDKNLIRAINTKVIPVAAYPMNVCKFSKRELLELDQVIKRELRKNNMLGRQSSDERLYMKRSIGGRGLKSLREVFEETRLRVVCYMVKSSNRWIKAAWKRETLKESSSIIHEAITTMQSVGKSLNFEGDFVVLDGKKIDKSWKQTWKEVKVCLQQGVEVRRREVYYQKDMQSEMFRKQDQMCNLWLDQGLTPRKTASIITMLEKMVETRSWKEARGLIESSKCRLCGEQKETVEHLLAGCKRLAGSEYLLRHNRALMVFAASWAKEYNLLEKDVKWYKEKWPRGYVLENDRAKLVWDFEFNLRKTTTSRRPDLILEDKKKKNIMICDMACPQETNLELKREEKRLKYRQLAFELRERRIGHSINIVPLVIGALGGGVKETIKEVERIYGKSDVCVKIVGEMQKTILMDSESTIRKVLSGLVQGD

SEQ ID NO: 18294 - protein, 1599 aa, Pardosa pseudoannulata
MAGNASPPKSSLADVLANSPVFTPTPVGNPGPSRQSSGPISKRTRSQQFSKPTNYAGCGSGRVLTPPSYSLSQDQRISSRATSLSSANFRRFPFQSRTFNRSDANSVDHTSDDYYNGPYPGDSCRTGKYLHILFPVKRILYCSEKNCLKAFPFRQWSDARKAICSHLESQHGICDLKIVRWCSLCKQQSSKRISNHHCMKGKYFYLIPDRDVVGNLFECQRCFYSCARESALAKHKCTDSLSSPSPSKDNFNTSPLPSTPRPQHCVEPAPQGNVSASSSTSAVTPTFNHANTYSQSTPCSQPRCTESRGIATDASIATSPPPAHSATFYLLTPPSGSLVNCDDVPLDLSPQRGPSPGNYSSSEGSLITVPSACTSPLYEGNHSPGLDSSHSPPAVAPVLPLDIPVTTTPLLNESASSGASSSGISLEVGSPGSLADFLTPPPMPQRRPTTSTNFTGHHSPIPTMVVNSSPRDNQPQPSSMPENICRVGNRVHFLFPTTTTMYCTEEMCRTSFTCKKWSATKQSLLRHLEVVHGVRSVEVIRWCTICQNTISNPVISYHPCLNNVPLFSSNPTDSSNVYSCRRCDFRCPTSIGIKNHARTHRRDDLVAMRENLASASLSQATSNANESLIINDDTGLSEEDPQSQRSIGSLPGASQVSTAVSDAADSLSSNQDEDSPSAAYAARFKELLDRSNGPEWDEFTALLFEYVEFVKTHNGFSSSSTSFPPKSRNQSATDPRFIQKLYRKNRRRAVRLILGEDSRRCDLPVEQLSSHFFPESHPAISNEIFMYDSPPASPVSMDYFHPLEVWGKLRKSENTAPGPDGLTYHHWRTSDPDALTLTHIFNLCLHFRRVPLEWKFSKTILIPKNEDGSNPSDWRPIALSSTIAKLFTGCIARRLTTWALDQSRISPCQKGFMPFDGAFENTYLLEKRIQDARAAGRELCICSLDISNAFGSIPHPAILSALNEAGVGNGFLDLISDLYENTSTSIISGDSNSEAIPITSGVKQGCPLSGILFNFAIDPLLRALQNEDSVHRVLAFADDVVLIADSPGDLQNLLNRAFSVASAIGLTFNPAKSTSFHLGTNPTGCRSTQFHLNNVEIPYLSDGEPGTFLGKPFGYSLVKDPSDTGAIKEAGLNILSSFLAPWQRVDALKTFVIPSALYAQRTAQLDKTGWREIDEAFRPHIKNTLNLPPTAANDYIYGDPQRGLLGVSSLADDSDIACVDSAFKLLCSRDLRLRTIAWDDLMRTTYCRFDREVSYNDCADFLSGVEIRGTSNRISNVWTRARLASSRLQVTWLLQDDLTASLCHNGKTLSDRTKIFKTIRASLRDFYFKSLAEKAHQGKTLPGYSQARASSHFLRTGEFTRFADWRFIHRARLGLLPLNGHNINSTDKRCRRCGYVTETLPHVVCHCKRFLPAITRRHNNIVERVKVAAARNWSTYRENQQVAGLPLRPDLVLVKDDTALIIDITVPFENGSDAFPAARRRKIEKYRPVADFLRQRFRNVETHAICVGALGSWDRTNDATIRKLCSKKYARQMRKLIVSDTIRFSRDIYTEFLTGIPQNTTIWRNPNAVAISSGLQDARNSVVDNDHQDDDLASTSNNN

SEQ ID NO: 18295 - protein, 1596 aa, Pardosa pseudoannulata
MDSHQPSSSDTTNSFATVLMQTPSNSPGSYIPVPTSRPSSGPVCNRTRSRINPCLIPGFARANADVIPPFSNLAPPTASGHASNTCSPGPSHQVVSPKPVPSGLWNSDKKYRSRSYQSGTTLRKCPESSCRIDTDLHLVFPMRHILECTEEGCFKVFPFRQYSAGKKALWNHLRTVHNIVNLNIIRWCSICLSPTSARISNHHCLIGKHFYVVPEHEIVGHAFECSKCFFSCARESGILKHNCSANTASLPVVQVDSPHTIAPTQSSTHAVPEIPHGTFELLSPERLVFSPVHSSPLSHSPILMPNFTCSESIAGTNSAHTTHASSVYLRRTPPSGSNDPSNTPLDLSPRGPCGSLRSSSSSGSFITVPSLEGSLVVSDDQPVMEHSPVPLSNPNPSTAVSPAISCPSSPSMNDARSQHSSSAISLAISSPGSLADFTSPQRPPLARDGLSPSTGSSFVMPLNASSSQTMSTLSMTQSSTGQIMPASNCRTGHDVHFLFPTAKTLVCTEPSCSASFTGQKWSAAKQSLLRHLEVVHHLARLNVIRWCTVCGERIQSAIISSHLCLLGVPLTVDNPHVNDQLNKYSCRRCDFKCSTATGIKNHARVHRRSDIVCLQGTSNAAESLPNDPLANEAPGDDQFPTSSVPLTESQYSTQSNPSQHGDSQAPIADFSTEPTMTSSNNSVDSPSAAFTQKFTDLINLFENASWDEFTNCLDEYIEFVKLTNNFRTSESPPPDNRQRSASDPAFIQKLYRKNRRRAVRVILGDQGKKCNLPTELIAEHFFSTNDANINGDIFTYDSPPSAPLDITPFHHLEVWNRLKKAENTAPGPDGLTYHHWRVADPEALTLSVIFNLCAHFKKIPNTWKSAKTIFIPKNDDGSNPSDWRPIALGSTIAKLFSGCIAKRLTNWAITNERISPCQKGFMPYDGAFENIYIIEKRIQEARTSGRELCLCSLDISNAFGSIPHEAIFAALREAGVGDDFLQIIQDIYQDSSTTLLSGDSLSDAITISAGVKQGCPLSGILFNFAIDPLLRAIQGEENNHRILAFADDLILIAEQPSDLQPLINRSYSVAQAIGLSFNPSKCFTMHLGSNPTGCVATQFYLEENNIPFLSDGESGRFLGKSIGYSLVKDPNDISALREAGTGILSSFLAPWQRLDALKTFVYPSALYAQRTAQLDKTSWREIDDEFRPLIKNTLYLPTTAANEYLYGNSQRGLIGIPSLADDSDIALIDSAFKLLTSKDLRLREIAWDDLLRTTYSRFDREVSHNDCADFLSGTEIRGTSNRISNVWTRARKASTRLGVKWNLNDDRSINIAYLGKTIKDRTKIFKILRSTTRDLYSDDLAKKPHQGKTMPCFSLAKASSHFIRTGDYTRFADWRFIHRARLGLLPLNAHNQSSTDKRCRRCGYQLESLPHVICHCNRYLPAITRRHNNIVERIKVAAAGKWTIARENQQVAGHTLRPDLVLVSGDTALILDITVPFENGVDAFAAARRRKIEKYRPVAESLKQRYKNVEIHAIVVGALGSWDRANDATIRKLCSKKYDQTLRKLITSDTIRFTRDIYTEFLTGTPQNTTIWRNPNTDVIMSEIQEARDLAGPNNN

SEQ ID NO: 18296 - protein, 1110 aa, Paralithodes platypus
MLRSPTRWCGWMELEVGGVAKELDVGIVENLPVGGVDLLLGNDFAVPASKVSPLVVAEKAADVSREEQEWVEKCSVQTMACVVTRSQTSGALQPPPQSIKPRRKGHKKTGSVGQLESFEPAVFLGDSLLAPMLESGEAPGPVTASAGAGQEETLRQHRYAQREERMAQRDIGGGNKLFKMNLDNLAPADICSLQLEDPEVRACGNGAVELESDGDAQPGDFFLSEGILYRRHQDPKKKWDGGSGLVDQLVVPRVCRESLLRLAHDVPLAGHLGARKTEAALSKLFWWPGLKASVVSWVSQCHTCQVVGKPNQVIPRAPLQPIPVIGPPFSKVVIDMVGPLPPTSAGNKFLLTVMDVATRYPDAYPMRNGMAKTVVKNLLVYFSRYGYPQEIQSDQGSNFTSALFKQTMQQHGIVSVVSSAYHPESQGVLERWHSTLKSMLRCYCMENGKDWDLGLPYVLFAAREVPGESLGFSPNELVFGHRVRGPLHIVKEIWEGVTKPCSLLKYVVESRERMLKSLEVAGRNLKSSQAQMKDRYDQKVKGQHLRPVQLGFETSEGCEAAVHATRTYLSQAQEKRVLLKIDMRNAFNSIRRDVFLRAAQEHIPTLYPLLWQAYSKPSILMFGETVIPSATGLQQGDPGGPALFSIGVDAAANKVRSELNVWYLDDATLGGSVENVLTDLNNIVTDLGQAGLVINDTKCELVLLNHTREQGEETQALFRDILPDVKILQEHQQTLLGSPLTLAAIPPALQVKKEELQRLVSRLIHIDAHSALALLKNCFSIPKLQYLLRTSMTYTNNGGLQELDSIIREAVTSITNVEFKERAWTQATLPVRLGGLGIRRASDIASPAFISSLIATNDLVVSILSSQPGMTLNGDVTAAINTWKGSTGVEEEPQGTSRSKQKAWDTISAKKTQENLLTNADQVAKARLQAAARSESGLWLHAIPIPPLGTHLDAEALRVAIALRVGAAVCHPHTCKCGGGMDAQGHHALSCNYNAGRLPRHSALNDVIKRALQSANRASILEPHGLHREDGKRPEGMTTFPYKNGRCLVWDATCVDTFSTTNIARNADEAGEAARIAENKKREKNIKPSPEIISSSPWHSKLQKSSALPP

SEQ ID NO: 18297 - protein, 996 aa, Rhopilema esculentum
MECYVASEPNKRGYRKRMVNIWRSRNLAQVSEQRLLDQVRQIRLKGWITELEMEEIKRQKTIEGNRGDDESQGESVESDANNRREEIQIEYDDNVQQNNETGAAENGARNFDDEEFSDEEIAIAERLFEVLHQPERTKLPALRGLNKSSVKIEVEKMNSLLGKIRSENITATNDLLYAASVVTTERLGVKITRKKRQGEPMWKRRLQKQVKYLRKDLSRVEELRKGKTIKTRFQEQLQRKYWLKEKGLITVSEELKQRITAKSGKITRYQARIDQFRQNRLFRENQSRFYDELNGGERNEVRPEKEETMEFWKDIWSKPTRHNENAEWLQDLKEEIKIDRQNDVVITREKVEKVVNKMPNWKSPGPDLVQGFWLKRFTNLHGRITLQLNECLRKGNVPKWMTKGRTVLIVKDPQKGRVPSNYRPITCLAMCWKLLTGILAGEIYSFMEAKNVLPEEQKGSRKGCRGCLDQLYIDKKIMKEVKQRKKNIAMGWLDYRKAYDLIPHSWLKECLNMFGAAENVKNLLTNSMKEWSTMLTSCGEAIGEVKFARGIFQGDSLSPLMFVIAMIPLTLVLRKMKASYKFSSNGEQINHLMFMDDIKLYAKNESGLDALIQSVRVVSNDIGMEFGVEKCAVLVMKRGKVVESNGIDLPNKETIRSIHEENGYKYLGVMEADQVLGEKMKESLKKEYKRRVKKILKSKLNGGNMITAINTWAVSMMRYTAPFVDWRKDELKEIDRGTRKMMNMYRSLHPRDSVARLYLPRKEGGRGLVEIEDCVQLAILGLENYVQDSKERILSSVRCEAGERVSEKDFKKRRREERRSELEEKALHGQFFRQTKEINDPESWGWLRDGELKKETEGLIMAAQTQSLRTNAIKANIDKTQRDSKCRMCNQKEETISHIVSECPKLAQREYKRRHDCVAKALHWDVCRLYDIDCGNKWYEHQPDGVVETTNVKILWDVNIQTDNEIQARRPDIVVVNKKERKCYIIDVAVPGGENS

SEQ ID NO: 18298 - protein, 1129 aa, Rhopilema esculentum
MMINSENNIENDVNGSGSTGEAVASGRGGGATQASLGRYHATAESTVGRRTRNQWTREDNRTVMECYVASEPNKRGYRKRMVNIWRSRNLAQVSEQRLLDQVRQIRLKGWITELEMEEIKRQKTIEGNRGDDESQGESVESDANNRREEIQIEYDDNVQQNNETGAAENGARNFDDEEFSDEEIAIAERLFEVLHQPERTKLPALRGLNKSSVKIEVEKMNSLLGKIRSENITATNDLLYAASVVTTERLGVKITRKKRQGEPMWKRRLQKQVKYLRKDLSRVEELRKGKTIKTRFQEQLQRKYWLKEKGLITVSEELKQRITAKSGKITRYQARIDQFRQNRLFRENQSRFYDELNGGERNEVRPEKEETMEFWKDIWSKPTRHNENAGWLQDLKEEIKIDRQNDVVITREKVEKVVNKMPNWKSPGPDLVQGFWLKRFTNLHGRITLQLNECLRKGNVPKWMTKGRTVLIVKDPQKGRVPSNYRPITCLAMCWKLLTGILAGEIYSFMEAKNVLPEEQKGSRKGCRGCLDQLYIDKKIMKEVKQRKKNIAMGWLDYRKAYDLIPHSWLKECLNMFGAAENVKNLLTNSMKEWSTMLTSCGEAIGEVKFARGIFQGDSLSPLMFVIAMIPLTLVLRKMKASYKFSSNGEQINHLMFMDDIKLYAKNESGLDALIQSVRVVSNDIGMEFGVEKCAVLVMKRGKVVESNGIDLPNKETIRSIHEENGYKYLGVMEADQVLGEKMKESLKKEYKRRVKKILKSKLNGGNMITAINTWAVSMMRYTAPFVDWRKDELKEIDRGTRKMMNMYRSLHPRDSVARLYLPRKEGGRGLVEIEDCVQLAILGLENYVQDSKEGILSSVRCEAGERVSEKDFKKRRREERRSELEEKALHGQFFRQTKEINDPESWGWLRDGELKKETEGLIMAAQTQSLRTNAIKANIDKTQRNSKCRMCNQKEETISHIVSECPKLAQREYKRRHDCVAKALHWDVCRLYDIDCGNKWYEHQPDGVVETTNVKILWDVNIQTDNEIQAKRPDIVVVNKKERKCYIIDVAVPGDVRIAEKEIEKIEKYDELKREVERLWKVKAKVIPIVLGALGTVTRNLSNYIKEIGVKTQIKLIQKSVLLGTAES

SEQ ID NO: 18299 - protein, 1044 aa, Araneus ventricosus
MGTRKWKRKKKGTSSSSEPPDEVITNQNVVLAPPLNDNSTLPEPPQEEVAPRGPLSVYIDHLEEFLNQDPSQEFFDMFCETMDMAVVDIKNLSFQPSPTSTEHNLENPTRETLAGNHDHQPQQTDHPQGRKTRKEININDAQSCQTLYGRNRKRAVREICEGPPIRCQIPVNLIEDHFRAAWDSNHPPLPQLPTNNEERPPILERPFSISEISKKLANAENTSPGPDRLTYHHWRSLKQGAKFLTCAFNACLHFQKIPQSWKKTTTILIPKSKTNLDDVMNWRPIALSNTIYKIYTKVLAGRLQDWATRLSALSPCQKGFTPFDGVLEHNFVLQTRLETARARKHDLCVAWLDVTNAFGALPHQLIYKALTAAGTGEDFVNIIRDLYTGCTTNILSNNSATNPIDISSGVKQGCPISGLLFNISIDHILRKIQGTATSHRILAFADDLCLLGDSSDELQDMLDTVFTDLASIGLHLNPRKSFSMHFSGSTPVNVSESTFRLGANPIQPILEFDFTKFLGKPVGFNPVPDYGTFNSFGQCAKKLLASLLSPWQKIDAMKSFLFPALQFVMRTGQFSKEDWSLLDNSIRHAVKEVLYLPEHASNEYIYGHTKAGSVGLPVSAEESDLNRVDSAFKLLTSSDEMVSELALKNLTNAVSKRSQKPDVTDDDLSDFMSGSMELDCERKPGSNPYSNVWTVACITSRRQKIEWSFTDGVPQLKFQDIILKGASRRKILFSIRNRLRQDRSLALTAKPDQGKVMECVAMSPTSSHFIGNGIYTRFSEYRFIHRARLNLLPLNGLPWKEGTNKRCRRCDKADLETLPHVINHCEAHSTAWQLRHDNIQNRVLNAAQNSSAEIISVNKKIVKSINLRPDIVMKLDNIIYLVDITCPFENRIDGFEKAKQEKLRKYQVLIEHLLPQASAVEIVPIVVGAFGAWDPANDKFLLKIMAKSYLKTLCKLCVSDNIRWARDIYVEHITGIRQFDESAIVNNPNFRPQEPRSQDDPLAVSNHPSPSGSVTISVPPAVPGTSASISAHPVVTGGANEQCP

SEQ ID NO: 18300 - protein, 1961 aa, Araneus ventricosus
MSSTCDCSKDSSSNVAACSPICHRTRAQVAKRQQSQLSAVPSSDDPSDTTEICSATNTDSPNIELDTTLISSVASSEASSLTPTCDSQPNFSIGECPLIVNDALIVSVMLNELIDIICSDPSSQHCDTRINQPPQDICHPFVERTDDEICLLDEIEIFAGEMLISIFNDIFGVKSPICESPAKVYTENSPIQFSLNSSIENDPAGENYEIESGIEEIAHNIVNSYEINQSTAPDHSVFTANVSTDEHNPTTVISRNADNVDSMEHDLSENTSFLEIIDSEPDDEMSNDNEFEQISHSIPNFSLEVDFKLSQIPPIIKNGKEIDVLESHVSQDLDLSQQSSGLPDSDEIGIVQFVTKNQSSLTIHSLLPHERVCHPTTSKVEVFSCEYCEKKFTSESAAQAHIFDLHIDTDLKMPSFQVQQSLTFVRNYPDPGCSSCSIGFLTLHLLSQHCLTVHSSDKFACAVCNYDFATLNNFYTHRCSDTFPPPKPFRCEVCEEAFESSQARAGHECVPPKDTQSSTSPDENNSAVLLPFMAGTCNVADNYASSELPLFSCMFCEESFISEDSLAQHIAHVHLSFDLLPYGRKCQPQKKSFSSCKNCKTIFASSAFRLAHTCTNAQNEISPSNSQAFPYLDQVSQNDNSFSNQNPEDKSGTNINILAGRHTSTPSVIVSNAGPSNESTHSRQTNNNSGLKTKVQQSQNRDKMTWRCDVPGCKIVKKSKKGLSIHKFRQHNIPFPKRDVPSSTQPSQVARNEQNKQVAGCAPVQDQDIQSPLQVDDPNHVSTQQCPTHTSRSGGILNILFPVQDPTPCTEPQCIFDSRGKTWSSIKCSLLRHLRTAHRLSDIKAIHWCATCACKFVKPSKHACLKQGAKIDLHIDSDYQCPECGEKFSNELALRNHVKAHTKANAKASAVQRIIPRMGTRKWKRKKNGTSPSSEPPDEVITNHNAVLAPPLNDNSTLPEPSQEEVAPRGPLSVYIDHLEDFLNQDPSQEFFDMFCETMDMAVVDIKNLSFQPSPTSTEHNSETPIRETLAGNHDLQPQQTDHPQGRKTRKEININDAQSCQTLYGRNRKRAVREICEGPPTRCQIPVNLIEDHFRAAWDSNHPPLPQLPTNNEERPPALERPFSISEISKKLANAENTSPGPDRLTYHHWRSLKQGAKFLTCAFNACLHFQKIPQSWKKTTTILIPKSKSNLDDVMNWRPIALSNTSYKIYTKVLAGRLQDWATRLSALSPCQKGFTPFDWVLEHNFVLQTRLETARARKHDLCVAWLDVTNAFGALPHQLIYKALTAAGTGEDFVNIIRDLFTGCTTNILSNNSATNPIDISSGVKQGCPISGLLFNISIDHILRKIQGTATSHRILVFADDLCLLGDSSDELQDMLDTVFTDLASIGLHLNPRKSFSMHFSGSTPVNVPETTFRLGANPLQPILEFDFTKFLGKPVGFNPVPDYGTFNSFGQCAKKLLASLLSPWQKIDAMKSFLFPALQFVMRTGQFSKEDWSLLDNSIRHAVKEVLYLPEHASNEYIYGHTKAGCVGLPVSAEESDLNRVDSAFKLLTSSDEMVSEIALKNLTNAVSKRSQKPDVTDDDLSDFMSGSMELDCEGKPGSNPYSNVWTVACIASRRQKIEWSFTDGVPQLKFQDIILKAASRRKILFSIRNRLRQDRALALTAKPDQGKVMECVAMSPTSSHFIGNGMYTRFSEYRFIHRARLNLLPLNGLPWKEGTNKRCRRCDKADLETLHHVINHCEAHSRAWQLRHDNIQNRVLNAAQNSSAEIISVNKKIVKSINLRPDIVLKLDNVIYLVYITCPFENRIDGFEKAKQEKLRKYQVLIEHLLPQASAVEIVPIVVGTLGAWDPANDKFLLKIMAKSYLKTLSKLCVSDNIRWARDIYVEHISGIRQFDESAIVNNPNFRPQKPRSQDDPLAVSNHPSPSGSVTVSVPPAVPGTSASISAHPVATGGANEQCP

SEQ ID NO: 18301 - protein, 1321 aa, Araneus ventricosus
MIDHVELSTNPQFDGLQNVQIVNTSGTISITPAAPPNQDVSLSMFHCLLSLHRKILLSEKSPGNVLSKDAQLSKQARRHYRFIGFASTKFHSRNVIHKLILNLRKTFIQPLLHLLQIHCKLFLSPPVETESCPSHPLRSGDTLHLLFPIFNPTDCTEKNCVFKSRGKTWYSIKCSLLRHLQTAHHLSNLITVHWCATCASRIKQPKKHQCLAPGVMANIKIDGAFPCTENGCTDEFPSELGLRNHLSAHKKATALANATQRVIPKMGPKKFKRKKKGDLPVTDIPDESITDPVFALAPPPPPEVDNPPYEETQEDVPVPGPLSIYIEHIEDIINQDPTEEFFEYFCQAIEMAVAEVQNISFQPPPSQPADQNVKRSRKDIDITDPQACQTLFNRNPKRAVREICEGPPIRCQIPANVIEDHFKSAWDAQHPVLTPLPPTSEERTPILERNFSINEVSKKLASAQNSAPGPDRLTYFHWRSVPKSQKFLTLAFNASLHFQRIPPSWKRTVNILIPKKSSDLDNPANWRPIALSNTIYKIFTKVLAGRLSDWCSKFSALSHCQKGFTPFDGVLEHDFVLQTRLEHARAQNKDLCVAWLDVTNAFGADPHQLIYNALSAAGSGEQFINIIKDIYTDCHTSILSNDSSTNPIKINSGVKQGCPISGLLFNISIDHILRKIQGNASEHQILAFADDLCLLGSSADELQDMLDVVQSEMTNIGLALNPTKSFSFHFSGSTPVRVEHSTFRLGSDLLTPIEEFNFTKFLGKPVGFNPVPDYDTFNNFGITAKKLLASQLSAWQKIQALKMFFFPALQFVIRTGQFKKEDWTLLDDAVRHAVKEVLFLPENASNEYIYGHVRSGCVGLPIAAEESDLNRIDSAFKLLTSKDSLLSDLALKHLTNSVSSRMQKVNITDEDLANFMSGDLDIDENDRPHSNPYSNVWTVARVASRRLKAEWLFNEGIPQIKFKDIIIKSSARRKVLFSIRNRLRQDRALALTSKPDQGRIMECIAQSPTSSHFLLNGQYLRFSEYRFIHRARLNLLPLNGLPWKETTDKKCRRCSKADLETLAHVLNHCEPHSRAWQLRHNGIQDRIVVAARNSSVEILSVNKKVTKELNLRPDIVLKLNGKIFIVDVTCPFENRLESIERAKQEKHRKYAPLLDHFLPSSSSVEIVPIVVGALGYWDPANDRFLSKIMSKSYLKKMAKLCVSDNARWARDIYVEHITGHRQFNESLVVNNPDYRPQEIPPQDDPLAAPVITPLSGYDFCTSCRAFCHSWTITINFHGVWWCCVIPVYSIVHFYFCFLCNCFSFYVKCLFYILTPFSFSLT

SEQ ID NO: 18302 - protein, 1934 aa, Araneus ventricosus
MSANMRIPSVDKSDCVAISTSNEDSSVCERTLLMQTSFISPVCSRTRSQVAKRNAQQPVLNYDSPSTEATSTTSFSDTGINKSIMSVTPSCDPSDEICKAKLDSALTEAHSCVSFISPRSPIITGFVPSSEIFSVDSSVPTLQPNSALDDDLSSDYSNNMLLPSIDISFQDLSEASNDSIVYDIRATASTSENVDNNDNEKDPATTNTPPEDCFPLVVDDDLIATVMIHEIIDLVSTDPAAIPTSPPSPVSGNIDTLNDKLIDPLIEQNSNESTSNENIIVPNDPINSPTSPPSLKEDLSIQRFVTNNGSVIVIFPFTQREHDSSSPHSNLSNRCHFCEKPFSNEKALSRHVSTVHIHAGEESFVEVQSITFVTQHPTASCKTCGISFLSPFLFEEHCLKNHCSEDNIFTCTKCNRDFSSFPKFKRHSCKFRDVIPIPHPFRCLICDDLFESRLMQERHPCHGPCDNASDFADHRSGHCIIPIEDDPNEVRFPTRCIPAPRRLFTRDNPEFDGSLPGPLFINFSQQLPPPNKLFQCDTCFQSFLNSDTLSSHIASCHLLPDYNCFRQSNTTKRKSFASCHLCGALFASKAIFNHHPCVSAPPEDATASFQNETQPSLSYPNFSLGVELPPTPIPPSSYPNFSLGVTLPPTPIHEPITAPPGTSDQPNADSLFNGIETSAGALSPPSCTPQPINGIGSSSNKKKWPCDFKGCKIVKGSKKGLSIHKFKEHKIPFPKRDIPSNTQPSQTIGIAQSQNLVGISTDDPTNLPSQQCPTQTSRSGNIVNFLFPLQCPTLCTEQNCIFDSNGKTWSSNKCSLLRHLRSAHRLSNLTSIHWCATCAQKIGKPKKHSCLAQGVMLKLPVDSEFKCQECDESFTTDLGLRNHTSAHKKSTALAQSVQRVIPRMGARKWKNKKTNHVNSSSEPPDEAITDPTLVLAPPPAQSNTTPPSPPDDEQPPGPLSIYIDHLQDLLNQDPSEEFFDMFSETMEMALADIKNLSFQSNSNFTEQSLGESSAVNPTNEVIPIRQKQQKKEINIIDPQACQALYNRNRKRCVREICSGPPTRCMIPVEKVEDFYRSAWDSVPPPIPDLPITTEERTPLLEHIISISEVSKKLARAENSAPGPDRLTYHHWRSLPQGNKFLATSFNVCLHFQKVPAEWRKTTTILIPKSLLNLDSPANWRPIALSNTIYKIFTKVLAGRLQDWSTKFDVLSHCQKGFTPFDGVLEHNFILQTRLESARAHKKDLCVAWLDVTNAFGALPHPLIYKALHAAGTGDQFVKIIQDIYTDCSTSILTNDSSTGPIPIKSGVKQGCPISGLLFNMSIDHILRRIQGDFTDHRILAFADDLCLIGDSREDLQDMLDVVYDEMSKIGLLLNPEKSFSLHLSASTPVNVPGSLFSLGPDTIKPILEYEFTKFLGKPVGFNPVSDYSSFNSFADCAKKILDSQLSPWQKMDAMKSFIFPATQFSMRTGQFKKEDWTLLDEAIRHAVKEILFLPERAANEYIYGHTKAGCVGLPISAEESDLNRVDSAFKLLTSHDEIVSQLALTNLRNSVAKRIRIPNPTDDDMSDFMSGSLDIDEDDKPHSNPYSNIWTTARVASRRQKIQWLFSEGHPQLKFQDLIIKSSSRRKILFTFRNRLRQDRSQVLQNKPDQGKAMECVAQSPISSHFIANGLYTRFSEYRFIHRARLNLLPLNGLPWKDGPVKRCRRCNKANLETLPHVINHCEVHSRAWQLRHDSIQNRVVKAAEYSKAEILAVNRKFVKEYNLRPDIIIKLDGKIYIIDIVCPFENRLDSFEKAKDEKRRKYQVLVDHFHQQNISAEIIPIVVGALGAWDTENDRFLSKIMSRSYLKKMSKLCVSDNIRWARDIYVEHITGHRQFDVSAIIADPLFRPQEPPTSEDPLAVPINSPPPPCSDTLFVPPAVPCTSEQGDAAGHLQ

SEQ ID NO: 18303 - protein, 1962 aa, Araneus ventricosus
MSSTCDCSKDSASNVTVCSPICRRTRAQVAKRQQSQLSAVSSSVDPSVDTEICSATNTDSSNIELDTTLGSTVASSSEASSLPSTCDSQPNFSMGECPLIVNDALIVSVMLNELIDIICDDPSSQHCETRTNQFSQDICLTSIERTDGEICLFDKMEIFACEMVNSIFNDIFDTNSHVSISPAKINIDDSPIQFSLHSSNEIDLAGENDVSEGGFEDIARSIVNDYEINQSTVIDPFVSPVNVSTNEDSKINNEIAPKADNVDPLEHDISDNTSFLEIIDSDPDEEMPNVNEIDQISNSIPNFSLEVDFKSSQIPPITKIEKENDILESHVSQDLNLSQQSSGLPDSDEIGIVQFVTKNKSSLTIHSLLPHERVCHPTTSTVEVFSCEYCEKKFTSESAAQAHIFDLHIETDLKIPSFQVQQSITFVRNYPDPGCSSCSIGFLSLHLLSQHCLTVHNSDKFACAFCNSDFPTLNNFYTHRCRDTCPPPKPFKCEVCEEAFESSHARADHVCAHTDAQRSISPDETNSAVLLPLMAGTCDAAGNHASSELPLFSCMFCEESFISEDSLAQHIAHIHLSFDLLPFSRKCQSQKKSFSSCKNCKKVFASSASRLTHTCTEIQKATPSSNNQASPHPDQVNNNVNNTSIQNPEVNSDADIPTPAGRHTSSPSVLTSNAGPSNESSLSRKTNIDSGLNTNVQQSQNRDKITWRCDVPGCKVIKKSKKGLSIHKFRQHNIPFPKRDVPSNTQPSQTARADQTQQVTGGAPAQDHNIQSSLQVDDPNHVQTQQCPTHTSRSGGILNILFPVHDPTPCTEPECIFDSRGKTWSSIKCSLLRHLRTAHRLSDIKAIHWCATCTCKFVKPSKHACLKHGAKIDIHIDSDFQCPECGEKFSNELALRNHVKAHTKANAKASAVQRIIPRMGSRKWKKKKNGNSPSSEPPDEVISNQNAVLAPPLIDNSSLPEPPQEEVAPRGPLSVYIDHLEDFLNQDPSQEFFDMFCETMDMAVVDIKNISFQPSPTSADHNSEAPIRETLPGNHDHPPQQTDLPQGRKIRKEININDAQSCQTLYGRNRKRAVREICEGPPIRCQIPVNLIEDHFRAAWDSNHPPLSQLPTNNEGRPPTLERPFSISEVSKKLANAENTSPGPDRLTYHHWRSLKQGAKFLTCAFNACLHFQKIPQSWKKTTTILIPKTKSNLDDVTNWRPIALSNTIYKVYTKVLAGRLQDWATRFNALSPCQKGFTPFDGVLEHNFVLQTRLETARARKHDLCVAWLDVTNAFGALPHQLIYQALTTAGTGEDFVNIIRDLYTGCTTNILSNNSATNPIDISSGVKQGCPISGLLFNISIDHILRKIQGTATSHRILAFADDLCLLGDSSDELQDMLDTVFTDLAGIGLHLNPRKSFSMHFSGSTPVNVPATTFRLGASPLQPILEFDFTKFLGKPVGFNPVPDYGTFNSFGLCAKKLLASLLSPWQKIDAMKSFLFPAFQFVMRTGQFSKEDWSLLDNSIRHAVKEVLCLPEHASNEYLYGHTKAGCVGLPVSAEESDLNRVDSAFKLLTSSDEMVSELALKNLSNTVSKRSHKSDVTDDDLSDFLSGAMELDCEGKPGSNPYSNVWTVACIASRRQKIEWSFTDGVPQLKFQDIILKGSSRRKILFSIRNRLRQDRALALTAKPDQGKVMECVAMSPTSSHFIGNGLYTRFSEYRFIHRARLNLLPLNGLPWKEGANKRCRRCDKADLETLPHVINHCEAHSRAWQLRHDNIQNRVLNAAQNSSAEIIAVNKKIVKSINLRPDIVLKLDNVIYLVDITCPFENRIDGFEKAKQEKLRKYQVLIEHLLPQASAVEIVPIVVGALGAWDPANDKFLLKIMAKSYLKTLSKLCVSDNIRWARDIYVEHITGIRQFDESAIVNNPNFRPQEPCSQDDPLAVSNHHPPSGTVTTCVPPAVPGTSASISTHPVATGGANEQCP

SEQ ID NO: 18304 - protein, 924 aa, Dermacentor silvarum
MTLLALAMAEAAMPFSRTINEDLHKQIRTRTVQAISQVRHTTRYKDALDLAKQCMINPPPLRPFENSEISPITLDINAIRLSLTNVGIRDEGLVSALTVGPMSMQDINHLLDFYKIKRSPPKPRPPRPQVDFSVLTRKNRRRALYVEHQRLYDLGPAALGDSLLLGGAQAGCAIDDLHSEYDPVFGAESTPVGGGLHCQARTEVSECLFVVEELNRALKSFPNKSAAGPDGIKIADLKKVPSDILLHVFNNWFSFGSIPIEMKLSRTVFIPKCANPAGPGDFRPITVSPVLYRIYSKMLLSRLTEDNQFNKFQAGFQDDKSTSSNILLLQALIRTLKKKHRPFFAMSLDLRKAFDSVSHNALFMALSERGIPERIRHVLKDMYRHCSTTFWCGGLTDSQRVPVRRGIKQGDPLSPFLFNCVLDPLLERLNMSKLGVQLNGTHMSAMAFADDLVLVSDTYEGLSSLINQTETFLSNVGLEINPRKSQYFGWRANHQSKGFDYSIDSMLVAGTEVLPALKDQPIKYLGLHFFVNKAPSVESDKANKLLELIGKAKLKPFQKIHCWRQLVQPAYLYGASNSLQVQAEAGRLDRRLSKEVKSTLHLPQGFPNSHIWMPTRCGGLGLLQLQRVALVTHYKALTRLVRLGDEFVDELFKEILGACRERIATIFETSTDITDASLVKSALKKGSVSWWKRQTARYTNQDLFAHKAQFTANSWLAYDSKQMKDGDRIKALRLRTNLYPTRTLSNRHATDPSMRLCRRCNQKPETAFHILQECSSVHLPRVERHNFITKNVVRMVRERNPKASVQTEKLLVTKDNVRLKPDLVVEDGNQVTIVDFAVTWDANEGILLRMCAAKKRKYAALRELFPGKTVTIHGMAFGARSMLCRETLKAGECLGLSKRDVGWLSVRTLLGSIIVLSRFSTMVC

SEQ ID NO: 18305 - protein, 1205 aa, Dermacentor silvarum
MSTFVRDFVTGRSTAFRDNSLVCHVCQLRVTSRIKLEDHYSTHQIQLLWRCLSCRREYNSSQKISSHYSKCAKRNAARSNTQTSSVSVSQSLATENVLEGPDTNDGGSAFVLEGRDSAERCVATQSGTQFQTVSPTDGLGPVVSLGLDPSAETQATRSCDSGDALHTPLDTVYPEEVSRMSSSALTPTPAIYHSTGQGRWSQDDIMALALAELRLPLGAAVIRTLAGQFPMRTEASIEHIRRTPRYKAAIDLLNDADLEEVGQSTTPDVPSYSHCRWTDSDLAALAMAEARLVASRTVNEDLHKQFRTRTVQAISQIRHTTRYRDALHLAKQCASNPPPLRPFEDLGELPPIVLDSNQIRLSLQEVGIKDEGLVSALSVGPISMKDINHLLDLYKVKRTPPRPRPLRAQINYSDMSRKQRRKALYIEHQRLYSLGPAALGDSLLLGGSPAGCALHELHREFDPIFGAESAAVNGGLHCDANTEVSECLFVSAEVDRALRSFPNKSAAGPDGVKVSELKKIPSDILVHIFNNWFSFGSLPIEMKLARTVFIPKCSNPNGPGDFRPITVSPVLYRVYAKMLLLRLSENNQFHKYQAGFQADKSTSSNILILQALMRTLKKKHRAFFALSLDVRKAFDSVSHKALFLALAERGVPERLRFVLRDMYRHCTTTYWCNGLTDEQRVPVRRGIKQGDPLSPFLFNCVLDPLLERLNKSKLGVDLGGANMSAMAFADDLVLVSDTYEGLRSLVVETEDYLSNIGLSINPQKSQYFGWRPNHRTKGFDYSLDSIQVSGMDVQPVLKDQPMKYLGLYFFVNKAPAIESEKANKLLDLIGKASLKPFQKLHCWRQLVQPAYLYGASNSLQVQSEAGRLDRVLSKHVKAALHLPQGFPNSHIWMPTRCGGLGMLQLQRVAMVTHYKALTRLVRLGDDFVDQLFDEVLGACRVRIGTVFETSPDITEASQVKTALKKGSVSWWKRQTARYQNQDLFAHKCQFTANSWLAYDSKQLKDGDRIKALRLRTNLYPTRTLSNKHATDPTARLCRRCNSRPETAFHILQECPSVHLPRTERHNFIAKNVVRMVKERRPQAVVHAEKLLVTKDHIRLKPDLIVEEGNQVTIVDFAVTWDANEGILIRMCAAKRAKYAALKALFPGKTVQIFGMAFGARSMLCRETVRAGESLGLTKRDVGWLSVRTLLGSIIVLGRFAKLVRA

SEQ ID NO: 18306 - protein, 785 aa, Trachemys scripta
MARLSRTKNTAPGKDSIPYGLLKKRDPGCLVLSNIFNLCKQFSQTPISWKKAMTILIHKKGERDDPSNWRPISLCSTMYKLYASCLAARITEWATSGGAISPAQKGFMPSEGCYEHNFLLQTVIQTTRRARKQCAIAWLDLANAFGSIPHHHIFDTLQEFGMPETFLRLVRELYEGCSTTIRSVEGETAEIPIHSGVKQGCPLSPIVFNLAMEPLLRAISDGADGFDLHGERVNVLAYADYLVLIADNHERLQGMLNTIGRVADWAGLCFNAKKCTSLHIDGSVRDSVLATEFLIQGEPVIPLAEGQAYQHLGTPTGFRVQQTPKDSIREILLDATKIDASLLAPWQKINALNTFLIPRITFVLRGSAVAKLPLKADNTIQQLIKKWLSLPRRASNELVYIKHRHGGAGIPRMGDLCDIAVLTHAFHLLTCLDTKVKNVATTALHAATEKQIGRSPSDRCGHLPERLPGRRLHPGQGRSRFAVVPHPQCHTPAGEATGLPLGMERGTAGAGVLIPRIGTEDIIVVTPGATGVLERSLKAAVHALYVDALKKKTDQGKAFEVTSKWDSSNHFLPTGSFTQFADWRFIHRAWLNCVPLNRAVRHRNRDKRCRKCGYVAETLPHVLCCCKPHARAWQLRHNAVQDRLVKAIDLRLGEIAVNRTVPGTDSPLRPDIIVMDEIGKKIILVDVTIPFENRTPAFREARACKLEKYAPRLTPCRLRATRCTSTLCSLGALGTWDPCNKRVLRTCGVGRHYTRFMRRLMVSDTIRWSRDIYTGHINGHRQYRE

SEQ ID NO: 18307 - protein, 909 aa, Actinemys marmorata
MTTPQMTAAHGRPGITPAPIDPVQFPPTTSGDSTPPATTPRDPTERSPDPQARQPADHATNSLPTPTEEPEDQRPKTRPATPWQAAWIKELQAAASFTEFDPLIDRLTRELSAEIAFRRTPNQETTRPAPRRPAPHRDTNTRGVGRRNTGCRFDPAAASRIQKLYRTNRLKAVREVLDGPPSYCTIPPERLYNYFHGVFGGVPRNDAQRPECLRPLPRITDADDLEADFTPKEVTARLSRTKNTAPGKDSIPYSLLKKRDPGCLVLSSIFNLCKRFGRSPTSWKKAMTVLIHKKGERDDPSNWRPISLCSTMYKLYASCLAARITEWATTGGAISPAQKGFMPSEGCYEHNFLLQTVIQTTRRTRKQCAIAWLDLANAFGSIPHHHIFDTLQEFGMPEAFLHLIRELYEGCSTTIHSVEGETAEIPIHSGVKQGCPLSPIVFNLAMEPLLRAISDGTDGFDLHGERVSVLAYADDLVLIADDPERLQGMLDTIGRAADWTGLRFNAKKCASLHVDGSKRDPVLMTKFLIQGESVVPLAEGQAYQHLGTPTGFRVRQTPEDTIREILQDATKIDTSLLAPWQKINALNTFLIPRIAFVLRGSAVAKLPLNKADNTIRRLVKEWLSLPRRASNELIYIKHRHGGAGVPRMGDLCDIAVITHAFRLLTCPDTKVKNVATTALHAATEKRIGRPPSDRDVATFLSGSLDSDFARDRGDLASLWSRARNATRRLGKRLGCRWEWNEERQELGVLIPRIGTEDNTIVAPGARGVLERSLKAAVHALYVDTLKKKPDQGKAFEVTSKWDSSNHFLPTGSFTRFADWRFIHRARLNCVPLNGAIRHGNRDKRCRKCGYVTETLPHVLCSCKPHARAWQLRHNAVQDRLVKAIDPRLGEVTVNRTVPGTDSPLRPEPT

SEQ ID NO: 18308 - protein, 1115 aa, Platysternon megacephalum
MVARDPAAGGTNADSRHTLRTPATRATNATPRPALRTSPTGGAGTTPQTAPHTAITGGPTATTRPQHQTPIARQTGTAPRDARPIPTTRRSHAPTATPRTTAASGSPDTAPAPTDPNQVAPPTSNATTPPAPMPRGPTERSPEPQTRLPVDQTANTVPTQAEEHEDLRPTTRPATPWQATWTAKLQAAASFEEFDLLIDRLTQELSAENASKRTPNQETTRPAFRRPAPNRGTSTRGTGRREASHRYDPAAASRIQKLYRTNRLKAVREVLDGPMPYCTIPPGRLYHYFLGVFGGTPENDAQRPECLRPLPRIADADGLEADFTPKEVTARLSRTKNTAPGKDGIPYSLLKKRDPGCLVLSGIFNLCRRFGRSPTSWKKAMTVLIHKKGDRDDPSNWRPISLCSTMYKLYASCLAARITEWATTGGAISPAQKGFMPSEGCYEHNFLLQTVLQTTRRVRKQCAIAWLDLANAFGSIPHHHIFSTLQEFGMPETFLHLIRELYEGCSTTIRSVEGETAAIPIRSGVKQGCPLSPIIFNLAMEPLLRAISDGTDGFDLHDERVSILAYADDLVLTADDPERLQGMLDTIGRAADWTGLRFNAKKCASLHVDGNKRDSVLMTEFLVQGEPVVPLAEGQAYQHLGTPTGFRVRQTPEDTIREILQDAAKIDASLLAPWQKINALNTFLIPRIAFVLRGSAVAKVPLNKADNTIRQLVKKWLSLPQRASNEIVYIAHRHGGANVPRMGDLCDIAVVTHAFRLLTCPDATVKNIATTALRAATTKLIGRPPSDQDAATFLSGSLDGEFGRFRGDFASLWTRARNATRRLGKRLGCRWVWSEDRRELGVLIPRIETEGNTFINPGARGMLEKSLKAAVRALYVDTLRKKPDQGKAFEVTSKWDSSNHFLPSGSFTRFADWRFIHRARLNCVPLNGAVRHGNPDKRCRKCGYAMETLPHVLCSCRPHARAWQLRHNAVQDRLVKAIAPHLGEIAVNRAIPGTDSLLRPDIVITDEDQKKIILVDVTVPFENRTPAFRQARARKIEKYAPLADTLRAKGYEVYNDALIVGALGAWDPLNERVLRTCGVGRRYARLMRCLMVSDTIRWSRDIYTEHVTGHRQYLE

SEQ ID NO: 18309 - protein, 1064 aa, Malaclemys terrapin
MRPLNLHLEPRLPRERGPPPSPLCKLLLPEAPGRSLLPEGRTLPRQPPDSSRTRKTWHHPPPLDPVQIPPTTSGDPTPPATTPRDPTAESPDPQVGQPIDHTTNSLPTPTEEPEDRRPEPRPATPWQAAWIEELQAAASFAEFDLLVDRLTRELSAEIAFKRTPNQETTRPAPRRPAPHRDNNTRGAGRRNTGRRFDPAAASRIQKMYRTNRLKAVREILDGPPSYCTIPPERLYNYFLGVFGGVPRNDAQRPECLRPLPRIPDADGLEADFTPKEVTARLSRTKNTAPGKDSIPYSLLKKRDPGCLLLSNIFNLCKRFGRSPTSWKKAMTVLIPKKGERDDPSNWRPISLCSTMYKLYASCLAARITEWATTGGAISAAQKGFMPSEGCYEHNFLLQTVIQTTRRTRRQCSIAWLDLANAFGSIPHHHIFDTLQEFGMPETFLHLIRELYEGCSTTIRSVEGETAEIPIHSGVKQGCPLSPIVFNLAMEPLLRAISDGADGFDLHGERVSILAYADDLVLIADDPERLQGMLDTIGRAADWAGLRFNAKKCASLHVDGSKRDSVLMTEFLIQGESVVPLAEGQAYQHLGTPTGFRVRQTPEDTIGEILQDAAKIDTSLLAPWQKINALNTFLIPRIAFVLRGSAVAKVPLNKADSAIRKLVKNWMSLPRRASNELVYIKHRHGGAGVPRMGDLCDIAVLTHAFRLLTCPDATVKNVATTALHAATEKRIGRPPSDRDVATFLSGSLDGDFARDRGDFASLWTRARNATRRLGKRLGCRWEWNEERQELGVLIPRIGTEDNIVVTPGARGVLERSLKAAVHALYVDALKKKPDQGKVFEVTSKWDSSNHFLPTGSFTRFADWRFIHRARLNCVPLNGAIRHGNRDKRCRKCGYVNETLPHVLCCCKPHARAWQLRHNAVQDRLVKAINPRLGEITVNRAVPGTDSPLRPDIVVTDEVGKKIILVDVAIPFENRTPAFREARARKLEKYAPLADTLRTKGYEVHVDALLVGALGAWDPCNERVLRTCGVGRHYARLMRRLMVSDAIRWSRDIYTEHITGHRQYQE

SEQ ID NO: 18310 - protein, 1118 aa, Terrapene carolina
MAARNPASRGTDVGPQTTLRTPTTGRANATPQPAPRTPPAEVMGSTHQLAPQTAAARGANATTRPQHQTPTVGRTGTAPEAARPIPATRRSHAPTTTPQMTAAHGRPGITPAPTDPVELPPTTSDDSTPPATAPRDPTERSPDPRARQPTDRATNSLPTPTEEPEDQRPKTRPATPWQATWIEELQATASFSDFDPLIDRLTRELSAEIAFRRTPNQETTRPAPRRPAPHRDANNRGAGRRNTGRRFDPAVASRIQKLYRTNRLKAVREVLDGPPSYCTIPPERLYNYFHGVFGGVPRNDAQRPECLRPLPRITDADALEADFTPQEVTARLSRTKNTAPGKDGIPYSLLKKRDPGCLVLSNIFNLCKRFGRSPTSWKKAMTVLIHKKGERDDPSNWRPISLCSTMYKLYASCLAARITEWATTGGAISPAQKGFMPSEGCYEHNFLLQTVIQTTRRTRKQCAIAWLDLANAFGSIPHHHIFDTLQEFGMPEAFLHLIRELYEGCSTTIRSVEGETAEIPIHSGVKQGCPLSPIVFNLAMEPLLRAISDGTDGFDLHGERVSVLAYADDLVLIADDPERLQSMLDTIGRAADWTGLRFNAKKCASLHADGSKRDPVLMTEFLIQGESVIPLAEGQAYQHLGTPTGFHVRQTPEDTIREILQDAAKIDTSLLAPWQEINALNTFLIPRIAFVLRGSAVAKVPLNKADKTIRQLVKNWLSLPRRASNELIYINHRHGGAGVPRMGDLCDIAVVTHAFRLLTCPDTKVKNVATTALHAATEKRIGRPPTDRDVATYLSGSLDGDFARDRGDFASLWSRARNATRRLGKRLGCRWEWNEERQELGVLIPRIGTEDNTIVAPGARGMLERSLKAAVHALYVDTLKKKPDQGKAFEVTSKWDSSNHFLPTGSFTRFADWRFIHRARLNCVPLNGAIRHGNRDKRCRKCGYVNETLPHVLCSCKPHARAWQLRHNAVQDRLVKAIDPRLGAVTVNRTVPGTDSPLRPDIVVTDEVGKKIILVDVTIPFENRTPAFREARARKLEKYAPLADALRSKGYEVHTDALLVGALGAWDPCNERVLRTCGVGRRYARLMRRLMVSDTIRWSRDIYTEHITGHRQYQERAD

SEQ ID NO: 18311 - protein, 1036 aa, Platysternon megacephalum
MTPQPTPRTPPTGGTGCPPPQTAPQPSTTRGANTTTRPLGQTLTTGQTDTAPTDARPIPAARRSRAYTATPQTTATRREPDTTPAPTDPDQAPPTASTEATPPVPMPRVPTESRTTRSPPTPAEEPEVRQPRTRPATPWQVAWIEELQAATSFEAFDPLVDRFTRELSAEIAFRRTPIQETARPAFRRPVPNRDANARGGGRRNASRRYDPAAASKIQKQYRTNRLKAVREVFDGPPSYCTIPPERLCNHFHGVFGSMPRSDAQRPECLRLLPRITEADDLEADFTPKEVATRLSRTKNTAPRKDGIPYSLLKKRDPGGLVLSSIFNLCKWFGRSPTSWKKAMTVLIHKKGERDDPSNWRPISLCSTMYKLYASCLAARITEWATTGGAISPAQKGFMPSEGCYEHNFLLHTVIQTTRRARKQCAVAWLDLANAFVSIPHHHIFNTLREFGMPEPFLHLIQELYEGCSTTIRSVEGETAEIPIHSSVKQGCPLSLIVFNVAMETLLRAISNGADGFDLHGEKVNVLAYADDLVLIADDPERLQSMLNTIGSVADWSGLRFNAKNCASLHIDGSQRDSVRTTELFIQSESVVPLAEGQAYQHLGTPTGFRIRQTPEDTIRQLGKKWLSLPLRASNELVDIAQRHGGANAPRLGDLGDTAIITHAFRLLTCPDAKVRNVAMTALRAIVRKRIGRAPSDSDVTTFLSGSLDGEFARDRGDIASLWSRACNATLRLGKRLDCHWEWNEERRELGFLVPRIGTEGNTIVTPGARGILERSLKATVHALYVDTLRKKPDQGKAFEVTSKWDSSNHFLPAGSFTRFANWQFIHRARLNCVPLNVAIRHGNRDKRCKKCGYVTETLPHVLCSCKPHARAWQLRHNAVQDRLVKAIDLRLGEVTVNRSIPGTDSPLCPDIVIMDEVGKKIIVIDVTIPFENRTPAFHEARARKLEKYTPLADTLRAKGYEVTMDALIVGALGAWDPCNERVLRFCGVGCHYTRLIRRLMVSDTIRWSRDIYTEHITGHRQYRERAGVTPHTSKDG

SEQ ID NO: 18312 - protein, 994 aa, Chrysemys picta
MAPEATRPVPAARRSHASATTPQTAAAHGRPGVTPAPLDPVQIPPTTSGDPTPPATTPRDPTEESPDPQVRQPIDHTTNSRPTPTEEPEDQRPKTRPATPWQAAWIEELQAAASFAEFDSLVDRLTRELSAEIAFRRTPNQETTWPAPRRPAPHRDNNTRGAGRRNTGRRFDQAAASRIQKLYCTNRLKAVREILDGPPSYCTIPPKRLYNYFLGVFGGVPRNDAQRPECLRPLPRIPDADGLEADFTPKEVTARLSRTKNTAPGKDSIPYSLLKKRDPGCLLLSNIFNLCKRFGRSPTSWKKAMTVLIHKKGERDDPSNWRPISLCSTMYKLYASCLAARITEWATTRGAISPAQKGFMPSEGCYEHNFLLQTVIQTTRRTRRQCSIAWLDLANAFGSIPHHHIFDTLQEFGMPETFLHLIRELYEDCSTTIRSVERETAEIPIHSGVKQGCPLSPIVFNLAMEPLLRAISDGIDSFDLHGERVSVLAYADDLVLIADDPERLQGMLDTIGRATDWTGLRFNAKKCASLHVDGSKRDSVLMMEFLIQGESVVPLAEGQAYQHLGTPTGFRVRQTPEDTIGEILQDAAKIDTSLLAPWQKINALNTFLIPRIAFVLRGSAVAKVPLNKADNAIRKLVKNWLSLPREASNELVYIKHRHGGAGVPRMGDLCDIAVLTHAFRLLTCPDAKVKNVATTALHAATEKRIGRPPSDRDVATFMMDGDFARDRGDFASLWTRARNATRRLGKRLDCRWEWNEERQELGVLIPRIGTEDNIFVTPGARGVLERSLKAAVHTLYVDTLKKKPDQGKVFEVTSKWDSSNHFLPAGSFTRFADWRFIHRARLNCVPLNGAIRHGNRDKCCRKCGYVNETLPHVLCCCKPHARAWQLRHNAVQDRLVKAINPRLGEITVNRAVPGTDSPLRPDIIVMDEVGKKIILVDVTIPFENRTPAFCEARARKLEKYAPWLTPCGLRATRCTSTLCSLGPWVPGTRVTNAC

SEQ ID NO: 18313 - protein, 1214 aa, Lamprigera yunnana
MEGGSKSRIRGRGIGLASRCPTKMAPNSIKEASDPVRQAPTARARTRGALDNEPGPSTDMNIYIRYPFQPTPCPICLQAGRGTFQALAVEDEIAHCNREHSRLPVHFLCTQCDKVFNSKRGITIHIPRCKGKQVATLTEAEGVRCTSCERTFGSAVGMRSHFWQAHPAEANAKRAAATDKPTPLELIKGGSVFSKEEIETMLELEVRWQGDRLIAKRMSEVLAKRPKQLRDKRAEPNYRRIRDAYLAAHLQRAQPAMVEHEALGRVEEEVAASDSGDPAETLSHNSANEPPAPMNTEQVPVEEQTDSREHDQDMANWHAGTINAALMGVPSKKAYPRESEAAIAMLKDALERLDGSNNVIPQTQIDQVYELAVAHFVPAKAKGKEGKRRPKQGSRRGAHRRYLYARTQDLYKKDPGLLAKHVRNRVDWLEDAGGNELRCADVQELYHKLWGTTPAIQLPEELLRDAELPKAVAAEVLTPITVTEIRARIKRLKKSTGTGPDGVKVDHFRSEARQEVLRLLFNYLMLTGRQPSTWRMNRTLLIPKEGKDGTLVENYRPLTISSQLCRMFWGIIDQKLRAHVRFTPRQKGFVSEAGCFNNIHILNEVLRHSKANHNSLVVVQIDISKAFDTVPHAAMGPALRKKGLPEQVIRMVDDAYENVETTIKCDQDVRVPIRRGVKQGDPLSPLLFNAVLEPLLLALDRQPGYPLAGGTTIASLAFADDLILTAGTVSQARDQLRMVEQYLRGLGMTLSAQKCACFHVIPSKDSWHLADPGLALEDGEAVPYATAGSCLTYLGMEISPWAGVTIKGLAEHLSETLVRVKRLALKPYQKVGLISKYLIPHYLYRLVMATPSVVLLRQLDRELRVVYRDIYHLPQSSANGLLYCGRKDGGLGLPKLETIVTSATLKAGLAFMSSEDPIMQALALGARLVDRLRRVSNSQRINWPCTRQDIDNYKRRARKEELARWGGLGSQGKSVAALTDDKIGNAWLSAPHLLKPCRQITALKMRVNSCADRVAMNRAVPQGDVSCRRCDAQKETLGHILGQCTYTKPSRIHRHNEICDLIVEQVVKQQPPVAVTREPSIRLPSGGNLKPDLVLQSERGVFVVDVTVRHEDNDYLGRGRQDKLEKYSRLLPHLGGNSEAPREVLPIVVGTRGAMPKETVKALAKLGITDRKTLLTVSLMAHRSSIEIYHHFMDYNAPLLPAGRRRRWAARHPP

SEQ ID NO: 18314 - protein, 1044 aa, Abscondita terminalis
MKPMRGELRSTEKKEKQIKGGSAFSTEEINLMLELELKWLGDKNVARKMHGVLQNKEIKQLRDKRAEPNYRKHREAYLAAHLQRAQMVEHEAQGTEEERLADLESQDPSERSHDSENEPPAPETTVEVPVQEQIDSREYNQKKATWRAGMLDVVLEGDPPKKTYPRESIAAIELLKDALRRLVLANNVIPQLDVDTIYELTVGHFAPPRKVESEEGQRRPKEGSKRGARRRYLYARTQDLYKKSPGTVAKYVRDRVDWLDVGGVKPRSSDVQELYTSLWGTKPVVQLPEELLEGNEVPKAVAQVLTPITVTEIRDRIKKLKKSTGIGPDGMKVDHFRSGARQEVLRLLFNFIMLTGRQPAMWRMNRTVLLLKEGKDGKLVENYRPLTISSQVCRIYWGIIDQKLRNHVRFTPRQKGFVSEAGCFNNVHILSELLRHSKATGQSLVVVQIDISKAFDTVPHSSLGPALRQKGLPEQVIRMVDDTYLDVSTDIECDKGDKVKITLQRGVKQGDPLSLLLFNAVLEPLLLKLEKQPGYPLREDISVASLAFADDLILVSGTVSQAQDQLRETEQYLGGLGMTMSAQKCACFQVKPTKDSWHLSDPGLKLGKGEAVPYTTAGSCLKYLGVEISPWAGIEIQCVSSHLTETLNRVRRLALKPHQKVELISRYLIPHYLYRLVIATPPVGLLRQLDQELRVVIKQIYHLPQSTANGLLYCGRGDGGLGLPKLETIVTSATLNAGLDFVSNQDPVIQALAEGSRLVNRLERAANNVRINWPCTRQDVQAYKRRAKKKELENWASLCSQGKSVAALTGDKIANAWLMQPHLLKPCRQITALKMRANSCADRVAMNRAVPQGDISCRRCEAQKETLGHILGQCTFTKPSRIRRHNEICELIVEQVTKQQPPVAVTREPSIRLPSGGNLKPDLVLQNQKGVFVVDVTVRHEDNDYLAQGRQDKLEKYSQLLPILREGREIHGEVLPIVVETRGAMPKETVKALATMGITDRKTLLTMSLIAHRSSIEIYHQFMDYNAPLYPAGRRRRWEARHPP

SEQ ID NO: 18315 - protein, 1146 aa, Emmelina monodactyla
MSNYNQKYNLRKRLPVTTFSATSSNQAQVRNAPEHEIHATFSPSSSPVLFHNENSSTLSPHSLFSNIPSPSSIHSLFRSHNSSPSSSSCISELTVDAVQSANANISVLTAATSRARKKWTFEHNSFLWRTYLIVTKCETTNLNNYLGTLHQEFTNKFPEMQASRQRIGDQRRQIIKKHYLTLEIRDQIRTEVASSLETSRLIQPASSLSLNTLTSSSQSTGNQNNSRMRWSNEINEDIVRCYLEVTDLERNKTAYRQKLHHNFLNKHPQLAHITEQRIADQRRIIFKNKMVDDIRMNEIRTEVANYLASNTEFTINTESTIIQENSNSLQTEPLPNDINIYADHEPIQPTNNLDLDDNIEVKFYETLEKFKNSNPETRPFIPKQKSSKKLSQTILYIDNKIIPKLLNHDQTFEDFHTIIYTAAYTAALVNGTKFTVSLGTNKRYRKPAWQRRLEKKVDKYRREIGRLTQFILGNRNPRVCATVEYIVQNYQTHSSHENPNTQLPEFLDTLKQKLNVTSTRLKRYLLCTERKKQNSNFRNNEKQFYRQLRSPISQNNNSRPPSLHEIHHFWASVWENPLSHNNSAEWIPKLPDTSHIGEMQLDNIPVETFINILNRAHNWKAPGSDNIHNFWYKKFSSTHPFIHSHICQFIKSPNTIPPFLAKGITYMLPKASDTTNPSNYRPITCLQTFYKLLTGCISELIYKHLNQYNILTEQQKGCRKNSQGCKEQITIDAIVMKQKLTSKQNMHTMYIDYKKAFDSVPHSWLTYVLKHYKIHPHLIVFLQEVMKLWQTQLHLKHNNSTLSSDAIKIQRGIFQGDSLSPLWFCLALNPLSELLNTSQVGLDLKSSNSSHTLSHLMYMDDIKLYANNKTDLNDLADITQTFSTDIHMHFGVDKCKINSINRGKVQPDYYIDTKFTPLNLHDSNIQINEKITDIQTKINNWAQKSLHGRHRVDLCQPHVDKDASNAWLRRGELFPETEAFMVAIQDQVIDTRNYQKYIIRRPNLPTDLCRRCHSSSETIQHITGACKSIVQTDYKHRHDQVAAIIHQNLAFQYKLITQTTAYYKYQPNTILENNQYRLYWDRTIITDKTIHYNRPDITVLDKTNKTAFLIDIAVCNTHNLLSTHRYRKDVEVYGFIDRIKNPMASR

SEQ ID NO: 18316 - protein, 745 aa, Lasioglossum morio
MVQFWRTTMTNGTNESPECEACGPELSELWKPVVPEEIKESFPDLNTCPGPDGLSARQLRAVPLLILTRIFNLFLICGKLPKHLLVAKTTLIPKKDGAQNPEDYRPITVQSIVTRAFHKILARRLVNRVPLDQRQKAFLPTDGCASNTFALDMILRYHRQYFKPLFMASIDIAKAFDSVSHNTIRDTLRIMGVPNPMVQYVMDTYERSSTILRGNDWESENIHATCGVRQGDPLSPMIFNMVVDRLLRRLPPEIGVTIDNTMFNALLFADDMIFLATTANGLQIMINTAADFLAKCGLFINATKSFTVSLRNVPHMKKSVVDGRARFQCRGLVLPALKREDEWQYLGIPFSPEGRTVSKPEVQFQEALDKLTKAPLKPQQRLFALRVMVLPGINHLLTLGNTTLSRLNKIDAMARAAVRKWLCLPHDVTNAYFHANVKDGGLSIASMRWLMPLHRRIRLQRFIHDDQETCSYLSQELQRTTRRLTENQRILDTSGKLEMRWANLLHSSIDGRGLRESRKVPQQHRWVIEGNRFLSGRDFINAMKLRINALPTRSRTSRGQRSSRLCRAGCNNVETLNHTLQQCHRTHRARIERHNAVTKYVKRALSNKCELVEEEPSFITSEGRRKPDLIAKQNTTALVFDAQVVSEHIDLDTAHATKMEKYQPLSNAVKERYGVNEVCFLTATLSYRGVWSAKSATLLLEKRILKKKELKIIATRVLVGGLSAFWRFNKTTNIRPNILPRTGVG

SEQ ID NO: 18317 - protein, 748 aa, Lasioglossum lativentre
MQEMVQFWRTAMTNGTNQSPEPETCGPELSELWKPVGPGEIDKSFPDLNTCPGPDGLSARQLKAVPLLILTRIFNLFLFCGKLPKHLLVARTILIPKKDGAQNPEDYRPITVQSIITRAFHKVLARRLVEQVPLDQRQKAFLPTDGCASNTFDLDLILRYHRQYFRPLYMASIDIAKAFDSVSHNTIKDTLLTMGVPRPMMEYIMDSYERSSTILTGGDWESEKIHPTCGVRQGDPLSPIIFNMVVDRLLRRLPPEVGVMIDSTRYNALIFADDMIFMATTPNGLQITIDTASDFLAKCGLNINASKSFTVALRNVPHVKKSVVDGSTKFRCRGRLLSSLRREDEWKYLGIPFTAEGRTVTKPEVQFQVALDKLTRAPLKPQQRLFALRVIVLPGLYHLLTLGNTTLSRLNKIDVMARAAVRKWLCLPHDVTNAYFHANSKDGGLSIPSMRWLMPLHRRVRLQKFFDGDQATNPYLTQELQRATRRLTENRLDLDTSEKLEKRWADLLHRSIDGKGLRESRKIPQQHRWVIEGNRFLSGRDFINAIKLRINALPTRSRTSRGQRSNRLCRAGCNAVETLNHVLQQCHRTHRPRIERHNAVVNYIKRALTNKCERVDEEPTFVTPAGRRKPDLIAKQNATALVLDAQVVNEHIDLDTAHVNKMEKYQPLTDAIKERYVVNDVCYLTATLSYRGVWSEKSATQLLAKRILKKKELKVITTRVLVGGLSAFWRFNKTTNTRPNILPRTGVG

SEQ ID NO: 18318 - protein, 1063 aa, Osmia bicornis
MVPATNISSLLYGGLGEAKSCLCETPALQGCQPARPYYVGPILRRQASDEINSSAITGGPTGSTGPTTRTEEAGPSEIYLCRNPECGRSFTTSRGRGVHEQKAHKNWHDQRQVETIDHKKAPWSAEELAILARQEAQLVLDGVRFINQALMPLFKNRSLESIKGQRKSLRHKERVLQLIQELTEENTVINTPVNIQSESPTQNDLLASIEDLFRQLKPLSGNQFQADRLGRICENISIWSKEKIHEELELYLLHILPLKPKQQTKASHSTSERKTTKRQARRVEYAKTQRAWRKNPCKCLRIILKGKTEATPPAKQEMTQFWRTTMTNGTNTSPESESKQPVMNHLWWPVTIDEIEQSFPELNTSPGPDGLSSRQLRAIPPFILVRIINLFLLCGKLPRHLLQAKTTLIPKKDGAQNPEDYRPITVQSVLTRTFHKVLATRLLKNIELDKRQKAFLPTDGCASNTFDLDMILRYHRQYFKPLYMASIDIAKAFDSVSHDTIRDSLLIKGVPSPMVEYIMDTYNRSSTKLMSNDWESDEIHPTCGVRQGDPLSPILFNIIIDRLLRRIPPEIGVSIDNVYYNALIFADDMLFFATTANGLQIMINTASDFLAKCGLFINANKSFTVALRTVPHMKKSVVDGKTQFQCRGQKLPAMKRESEWKYLGIPFTPEGRTLTKPEEQLQDALDKLTRAPLKPQQRLFALRVMVLPGLYHLLTLGNTTLSRLKKIDTMTRAAVRKWLGLPHDVPNAYFHAKVNDGGLSIPSVRWLMPLHRRVRLQKFIGVDQATNSYLTQELQRATKRLTENHVDYDSSESLEKRWATLLHGSIDGKGLRESKKTPQQHQWVTDGSKFLSGRDFVNATKLRINAMPTRSRTARGRRKNRLCRGGCNAVETLNHVLQQCHRTHRARIERHNAIINYVKRALVKKCEKVDEEPLFVTTEGKRKPDLIAKQREKAIVLDAQVVSEHIDLDTAHLNKIEKYEPLKETIKDRYAVRDVEYYTATLSYRGVWSAKSAKELLNIGILKKKELKIIATRVLVGGLNAFWRFNKTTNVRNNNIVPRTGVG

SEQ ID NO: 18319 - protein, 913 aa, Osmia bicornis
MPLFKNRSLESIKGQRKSLRHKERVLQLIQELTEENTVINTPVNIQSESPTQNDLLASIEDLFRQLKPLSGNQFQADRLGRICENISIWSKEKIHEELELYLLHILPLKPKQQTKASHSTSERKTTKRQARRVEYAKTQRAWRKNPCKCLRIILKGKTEATPPAKQEMTQFWRTTMTNGTNTSPESESKQPVMNHLWWPVTIDEIEQSFPELNTSPGPDGLSSRQLRAIPPFILVRIINLFLLCGKLPRHLLQAKTTLIPKKDGAQNPEDYRPITVQSVLTRTFHKVLATRLLKNIELDKRQKAFLPTDGCASNTFDLDMILRYHRQYFKPLYMASIDIAKAFDSVSHDTIRDSLLIKGVPSPMVEYIMDTYNRSSTKLMSNGWESDEIHPTCGVRQGDPLSPILFNIIIDRLLRRIPPEIGVSIDNVYYNALIFADDMLFFATTANGLQIMINTASDFLAKCGLFINANKSFTVALRTVPHMKKSVVDGKTQFQCRGHKLPAMKRESEWKYLGIPFTPEGRTLTKPEEQLQDALDKLTRAPLKPQQRLFALRVMVLPGLYHLLTLGNTTLSRLKKIDTMTRAAVRKWLGLPHDVPNAYFHAKVNDGGLSIPSVRWLMPLHRRVRLQKFIGVDQATNSYLTQELQRATKRLTENHVDYDSSESLEKRWATLLHGSIDGKGLRESKKTPQQHQWVTDGSKFLSGRDFVNATKLRINAMPTRSRTARGRRKNRLCRGGCNAVETLNHVLQQCHRTHRARIERHNAIINYVKRALVKKCEKVDEEPLFVTTEGKRKPDLIAKQREKAIVLDAQVVSEHIDLDTAHMNKIEKYEPLKETIKDRYAVRDVEYYTATLSYRGVWSAKSAKELLNIGILKKKELKIIATRVLVGGLNAFWRFNKTTNVRNNNIVPRTGVG

SEQ ID NO: 18320 - protein, 748 aa, Lasioglossum lativentre
MQEMVQFWRTAMTNGTNQSPEPETCGPELSELWKPVGPGEIDKSFPDLNTCPGPDGLSARQLKAVPLLILTRIFNLFLFCGKLPKHLLVARTILIPKKDGAQNPEDYRPITVQSIITRAFHKVLARRLVEQVPLDQRQKAFLPTDGCASNTFDLDLILRYHRQYFRPLYMASIDIAKAFDSVSHNTIKDTLLTMGVPRPMMEYIMDSYERSSTILTGGDWESEKIHPTCGVRQGDPLSPIIFNMVVDRLLRRLPPEVGVMIDSTRYNALIFADDMIFMATTPNGLQITIDTASDFLAKCGLNINASKSFTVALRNVPHVKKSVVDGSTKFRCRGRLLSSLRREDEWKYLGIPFTAEGRTVTKPEVQFQVALDKLTRAPLKPQQRLFALRVIVLPGLYHLLTLGNTTLSRLNKIDVMARAAVRKWLCLPHDVTNAYFHANSKDGGLSIPSMRWLMPLHRRVRLQKFFDGDQATNPYLTQELQRATRRLTENRLDLDTSEKLEKRWADLLHRSIDGKGLRESRKIPQQHRWVIEGNRFLSGRDFINAIKLCINALPTRSRTSRGQRSNRLCRAGCNAVETLNHVLQQCHRTHRPRIERHNAVVNYIKRALTNKCERVDEEPTFVTPAGRRKPDLIAKQNATALVLDAQVVNEHIDLDTAHVNKMEKYQPLTDAIKERYVVNDVCYLTATLSYRGVWSEKSATQLLAKRILKKKELKVITTRVLVGGLSAFWRFNKTTNTRPNILPRTGVG

SEQ ID NO: 18321 - protein, 825 aa, Osmia bicornis
MWSETKIFEELEIYLLKIFPPTEKRKAKASKSQLNQTFTKRQARRADYARTQRAWKKNPCNCLKVILKSKTSAKPPAKRDMIQFWETTMTQGTNESPNIESKRPEMPDLWAPVFPGEIKKSFPELTTSPGPDGLTARQLKAVPLNILTRIFNLFMICGKLPKHLLSAKTTLIPKKDGAQLPEDNRPITVQSVITRTFHKVMARRLLNKVSLDNRQKAFLPTDGCAENIFGLDLILKYHRQNFKPLYMASIDIAKAFDSVSHNTIKDTLDIMGLPKPMIEYIMDTYERGMTKLSCGEWESDEIKPTRGVRQGDPLSPLIFNMVIDRLLKRITSEVGVKIGENHYNALIFADDMIFVASTPNGLQMIINTATEFLAQCGLFINATKSFTVSIRNVPHLKRSVVDGKTHFYCRQQRLVALKREDEWRYLGVPFTPEGQTKINPELQLKDAIEKLTKAPLKPQQRLFALRTMVLPGLYHLYTLGNTTLSRLKKTDTMVRGAVRKWLNLPQDAPNAYFHANVKDGGLSIPSMRWLMPLHRRVRLQKFIRADQPTDPYLTQEIQRTIRRLTENRIDYDTASKIEEKWAKLLHSSIDGKGLRESRKTPQQHRWVIDGSRFLSGRDYINSIKLRINALPTRSRTSRGRLASRACRAGCHAVETLYHVLQQCHRTHKARIERHNAITAYIKRALKKRYETVEEEPHFTTDLGLKKPDLIATNATEALVLDTQIISDQMSLDLAHNNKIDKYKNLEQDIKDRYGKQNVSFTTATLSYRGVWSAESANQLVLNKILRKKELKIISTRALIGGLNSFWRFNKMTNIAHNTFRRTGVG

SEQ ID NO: 18322 - protein, 1126 aa, Lasioglossum lativentre
MTLLSVHVPPAAPPLQLSRPVVSNWTLPSSHLVEVWRVREPHYIKWRRRSDMDAVRGHSLASSCLLVGSRCEYLLRKGNQMLPLRTTVLLGCQPARPNIVGPENRNQASDEQNSIAGGPSGSSGPTIIDEAERRDPPPFFCRNPGCERSFPTSRGRGVHEQKAHKNWHDDRQVENINSKKAPWSAEEIALLARQEARLVLDGARFINQALKPLFPERTLEAIKGQRKPQRYKDRVQQIIEELTAENAGASDVQEASGESSDLHNTDLLSSVEELFGLLKPLDEFGSQFHAEHLALICDNISTWSLERVLEEVEIYLLQTFPPSPKVRTKASRSAREQRSSRRQARRADYARTQRAWRKNPCKCLRIILKGKLEANPPAKQEMVQFWRTTMTNGTNESPECEAGGPELSELWNPVVPGEITKSFPDLNTSPGPDGLSARQLKAVPLNILTRIFNLFLICGKLPKHLLVAKTTLIPKKDGAQNPEDYRPITVQSVLTRAFHKILARRLVRLVPFDQRQKAFLPTDGCASNTFDLDLILRYHRQHFKPVFMASIDIAKAFDSVSHNTIRDTLRIMGVPILMARYIMDSYERSSTILSGDDWESESIHPTCGVRQGDPLSPIIFNMVVDRLLRRLPPEIGVMIGNTAFNAFLFADDMIFLATTSNGLQIMIDTASDFLAKCGLFINATKSFTVALRNVPHVKKSVVDGRARFQCRGRILPALKREDEWQYLGIPFSPEGRTVAKPEGQFQEALEKLTKAPLKPQQRLFALRVMVLPGIYHLLTLGNTTLSRLNKIDAMSRAAVRKWLCLPHDVTNAYFHANVKDGGLSIASMRWLMPLHRRVRLLRFIENDQEASPYLSQELQRTTRRLTENRLVLDTSEKLEIRWANMLHSSIDGKGLRESRKVPQQHRWVIEGNRFLSGRDFINAMKLRINALPTRSRTSRGRRSNRLCRAGCNAVETLNHVLQQCHRTHRTRIERHNAVTNYVKRSLSNKCETVEEEPSFITPEGRRKPDLIAKQNTTALVLDAQVVNEHIDLDAAHAAKIEKYQPLAAAIKERYDVNEVCFLTATLSYRGVWSEKSAKQMLQKGILQKKELKIIATRVLVGGLSAFWRFNKTTNIRLNILPRTGVG

SEQ ID NO: 18323 - protein, 782 aa, Pteromalus puparum
MIASDDMTLATTRTLPKRDGAKELYERLWGTVGPANSDVFDEEHEHTSSSMSQILAPVMGDEVRRKITSVENSSAAGPDGITKRGLRKPGAHAALAKFFNLILLAQYYPEEWRCNRTTLIPKVGKDPSNIKNWRPITISSMISRIFSSMIDKRLRRVIKQNDRQKGFKHENGCFANVRILNAALKALKQVGGVLEIEDVEKAFDTVPHSAIKPALMRKGIDAQMAEYILDMYRNVKTEIKTEDGNVPITLKRGVKQGDPLSPLLFNLVIEPLIEKLQKETEGIELEGQNLSAMAFADDLVVVGKDKETAAKQAAMTAEYFAKLGMSLSITKCTAIEYVPTRKSWYVRDPRIEVNGVRMPTASVDEAIKYLGAKITPWKGLIENFETAAFEQLFDRLRKVPLKPMQKLELLSLYLLPRYTHGLIMNPPPKKTLKAINGLIRSRVKAMLHVSDKTSSSFLYTPKKKGGLGLMDIEKMVYVAALRNATKSARSEDQMTGTAMNEAAIQRRMSEYAKEIDLEWPVTIQQLDEAKDAIKRSHLDTWAKQPCQGQGARDFQERESNAWLLQGQMLKHSRIADAIKLRTNTYTTRVNMKNYVAKDNNAYDANCRKCKNLPETLGHILGQCVTTKPQRIRRHDEIKDLIAERLLTKGEVLKEHSFTVSGETYRPDLVAKANENEAYIIDVSVRYERGRWKENAEFEKIEKYSTITKEVKDLLKVKKVSVIPLIIGSRGAISRTAKRAMISLGIGRKDRITISMIALRSSLEMLNEFMDYGQVERQEGSLV

SEQ ID NO: 18324 - protein, 1058 aa, Conopomorpha cramerella
MIAQTNIAPVDNKQMENTNPIETAVRNEEIDSTFMMALEYFSTTEPTERPYLPKQRSSKYLARIVHYLNNITLPETANLNTSFTTLQTLIYCAAWTASKLNGSKLTVPPTELVCDPKKLFQPKWQYRLEKKIAKLRSQIAHLILYKQGNRTNKIVQTYSEVTQQHKQHSTYETQNTELDHFLDTLKQKLSAAATRLKRYNSCTNRKTQNKLFKCNEKQFYRNLKTPNTKYNTTENNPLSGDTLQQFWANIWEQPKHHNTQAKWIESEIKYNTLTPPMEFNQVSFDTFLAVLEKLHNWKAPGSDKIHNFWLKKLTYLHPFLHNYLNDFIQHPEKMPHYLAVGTTYMLPKDKDDLQNPAKYRPITCLQTFYKIISSCITQTMYTHLESNKILTEQQKGCRKHSRGCKEQLIIDSIVIQQSIKAKSDLFTMYIDYKKAYDSVPHSWLLEVLNIYKINNTIISFLKHTMQLWITRLQVNTTVTGSIKILRGIFQGDALSPLWFCLALNPLSNTLESTKTGLPISYSTGSQENNVYHLNHLLYMDDIKLYAGTEKELNALTTLTETFSNDIGMEFGVDKCKINSIKSGKHYNHSYTLASGLNIEALCENDCYKYLGYSQSKGILQKEVKSDLTKEFKKRITSILKSELNARNITKAVNTYAIPILTYSFGIISWSKSELLSLQRLINTSMTRHRKHHPRACFQRQTLPRAEGGRGLIDITNLHNSQIIKLRSYFYEKGATSNLHRAIIQTDTRFTPLKLADKNIQINITEKVQKIAEWSQKSLHGRHLKDLCQTNVDMVASNAWLRHGVLFPETEGFMLAIQDQVIETRNYQKHIMKLPNMSDDVCRKCMSAPETIQHITSACKAISNTDYKHRHDQIANIIHQKLVKKYRLTTDSTLPYYKYQPKTVIETDHMKLYFDRAIITDKTIHHNRPDITLVDKVRKTAYLIDIAVPNTHNLQTTISDKISKYVDLKIEITRMWHLNQVTIVPIVISSTGVIPKQIHQALNTLGLQSSTYVTIQKAVILNPCRIVRKFFQSNQDLHTHTQSSNIHNIMSITNQSLPS

SEQ ID NO: 18325 - protein, 1373 aa, Conopomorpha cramerella
METRSKKKIRLGPLPGDRQGASGADAGCYSMRTIGSDELNKRAVAESKATAEISSPQYHSPLSSLFASPPSSPHSFSSPPSPSSTSSHIPRSSKDVVQTAAAEEIAPALDATRSRKKWSDEENKFILRTYLIITKSETATKNYLDSLHYQYHQRFPNQDIPKQRLGGQRRAIVKNQLLNKNTIDSITKEVQLLLQTDSLLLDTSTESQLKNSERSRMKWNDEMNENIMKIYFEVTELENNKTAFRKRLHEKFLEKYPNLSCLSEQRIADQRRAIVCNQYIKQDRLEQIRQEIAKQLNIAKENQVMLDAVQDANDDQHFIPPTNINLVHNRQTDITDPIETAVRNEEIDSTFMMALEYFSTTEPTQRPYLPKQRSSKSLAIIVNYLNNVTLPETANQKTNFTTLQTLIYCAAWTATKLNGSKLTIPPTELVCNPKKLFQPKWQFRLQNKIIKLRAKIAHLTLYKQGNRTNKIVQTLSEVTKQYRQHSTYETQNTELDHFLDTLKQKLSAAATRLKRYNSCTNRKTQNKQFKSNEKQFYRDLRTHSTKYNFAENNPISAETLQQFWANIWEQPKEHNSQAKWIESEIKYNSMIHPMEFNQVSFDTFLGVVEKLHNWKAPGSDKIHNYWLKKLTYLHPFLHNFLNEFIQHPEIMPDYLTVGTTYMLPKDKDDLQNPAKYRPITCLQTYYKVISSCITQTMYTHLERNKILTEQQKGCRKHSRGCKEQLVIDSVVTQQSIKSKSDLFTIYIDYKKAYDSVPHSWLVQVLDIYKINKSIISFLKHTMKFWITHLQVNTTVTDSIKILRGIFQGDALSPLWFCLALNPLSNSLQSTKIGLAITYPTGTHAHNVYYLNHLLYMDDIKLYARTEKELDFLTAHTETFSNDIGMEFGIDKCKINAIKSGKHYKHSYTLASGLNVEALSEDDCYKYLGYNQSKGILQKEVKSNLTKEFKKRITGILKSELNSRNITIAINTYAIPILTYSFGIISWSKSELLSLQRLINTSMTKHRKHHPRACFQRQTLPRAEGGRGLIDIINLHNSQIIKLRSYFYEKAKTSDLHQAITQNDTRLTPLKLADRNIEVNITDKSQKIEVWSQKSLHGRHRQDLCQINVDMVASNAWLRHGALFPETEGFMLAIQDQVIETRNYQKYIMKLPNMRDDLCRRCNSASETIQHITSACKALSNTDYKHRHDQIANIIHQKLVHKHKLTTDPFAPYYKYQPKTVIDTEDTRLYFDRAIITDKTIHHNRPDITLVDKVRKTAYLIDIAVPNTHNLQTTISDKISKYVDLKIEITRMWHLNQVTIVPIVISSTGVIPKQMHQALNILGLPSNTYVTIQKAAILNTCRIVRKFFQSNQDLHTYTQSSHNQMSITNQSLPS

SEQ ID NO: 18326 - protein, 1349 aa, Conopomorpha cramerella
METRSKKKIRLGPLPGGRRGAPGADAGCLSMRTIGSDELNKRAVAESNATADVSPHQYSSPLSSLFASPPSSPHSFSSPSSPMSISSHVSRSSKDVVQTAAAKQLAPALDATRTRKKWSDEENKFILRTYLTITKLETNTKNYLDSLHHQYHQQFPNQDIPKQRLGGQRRAIARNKLLDKHTIDSITNEVQLLLQKELETHTEPQLNISERTRMKWSDEMNEYIMKMYFEVTELETNKTAFRKRLHEKFLERYPNLSYLSEQRIADQRRAIVHNQYLKQDRLEQIRDEIAIQLNIVKENHVMTEAIQVVNDDQNIIPPININPVHNRQTDNIDPIETAVRNEEIDSTFMMALEYFSTTEPTQRPYLPKQRSSKSLARIVHYLNNITLPETANKDTSFSTLQTLIYCSAWTASKLNGSKLTIPPTELVCNPKKLFQPKWKSRLENKIAQLRSKIAHLTLYKLGNRTKRIVQTLTEVKQQHKQHSTYEIPNTELDHFLDTLKQKLSAAASRLKRYNSCTNRKTQNKQFKSNEKQFYRDLKTQGIKYNNEENNPISGETLQTFWANIWEQPKQHNTQAKWIETAITYNTLTQPMEFNQVTFDTFLGVLEKLHNWKAPGSDKIHNFWLKKLTYLHPFLHNFLNDFIQHPETMPQYLAIGTTYMLPKDKDDLQNPAKYRPITCLQTYYKIISSCITQTMYIHLENNKILTEQQKGCRKHSRGCKEQLVIDSVVTQHSIKTKSDLFTMYIDYKKAYDSVPHSWLLQVLNIYKINNTIISFLKHTMQLWITHLQVNTTVTDSIKILRGIFQGDALSPLWFCLALNPLSNALQSINSGLPIPYSTETQSHKVYHLNHLLYMDDIKLYASTEEELNVLITLTETFSNDICMEFGIDKCKINSIKSGKHYKHSYTLTSGLNIEALSEDGCYKYLGYCQSKGILQKEVKSDLTKEFKKRLTNILKSELNGRNITKAINTYAIPILTYSFGIISWSKSELLTLQRLINTSMTRHRKHHPRACFQRQTLPRADGGRGLIDIANLHNSQVNKLREYFHEKAETSDLHQAISQNDTRFTPLKLADKNIHVNITDKVQKIAEWSQKSLHGRHLQDLCQTNVDMVASNAWLRHGALFPETEGFMLAIQDQVIETRNYQKHIMKLPNMTNDLCRRCNSTSETIQHITSACKALSNTDYKHRHDQIANIIHQKLVQKHKLTTDPIQPYYKYQPKTVIDTDEMKLYFDRAIITDKTIHHNRPDITLVDKLRKTAYLIDIAVPNTHNLQTTISEKVSKYVDLKIEITRMWHLNQVTVVPIVISSTGVIPKQIHQALNTLGLQSNTYVTIQKAVILNTCRIVRKYGVKYAW

SEQ ID NO: 18327 - protein, 1370 aa, Conopomorpha cramerella
METRSKKKIRLGPLPGGRRGAPGADAGCLSMRTIGSDELNKRAVAESNATADVSPHQYSSPLSSLFASPPSSPHSFSSPSSPMSISSHVSRSSKDVVQTAAAKQLAPALDATRTRKKWSDEENKFILRTYLTITKLETNTKNYLDSLHHQYHQQFPNQDIPKQRLGGQRRAIARNKLLDKHTIDSITNEVQLLLQKELETHTEPQLNISERTRLKWSDEMNEYIMKMYFEVTELETNKTAFRKRLHEKFLERYPNLSYLSEQRIADQRRAIVHNQYLKQDRLEQIRNEIAIQLNIVKENHVMTEAIQVVNDDQNIRPPININPVHNRQTDNIDPIETAVRNEEIDSTFMMALEYFSTTEPTQRPYLPKQRSSKSLARIVHYLNNITLPETANKDTSFSTLQTLIYCSAWTASKLNGSKLTIPPTELVCNPKKLFQPKWKSRLENKIAQLRSKIAHLTLHKLGNRTKRIVQTLTEVKQQHKQHSTYETPNTELDHFLDTLKQKLSAAASRLKRYNSCTNRKTQNKQFKSNEKQFYRDLKTQGIIYNNEENNPISGETLQTFWANIWEQPKQHNTQAKWIETAITYNTLTQPMEFNQVTFDTFFGVLEKLHNWKAPGSDKIHNFWLKKLTYLHPFLHNFLNDFIQHPETMPQYLAIGTTYMLPKDKDDLQNPAKYRPITCLQTYYKIISSCITQTMYIHLENNKILTEQQKGCRKHSRGCKEQLVIDSVVTQHSIKTKSDLFTMYIDYKKAYDSVPHSWLLQVLNIYKINNTIISFLKHTMQLWITHLQVNTTVTDSIKILRGIFQGDALSPLWFCLALNPLSNALQSINSGLPIPYSTETQSHKVYHLNHLLYMDDIKLYASTEEELNVLIALTETFSNDICMEFGIDKCKINSIKSGKHYKHSYTLTSGLNIEALSEDGCYKYLGYCQSKGILQKEVKSDLTKEFKKRLTNILKSELNGRNITKAINTYAIPILTYSFGIISWSKSELLTLQRLINTSMTRHRKHHPRACFQRQTLPRAEGGRGLIDIANLHNSQVNKLRAYFHDKAETSDLHQAITQNDTRFTPLKLADKNIHVNITDKVQKIAEWSQKSLHGRHLQDLCQTNVDMAASNAWLRHGALFPETEGFMLAIQDQVIETRNYQKHIMKLPNMTNDLCRRCNSASETIQHITSACKALSNTDYKHRHDQIANIIHQKLVQKHKLTTDPIQPYYKYQPKTVIDTGEMKLYFDRAIITDKTIHHNRPDITLVDKLRKTAYLIDIAVPNTHNLQTTISEKVSKYVDLKIEITRMWHLNQVTIVPIVISSTGVIPKQIHQALNTLGLQSNTYVTIQKAVILNTCRIVRKFFQSHQDLHTHTHSSIINMSITTQSPPS

SEQ ID NO: 18328 - protein, 1157 aa, Conopomorpha cramerella
MKWSDEMNENIMKIYFEVTELENNKTAFRKRLHEKFLEKYPNLSCLSEQRIADQRRAIVCNQYIKQDRLEQIRQEIAKQLNIAKENQVMLDAVQDANDDQHFIPPTNINLVHNRQTDITDPIETAVRNEEIDSTFMMALEYFSTTEPTQRPYLPKQRSSKSLANIVNYLNNVTLPETANQKTNFTTLQTLIYCAAWTATKLNGSKLTIPPTELVCNPKKLFQPKWQFRLQNKIIKLRAKIAHLTLYKQGNRTNKIVQTLSEVTKQYRQHSTYETQNTELDHFLDTLKQKLSAAATRLKRYNSCTNRKTQNKQFKSNEKQFYRDLRTHSTKYNFAENNPISAETLQQFWANIWEQPKEHNSQAKWIESEIKYNSIIHPMEFNQVSFDTFLGVVEKLHNWKAPGSDKIHNYWLKKLTYLHPFLHNFLNEFIQHPEIMPDYLTVGTTYMLPKDKDDLQNPAKYRPITCLQTYYKVISSCITQTMYTHLERNKILTEQQKGCRKHSRGCKEQLVIDSVVTQQSIKSKSDLFTIYIDYKKAYDSVPHSWLVQVLDIYKINKSIISFLKHTMKFWITHLQVNTTVTDSIKILRGIFQGDALSPLWFCLALNPLSNSLQSTKIGLAITYPTGTHAHNVYYLNHLLYMDDIKLYARTEKELDFLTAHTETFSNDIGMEFGIDKCKINAIKSGKHYKHSYTLASGLNVEALSEDDCYKYLGYNQSKGILQKEVKSNLIKEFKKRITGILKSELNSRNITKAINTYAIPILTYSFGIISWSKSELLSLQRLINTSMTKHRKHHPRACFQRQTLPRAEGGRGLIDIINLHNSQIIKLRSYFYEKAKTSDLHQAITQNDTRLTPLKLADRNIEVNITDKSQKIEVWSQKSLHGRHRQDLCQINVDMVASNAWLRHGALFPETEGFMLAIQDQVIETRNYQKYIMKLPNMRDDLCRRCNSASETIQHITSACKALSNTDYKHRHDQIANIIHQKLVHKHKLTTDPFAPYYKYQPKTVIDTEDTRLYFDRAIITDKTIHHNRPDITLVDKVRKTAYLIDIAVPNTHNLQTTISDKISKYVDLKIEITRMWHLNQVTIVPIVISSTGVIPKQMHQALNILGLPSNTYVTIQKAAILNTCRIVRKFFQSNQDLHTYTQSSHNQMSITNQSLPS

SEQ ID NO: 18329 - protein, 1371 aa, Conopomorpha cramerella
METRSKKKIRLGSLPGDRQGAPGADAGCHSMRTIGSYELNKRAVAESNATAEISPHPYSSPLSSLFSSPLSSPHSFSSPSSPSSITSHISRSSKDVVQTAAAEQIAPTSDATRSRKKWSDEENKFILRTYLIITKLETNTKNYLDSLHHQYHQQFPNQDVPKQRLGGQRRAIVKNKLLDKHTIDAITNDVDSLLQNKLETSAEPQLKISGSRMKWSVEMNENIMKMYFEVTELETNKTAFRKRLYEKFLERYPNLSSLSEQRIADQRRAIVHNQYIKQDRLDQIRDEIANELNIAKETHLITETIQVASDDQYMIAQTNIAPVDNKQMENTNPIETAVRNEEIDSTFMMALEYFSTTEPTERPYLPKQRSSKYLARIVHYLNNITLPETANLNTSFTTLQTLIYCAAWTASKLNGSKLTVPPTELVCDPKKLFQPKWQYRLEKKIAKLRSQIAHLILYKQGNRTNKIVQTYSEVTQQHKQHSTYETQNTELDHFLDTLKQKLSAAATRLKRYNSCTNRKTQNKLFKCNEKQFYRNLKTPNTKYNTTENNPLSGDTLQQFWANIWEQPKHHNTQAKWIESEIKYNTLTPPMEFNQVSFDTFLAVLEKLHNWKAPGSDKIHNFWLKKLTYLHPFLHNYLNDFIQHPEKMPHYLAVGTTYMLPKDKDDLQNPAKYRPITCLQTFYKIISSCITQTMYTHLESNKILTEQQKGCRKHSRGCKEQLIIDSIVIQQSIKAKSDLFTMYIDYKKAYDSVPHSWLLEVLNIYKINNTIISFLKHTMQLWITRLQVNTTVTGSIKILRGIFQGDALSPLWFCLALNPLSNTLDSTKTGLPISYSTGSQENNVYHLNHLLYMDDIKLYAGTEKELNALTTLTETFSNDIGMEFGVDKCKINSIKSGKHYNHSYTLASGLNIEALCENDCYKYLGYSQSKGILQKEVKSDLTKEFKKRITSILKSELNARNITKAVNTYAIPILTYSFGIISWSKSELLSLQRLINTSMTRHRKHHPRACFQRQTLPRAEGGRGLIDITNLHNSQIIKLRSYFYEKGATSNLHRAIIQTDTRFTPLKLADKNIQINITEKVQKIAEWSQKSLHGRHLKDLCQTNVDMVASNAWLRHGVLFPETEGFMLAIQDQVIETRNYQKHIMKLPNMSDDVCRKCMSAPETIQHITSACKAISNTDYKHRHDQIANIIHQKLVKKYRLTTDSTLPYYKYQPKTVIETDHMKLYFDRAIITDKTIHHNRPDITLVDKVRKTAYLIDIAVPNTHNLQTTISDKISKYVDLKIEITRMWHLNQVTIVPIVISSTGVIPKQIHQALNTLGLQSSTYVTIQKAVILNTCRIVRKFFQSNQDLHTHTQSSNIHNIMSITNQSLPS

SEQ ID NO: 18330 - protein, 809 aa, Cepaea nemoralis
MWSEVVAVVKKAKNKSAPGPNGVPYTVYKRCPNVLMKLHRILRSAWKQKHVSTEWKTANGIYIPKEQNSAGISQFRPISLLNVEGKIFFSIMASRITKYLTRNKYIETAVQKGGLPGVPGCLEHSTMIWDAIQRAKTKKEELHVIWLDLANAYGSVPHQLLWHALKAYHVPENITEMLVQYFSGFSLRFSTKTFTTRWIELEVGIAMGCTISPILFVMAMQVILDAASGYAHGPRLSEGVNTPPLKAFMDDTTILTPKESDARSALLRLDDLIRWCRMSFKPKKLRSLSIMKGKAVERRFTVSGQAIPTVMEEPVICLGRVYDSTLTDRNAVVEVQTMLTNGLNTIDKTRLIGKFKIWVLQFMLIPKLLWPLLIYDIGVTTVSAMESKTSRYMRKWLGVPTWLTTVALYCKQSKLVLPFRSLMEEFKAGKARLAMMLRESPDITVSASVPALRTGRKWKVVSAVEQAQATLQLKEVMGHTQLGKHGFGFLANDKMWSDANAKERRDLVVKEICKGEDDERVRKAAQQARQTQWMSWESVVQRSVTWNEIWRKEPLRLSFVIRSLYDVLPSGANLKTWGLTTDIFCPLHKEAQIVQTAEHVLSGCKVALSQGRFTWRHNKVLTELAAIVDAARMKANKEGNGPRPMEISFVRAGRKNGKADDLPLATVFDGTRDWQLTVDLKDHGKYPEVIRRFGLRPDIVLSSSSAKQLTLIELTVPYESNIEEQHLYKTEKYNDMVASLRREGYTVRLFAVEVGARGLVSYSVFDVLKRLGIKGKERARAQKQLSEAAEKASCWLWNCRNLNWNESRH

SEQ ID NO: 18331 - protein, 1155 aa, Cepaea nemoralis
MMEKTNDNQRNGVNGCSIGAASPGRDSHVHQVTPDRQQATRCKRLPTVSDRTDPRTTSIAQRTLGHACVCGRSFPTFQGMRIHNGKMKCERVLQEARQRSPERDDESLEDVRRVEPHSEDVQFSSADNTQAVANCGTPEEPSETRMKIKFPSAIRKDEWAMLDVTLSRALEAELKHKSLEEKLIQFGEIIYRHSLIKFGCISEGKVAALPQKTRRQRLMEAVRQEKNAARKRWKKAAEHQKEGLRQVWQHLKAKHNALARAERFCRNRRKTRKERERFFREPYKFARDLFEQPRSGVLDVSREELENHLVTKYSDAQRNVPLGEMEGRKSPAEPTVKFIARPPMWNEVVAVVKKARGKSAPGPNGVPYTVYKRCPRVLSRLHLVLMSAWTQRHVSKEWKTANGIYIPKEQNSTGIGQFRPISLLNVEGKIFFSIMASRLTKYLMANKYIETAVQKGGLPGVPGCLEHSTMIWDAIQRAKTKKEELHVIWLDLANAYGSVPHQLLWHALKAYHVPENVKEMLVQYFSGFSLRFSTKTFTTRWIDLQVGIAMGCTISPILFVMAMQVILDAASGYAHGPRLSEDNINRSPPLKAFMDDTTILTPRESDACSILRRLDELVRWSRMSFKPKKSRSLSIVRGKVVERRFRVAGQVIPTVTEEPVKSLGRVYDSTLTDRNAVAEMHAMLTNGLATIDKTRLIGKFKIWCLQFVLIPKLLWPLLIYDIGVYAVSTMESKISRHIRMWLGAPACLTTVALYCKQSKLVLPFTSLMEEFKAGKTRLAMMMRESPDAMVRAAVPALRTGRKWHVVDEIEKAQASLQLKEVMGHTQHGRLGLGFLAKEPRWSKAEPKQRREMVVRQIREGEDDERVRKAAQQAQQAHWMSWDAVVQRSLTWNDIWHMAPLRLSFIVRSLYDVLPSAANLVKWDQTDDPLCPLCTKAPKVQTAEHVLSGCKTALTQGRFTWRHNKVLEELAAIVNGARTKANKEGNRPRPMEISFVREGRRRKTKADELPLATVFDGARDWELTVDLKGRGKYPEVICSFGLRPDIVLSSPSAKQLTLIELTVPYESNMEEQHAFKTAKYDGMVAGLRRLGYTVRFFAVEIGARGMVSHSVFDMLKRMGMKGQARNKAQKRLCEAAERASCWLWNRRNLEWNKSRD

SEQ ID NO: 18332 - protein, 1076 aa, Cepaea nemoralis
MRIHNGKMKCERVLQEARQRSPERDDETLEDVRRVEPHSEEVQFSSADNTQAAVTCDTPEEPSETRLKIKFPSAIRREEWAMFDVTLSRALDAELKHKSLEEKLTQFGEIIYRHSLNKFGCISEGKVAALPQKTRRQRLMEAVRQEKNAARKRWKNAAEHQKEGLRQVWQHLKAKHNALSRAERFCRNRRKTRKERERFFREPYKFARDLFEQPRSGVLDVSREELENHLVATYSDAQRNVPLGEMEGLKSPAVPTVKFNAGPPMWYEVVAVVKKARCKSAPGPNGVPYTVYKRCPKVLSRLHWLLMSAWTKRCVSTEWKTANGIYIPKEQNSTGIGQFRPISLLNVEGKIFFSIMASRLTKYLMANKYIETAVQKGGLPGVPGCLEHSTMIWDAIQRAKTKKEELHVIWLDLANAYGSVPHQLLWHALKAYHVPENIKEMLVQYFSGFSLRFSTKTFTTRWIDLQVGIAMGCTISPILFVMAMQVILDAASGYAHGPRLSEDNINRSPPLKAFMDDTTILTPWESDACSILRRLDELVRWSRMSFKPKKSRSLSIVGGKVVERRFRVAGQVIPTVTEEPVKSLGRVYDSTLTDRNAVAEMHAMLTNGLATIDKTRLIGKFKIWCLHFVLIPKLLWPLLIYDIGVYAVSTMESKISRHIRMWLGAPACLTTVALYCKQSKLVLPFTSLMEEFKAGKTRLAMMMRESPDAMVRAAVPALRTGRKWHVVDEIEKAQASLQLKEVMGHTQHGRLGLGFLAKEPRWSKAEPKQRREMVVRQIREGEDDERVRKAAQQAQQAHWMSWDAVVQRSLTWNDIWHMAPLRLSFVVRSLYDVLPSAANLVKWDQTDDPLCPLCTKAPKVQTAEHVLSGCKTALTQGRFTWRHNKVLEELAAIVNGARTKANKEGNRPRPMEISFVREGRRRKTKADELPLATVFDGARDWELTVDLKGRGKYPEVICSFGLRPDIVLSSSAAKQLTLIELTVPYESNMEEQHTFKTAKYDGMVAGLRRLGYTVRFFAVEIGARGMVSHSVFDMLKRMGMKGQARNKAQKRLCEAAERASCWLWNRRNLEWNKSRD

SEQ ID NO: 18333 - protein, 1076 aa, Cepaea nemoralis
MRIHNGKMKCERVLQEARQRSPERDDETLEDVRRVEPHSEEVQFSSADNTQAAVTCDTPEEPSETRLKIKFPSAIRKEEWATFDVTLSRALDAELKHKSLEEKLTQFGEIIYRHSLNKFGCISEGKVAALPQKTRRQRLMEAVRQEKNAARKRWKNAAEHQKEGLRQVWQHLKAKHNALSRAERFCRNRRKTRKERERFFREPYKFARDLFEQPRSGVLDVSREELENHLVTTYSDAQRNVPLGEMEGLKSPAVPTVKFNAGPPMWYEVVAVVKKARCKSAPGPNGVPYTVYKRCPKVLSRLHWLLMSAWTKRCVSTEWKTANGIYIPKEQNSTGIGQFRPISLLNVEGKIFFSIMASRLTKYLMANKYIETAVQKGGLPGVPGCLEHSTMIWDAIQRAKTKKEELHVIWLDLANAYGSVPHQLLWHALKAYHVPENVKEMLVQYFSGFSLRFSTKTFTTRWIDLQVGIAMGCTISPILFVMAMQVILDAASGYAHGPRLSEDNINRSPPLKAFMDDTTILTPWESDACSILRRLDELVRWSRMSFKPKKSRSLSIVRGKVVERRFRVAGQVIPTVTEEPVKSLGRVYDSTLTDGNAVAEMHAMLTNGLATIDKTRLIGKFKIWCLHFVLIPKLLWPLLIYDIGVYAVSTMESKISRHIRMWLGAPACLTTVALYCKQSKLVLPFTSLMEEFKAGKTRLAMMMRESPDAMVRAAVPALRTGRKWHVGDEIEKAQASLQLKEVTGHTQHGRLGLGFLAKEPRWSKAEPKQRREMVVRQIREGEDDERVRKAAQQAQQAHWMSWDAVVQRSLTWNDIWHMAPLRLSFVVRSLYDVLPSAANLVKWDQTDDPLCPLCTKAPKVQTAEHVLSGCKTALTQGRFTWRHNKVLEELAAIVNGARTKANKEGNRPRPMGISFVREGRRRKTKADEVPLATVFDGARDWELTVDLKGRGKYPEVICSFGLRPDIVLSSSAAKQLTLIELTVPYESNMEEQHAFKTAKYDGMVAGLRRLGYTVRFFAVEIGARGMVSHSVFDMLKRMGMKGQARNKAQKRLCEAAERASCWLWNRRNLEWNKSRD

SEQ ID NO: 18334 - protein, 1134 aa, Cepaea nemoralis
MMEKTKDIHPSNSARAREDEFIGDLTVTDRTDPRTTSIAQRTLGHACVCGRSFPTFRGMRVHNGKMKCERALQEARQRSPEKDDESLEDVRRVEPHSEDVQFSSADNTQAVATCGTPEEPSETRLKIKFPSAIRKDEWAMLDVTLSRALDAELKHKSLEEKLTQFGEIIYRHSLNKFGCISEGKVAALPQKTRRQRLMEAVRQEKNAARKRWEKAAEHQKEGLRQVWQHLKAKHNALARAERFCRNRRKTRKERERFFREPYKFARDLFEQPRSGVLDVSREELENHLVTTYSDAQRDVPLGEMEGLKSPAEPTVRFNARPPMWNEVVAVVKKARGKSAPGPNGVPYTVYKRCPRVLSRLHLVLMSAWTQRHVSTEWKTANGIYIPKEQNSTGIGQFRPISLLNVEGKIFFSIMASRLTKYLMANKYIETAVQKGGLPGVPGCLEHSTMIWDAIQRAKTKKEELHVIWLDLANAYGSVPHQLLWHALKAYHVPENVKEMLVQYFSGFSLRFSTKTFTTRWIDLQVGIAMGCTISPILFVMAMQVILDAASGYAHGPRLSEDNNNRSPPLKAFMDDTTILTPRESDAGSILRRLDEVVGWSRMSFKPKKSRSLSIVRGKVVERRFRVAGQVIPTVTEEPVKSLGRVYDSTLTDGNAVAEMHAMLTNGLATIDKTRLIGKFKIWCLQFVLIPKLLWPLLIYDIGVYAVSTMESKVSRHIRMWLGAPACLTTVALYCKQSKLVLPFTSLMEEFKAGKTRLAMMMRESPDAMVRAAVPALRTGRKWHVVDEIEKAQASLQLKEVMGHTQHGRLGLGFLAKEPRWSKAEPKQRREMVVRQIRKGEDDERVRKAAQQAQQAHWMSWDAVVQRSLTWNDIWHMAPLRLSFIVRSLYDVLPSAANLVKWDQTDDPLCPLCTKAPKVQTAEHVLSGCKTALTQGRFTWRHNKVLEELAAIVNGARTKANKEGNRPRPMEISFVREGRRRKTKADELPLATVFDGARDWELTVDLKGRGKYPEVICSFGLRPDIVLSSSSAKQLTLIELTVPYESNMEEQHAFKTAKYDGMVAGLRRLGYTVRFFAVEIGARGMVSHSVFDMLKRMGMKGQARNKVQKRLCEAAERASCWLWNRRNLEWNKSRD

SEQ ID NO: 18335 - protein, 1076 aa, Cepaea nemoralis
MRIHNGKMKCERVLQEARQRSPERDDETLEDVRRVEPHSEEVQFSSADNTQAAVTCDTPEEPSETRLKIKFPSAIRREEWAMFDVTLSRALDAELKHKSLEEKLTQFGEIIYRHSLNKFGCISEGKVAALPQKTRRQRLMEAVRQEKNAARKRWKNAAEHQKEGLRQVWQHLKAKHNALSRAERFCRNRRKTRKERERFFREPYKFARDLFEQPRSGVLDVSREELENHLVATYSDAQRNVPLGEMEGLKSPAVPTVKFNAGPPMWYEVVAVVKKARCKSAPGPNGVPYTVYKRCPKVLSRLHWLLMSAWTKRCVSTEWKTANGIYIPKEQNSTGIGQFRPISLLNVEGKIFFSIMASRLTKYLMANKYIETAVQKGGLPGVPGCLEHSTMIWDAIQRAKTKKEELHVIWLDLANAYGSVPHQLLWHALKAYHVPENVKEMLVQYFSGFSLRFSTKTFTTRWIDLQVGIAMGCTISPILFVMAMQVILDAASGYAHGPRLSEDNINRSPPLKAFMDDTTILTPWESDACSILRRLDELVRWSRMSFKPKKSRSLSIVGGKVVERRFRVAGQVIPTVTEEPVKSLGRVYDSTLTDRNAVAEMHAMLTNGLATIDKTRLIGKFKIWCLHFVLIPKLLWPLLIYDIGVYAVSTMESKISRHIRMWLGAPACLTTVALYCKQSKLVLPFTSLMEEFKAGKTRLAMMMRESPDAMVRAAVPALRTGRKWHVVDEIEKAQASLQLKEVMGHTQHGRLGLGFLAKEPRWSKAEPKQRREMVVRQIREGEDDERVRKAAQQAQQAHWMSWDAVVQRSLTWNDIWHMAPLRLSFVVRSLYDVLPSAANLVKWDQTDDPLCPLCTKAPKVQTAEHVLSGCKTALTQGRFTWRHNKVLEELAAIVNGARTKANKEGNRPRPMEISFVREGRRRKTKADELPLATVFDGARDWELTVDLKGRGKYPEVICSFGLRPDIVLSSSAAKQLTLIELTVPYESNMEEQHTFKTAKYDGMVAGLRRLGYTVRFFAVEIGARGMVSHSVFDMLKRMGMKGQARNKAQKRLCEAAERASCWLWNRRNLEWNKSRD

SEQ ID NO: 18336 - protein, 1942 aa, Cepaea nemoralis
MKPGWGSVCLSVCLSVCRSVGRSVGRSVGRSVGRSVGRSVGRSVGRSVGRSVGRSVGRSVGRSVGRSVGRSVGRSVGRSVGRSVGRSVGRSVGRSVGRSVGRSVGRSVGRSVGRSVGRSVGRSVGRSVGRSVGRSVGRSVGRSVGRSVGRSVGRSVGRSVGRSVGRSVGRSVGRSVGRSVGRSVGRSVGRSVGRSVGRSVGRSVGRSVGRSVGRSVGRSVGRSVGRSVGRSVGRSVGRSVGRSVGRSVGRSVGRSVGRSVGRSVGRSVGRSVGRSVGRSVGRSVGRSVGRSVGRSVGRSVGRSVGRSVGRSVGRSVGRSVGRSVGRSVGRSVGRSVGRSVGRSVGRSVGRSVGRSVGRSVGRSVGRSVGRSVGRSVGRSVGRSVGRSVGRSVGRSVGRSVGRSVGRSVGRSVGRSVGRSVGRSVGRSVGRSVGRSVGRSVGRSVGRSVGRSVGRSVGRSVGRSVGRSVGRSVGRSVGRSVGRSVGRSVGRSVGRSVGRSVGRSVGRSVGRSVGRSVGRSVGRSVGRSVGRSVGRSVGRSVGRSVGRSVGRSVGRSVGRSVGRSVGRSVGRSVGRSVGRSVGRSVGRSVGRSVGRSVGRSVGRSVGRSVGRSVGRSVGRSVGRSVGRSVGRSVGRSVGRSVGRSVGRSVGRSVGRSVGRSVGRSVGRSVGRSVGRSVGRSVGRSVGRSVGRSVGRSVGRSVGRSVGRSVGRSVGRSVGRRSVGRSVGRSVGRSVGRSSVGRSVGRSVGRSVGRSVGRSVGRSVGRSVGRSVGRSVGRSVGRSVGRSVGRSVGRSVGRSVGRSVGRSVGRSVGRSVGRSVGRSVGRSVGRSVGRSVGRSVGRSVGRSVGRSVGRSVGRSVGRSVGRSVGRSVGRSVGRSVGRSVGRSVGRSVGRSVGRSVGRSVGRSVGRSVGRSVGRSVGRSVGRSVGRSVGRSVGRSVGRSVGRSVGRSVGRSVGRSVGRSVGRSVGRSVGRSVGRSVGRSVGRSVGRSVGRSVGRSVGRSVGRSVGRSVGRSVGRSVGRSVGRSVGRSVGRSVGRSVGRSVGRSVGRSVGRSVGRSVGRSVGRSVGRSVGRSVGRSVGRSVGRSVGRSVGRSVGRSVGRSVGRSVGRSVGRSVGRSVGRSVGRSVGRSVGRSVGRSVGRSVGRSVGRSVGRSVGRSVKRCPRVLSRLHLVLMSAWTQRHVSTEWKTANGIYIPKEQNSTGIGQFRPISLLNVEGKIFFSIMASRLTKYLMANKYIETAVQKGGLPGVPGCLEHSTMIWDAIQRAKTKKEELHVIWLDLANAYGSVPHQLLWHALKAYHVPENVKEMLVQYFSGFSLRFSTKTFTTRWIDLQVGIAMGCTISPILFVMAMQVILDAASGYAHGPRLSEDNINRSPPLKAFMDDTTILTPWESDACSILRRLDELVRWSRMSFKPKKSRSLSIVRGKVVERRFRVAGQVIPTVTEEPVKSLGRVYDSTLTDGNAVAEMHAMLTNGLATIDKTRLIGKFKIWCLHFVLIPKLLWPLLIYDIGVYAVSTMESKISRHIRMWLGAPACLTTVALYCKQSKLVLPFTSLMEEFKAGKTRLAMMMRESPDAMVRAAVPALRTGRKWHVVDEIEKAQASLQLKEVMGHTQHGRLGLGFLAKEPRWSKAEPKQRREMVVRQIREGEDDERVRKAAQQAQQGHWMSWDAVVQRSLTWNDIWHMAPLRLSFIVRSLYDVLPSAANLVKWDQTDDPLCPLCTKAPKVQTAEHVLSGCKTALTQGRFTWRHNKVLEELAAIVNGARTKANKEGNRPRPMEISFVREGRRRKTKADELPLATVFDGARDWELTVDLKGRGKYPEVICSFGLRPDIVLSSSAAKQLTLIELTVPYESNMEEQHAFKTAKYDGMVAGLRRLGYTVRFFAVEIGARGMVSHSVFDMLKRMGMKGQARNKAQKRLCEAAERASCWLWNRRNLEWNKSRD

SEQ ID NO: 18337 - protein, 1155 aa, Cepaea nemoralis
MMEKTNDNQSNGVNGCSIGAASPGRDSHVHQVTPDRQQATRCKRLLTVSDRTDPRTTSIAQRTLGHACVCGRSFPTFQGMRIHNGKMKCERVLQEARQRSPERDDETLEDVRRVEPHSEEVQFSSADNTQAAVTCDTPEEPSETRLKIKFPSAIRKEEWATFDVTLSRALDAELKHKSLEEKLTQFGEIIYRHSLNKFGCISEGKVAALPQKTRRQRLMEAVRQEKNAARKRWKNAAEHQKEGLRQVWQHLKAKHNALSRAERFCRNRRKTRKERERFFREPYKFARDLFEQPRSGVLDVSREELENHLVTTYSDAQRNVPLGEMEGLKSPAVPTVKFNAGPPMWYEVVAVVKKARCKSAPGPNGVPYTVYKRCPKVLSRLHWLLMSAWTKRCVSTEWKTANGIYIPKEQNSTGIGQFRPISLLNVEGKIFFSIMASRLTKYLMANKYIETAVQKGGLPGVPGCLEHSTMIWDAIQRAKTKKEELHVIWLDLANAYGSVPHQLLWHALKAYHVPENVKEMLVQYFSGFSLRFSTKTFTTRWIDLQVGIAMGCTISPILFVMAMQVILDAASGYAHGPRLSEDNINRSPPLKAFMDDTTILTPWESDACSILRRLDELVRWSRMSFKPKKSRSLSIVRGKVVERRFRVAGQVIPTVTEEPVKSLGRVYDSTLTDGNAVAEMHAMLTNGLATIDKTRLIGKFKIWCLHFVLIPKLLWPLLIYDIGVYAVSTMESKISRHIRMWLGAPACLTTVALYCKQSKLVLPFTSLMEEFKAGKTRLAMMMRESPDAMVRAAVPALRTGRKWHVVDEIEKAQASLQLKEVMGHTQHGRLGLGFLAKEPRWSKAEPKQRREMVVRQIREGEDDERVRKAAQQAQQAHWMSWDAVVQRSLTWNDIWHMAPLRLSFIVRSLYDVLPSAANLVKWDQTDDPLCPLCTKAPKVQTAEHVLSGCKTALTQGRFTWRHNKVLEELAAIVNGARTKANKEGNRPRPMEISFVREGRRRKTKADELPLATVFDGARDWELTVDLKGRGKYPEVICSFGLRPDIVLSSSAAKQLTLIELTVPYESNMEEQHAFKTAKYDGMVAGLRRLGYTVRFFAVEIGARGMVSHSVFDMLKRMGMKGQARNKAQKRLCEAAERASCWLWNRRNLEWNKSRD

SEQ ID NO: 18338 - protein, 1155 aa, Cepaea nemoralis
MMEKTNDNQRNGVNGCSIGAASPGRDSHVHQVTPDRQQATRCKRLLTVSDRTDPRTTSIAQRTLGHACVCGRSFPTFQGMRIHNGKMKCERVLQEARQRSPERDDETLEDVRRVEPHSEEVQFSSADNTQAVANCGTPEEPSETRMKIKFPSAIRKEEWATFDVTLSRALDAELKHKSLEEKLTQFGEIIYRHSLNKFGCISEGKVAALPQKTRRQRLMEAVRQEKNAARKRWKNAAEHQKEGLRQVWQHLKAKHNALSRAERFCRNRRKTRKERERFFREPYKFARDLFEQPRSGVLDVSREELENHLVTTYSDAQRNVPLGEMEGLKSPAVPTVKFNAGPPMWYEVVAVVKKARCKSAPGPNGVPYTVYKRCPKVLSRLHWLLMSAWTKRCVSTEWKTANGIYIPKEQNSTGIGQFRPISLLNVEGKIFFSIMASRLTKYLMANKYIETAVQKGGLPGVPGCLEHSTMIWDAIQRAKTKKEELHVIWLDLANAYGSVPHQLLWHALKAYHVPENVKEMLVQYFSGFSLRFSTKAFTTRWIDLQVGIAMGCTISPILFVMAMQVILDAASGYAHGPRLSEDNINRSPPLKAFMDDTTILTPWESDACSILRRLDELVRWSRMSFKPKKSRSLSIVRGKVVERRFRVAGQVIPTVTEEPVKSLGRVYDSTLTDGNAVAEMHAMLTNGLATIDKTRLIGKFKIWCLHFVLIPKLLWPLLIYDIGVYAVSTMESKISRHIRMWLGAPACLTTVALYCKQSKLVLPFTSLMEEFKAGKTRLAMMMRESPDAMVRAAVPALRTGRKWHVVDEIEKAQASLQLKEVMGHTQHGRLGLGFLAKEPRWSKAEPKQRREMVVRQIREGEDDERVRKAAQQAQQAHWMSWDAVVQRSLTWNDIWHMAPLRLSFIVRSLYDVLPSAANLVKWDQTDDPLCPLCTKAPKVQTAEHVLSGCKTALTQGRFTWRHNKVLEELAAIVNGARTKANKEGNRPRPMEISFVREGRRRKTKADELPLATVFDGARDWELTVDLKGRGKYPEVICSFGLRPDIVLSSSAAKQLTLIELTVPYESNMEEQHAFKTAKYDGMVAGLRRLGYTVRFFAVEIGARGMVSHSVFDMLKRMGMKGQARNKAQKRLCEAAERASCWLWNRRNLEWNKSRD

SEQ ID NO: 18339 - protein, 937 aa, Cepaea nemoralis
MEAVRQEKNAARKRWKNAAEHQKEGLRQVWQHLKAKHNALSRAERFCRNRRKTRKERERFFREPYKFARDLFEQPRSGVLDVSREELENHLVTTYSDAQRNVPLGEMEGLKSPAVPTVKFNAGPPMWYEVVAVVKKARCKSAPGPNGVPYTVYKRCPKVLSRLHWLLMSAWTKRCVSTEWKTANGIYIPKEQNSTGIGQFRPISLLNVERKIFFSIMASRLTKYLMANKYIETAVQKGGLPGVPGCLEHSTMIWDAIQRAKTKKEELHVIWLDLANAYGSVPHQLLWHALKAYHVPENVKEMLVQYFSGFSLRFSTKTFTTRWIDLQVGIAMGCTISPILFVMAMQVILDAASGYAHGPRLSEDNINRSPPLKAFMDDTTILTPWESDACSILRRLDELVRWSRMSFKPKKSRSLSIVRGKVVERRFRVAGQVIPTVTEEPVKSLGRVYDSTLTDGNAVAEMHAMLTNGLATIDKTRLIGKFKIWCLHFVLIPKLLWPLLIYDIGVYAVSTMESKISRHIRMWLGAPACLTTVALYCKQSKLVLPFTSLMEEFKAGKTRLAMMMRESPDAMVRAAVPALRTGRKWHVVDEIEKAQASLQLKEVMGHTQHGRLGLGFLAKEPRWSKAEPKQRREMVVRQIREGEDDERVRKAAQQAQQAHWMSWDAVVQRSLTWNDIWHMAPLRLSFIVRSLYDVLPSAANLVKWDQTDDPLCPLCTKAPKVQTAEHVLSGCKTALTQGRFTWRHNKVLEELAAIVNGARTKANKEGNRPRPMEISFVREGRRRKTKADELPLATVFDGARDWELTVDLKGRGKYPEVICSFGLRPDIVLSSSAAKQLTLIELTVPYESNMEEQHAFKTAKYDGMVAGLRRLGYTVRFFAVEIGARGMVSHSVFDMLKRMGMKGQARNKAQKRLCEAAERASCWLWNRRNLEWNKSRD

SEQ ID NO: 18340 - protein, 1136 aa, Bactrocera oleae
MAHVELESAMADVGSTVTGEPVSKVECRDGNFVVLLPIREEEDVNCPICVTGRYKGRTKVENFVRHCKQHHAEATITYKCWKCGFTAPPEKRYPRKVVLQHCGDCNPDVPAVRTGAIDIARRRNIRRQLLEPQTPAVAALPEVLVPDNDPPLEPDHLGPSPAPENPIPDNVDDIQPGQAPSEPPLVAEPSVQHLRPPALRAPSARERQRQLSAALSLVDSKEQLEQMSVQITSFFGAVTTARRNRGREQQTRNPPQPIRPNSESQDQVDRTQRAKKLQGLYRRNRKRAVQQILEGPGRPCQLNLATVAAHFGNLAAERVGGANWPDVFSQEDPTPASTEQLSRPFEVGEVLQRLKRQANTSPGPDGITYADLRKADQGAVVLTALLNTIWRLEAVPSWWGESNTILLHKKGDEADIGNWRPISLGDTVPKLFAALLSDRIKAWATTNHRFSPQQKGFLQFEGCFEHNFVLQEIIRHARHKNKELVVVWLDLANAFNSVPHSSITRALEGHGFPPKIINIIRSMYAKVTTRVQVSQGRTGPIRIRAGVRQGCPLSPDVFNLTLEVLIRCLTAMDTGYTIKGRRHNCLFYADDGVLISDSVEGMTSLIQAAEEGAAAVGLTFKPAKCASLHFVGENGALPTQFTIQGNLMPALRNEEAYEHLGIPTGYQVRQVPVNTLRGLIADANAIDGSLLAPWQKLDAVGTFLLPRLDFIMQGGTFEKEYLRVADVRIKQLSKKWLFLPKRSSPELVYLPPSQGGGGLIPLSDAYDIYTITHAYRLLHCCDPAVSNLAKSLLHEAVSSRMKRREVSPEDMARYLSGDQEIPRSAGRTSFWAKVRSATYRLNRRIGVEWCWLPGEEALGIKFMGEEDVASPARRHKIANMLRSKVVATYVRGLLEKRDQGKVLEVTKKHPVSNHFLRSGRNIRFFDWRFIHRARLNVLPLNSTLRWLPEADKRCRRCGYEAETLPHVVNHCHAHSIAIRRRHDAIQNKLVKAAARNPGTISVNQVIPEAEGAAAALRPDIVIRDEDSRQVTIIDVCIPFENRSRALETARREKITKYQPLVDALTGKGYNVRLGAFVVGSLGGWDGQNEAVLNHLRIRPWYSGMMRRFMISDAIRWSRDIYAEHMSGIRMYPAEGE

SEQ ID NO: 18341 - protein, 972 aa, Pieris rapae
MARSEARLTRELGRCGNVELLNALPELGRTLEAIKGQRRKNEYKDMVQAYLQSAQLNDIRYPSPVSTDQILNNTEQQPQSVEPESPSVERSSTPPSCVNPLELTENPDDEACATNALDDLLERVRKREAYRGRCRRGEYVERQYTDHPNGSRPPNRRKRRRMEYARIQELWKKNPSRVAEEVIDGACRDVKHQLGEMEAYWRPLLERVSNASGPTPEALDRLRSSGQYGGNVPDFSTLWRPFTASEVKQAKVDLKSAPGPEGVKPEDWRKVPDKMKAALFNVWMRQGEVPEILRQCRTIFVPKKEVPVGPSDYRPISIASIPLRHLHSLLAQRLLACCPPDVRQRGFICADGTLENAAVLDAVLGDCRKKLRECHVAVLDFSKAFDTVSHVALVDLLRQRGLPGPFCDYLARLYQSATTHLAVNGQTSSPVKVGRGVRQGDPLSPILFNMVMDLVLAALPKEIGYRLEGERVSALAFADDLVLVAGSKMGMQEAIGCVEKSSGLMGLRLNHSKSSVLSMVPDGHRKKHHYLSERTFRVGGRLIRQVTCVERWRYLGVEFEATGSTTLEGGINEALRNISKAPLKPQQRLQILRAHLIPKFLHGLVLGNVRDNRLRMLDVQIRGAVRDWLRLPGDVPNAYFHAAVRDGGLAIPSLRTGIPDLISRRFGRLSSSSWPVAVAASKSERILNKLRWSKRQLLKYSRDDPFGPSPSVRAYWRQSLHASVDGFELREAGRTPASTKWIRERCHGISGRDFVQFVHTHINALPSRVRNSRGRRVGRESELNCRALCMVRETTAHVIQQCHRTHGGRIERHNAIARLVANAMREKGWSVIEEPKIHTSRGLRKPDLIASKDGTGVIVDAQVVSGRRSLDDSHREKCAKYGSHEEVVSRVAGLLGLPNANAVTATSCTVSWRGVWSPRSHDELCSLLGLDTRSMAVIPMIALRGSHMNWGRFNRMTTVSAVGSADRAFSDQ

SEQ ID NO: 18342 - protein, 813 aa, Butleria flavomaculatus
MVKTLLQGSTPTPNEQQKEASERADEESPVDAVASVGPVSDSEDSPLVADLRQAETGDVPECMSIVAELLERAAARRLQGDRRSMKARRKGKTLHYTCTEVKLTSRKRRRMEYARVQELFRKCPSRAAAEVLDGQCRGVRHGLGELEAYWRPVLETVSDAPGPTPEALRALRRNGQYGGTLDAQRLWSPFTPDEVKEASIDLRSAPGPDGIRPEEWRAVPAATKAEIFNYWMSLGEIPDPLRQCRTVFVPKKDEPAGPGDYRPISIASVPLRHMHALLAKRLEACCPPDIRQRGFIRADGTLENSAVLDAVLGDCRKKLRECHIAVLDFSKAFDTVSHAALVGVLREKGLPVGFCDYIARLYKSANTTLAVQNQRSDPVVVGRGVRQGDPLSPLLFNMAMDVVLASLPKEVGYRLEGEKISALAYADDLVLLAGSTVGMREALGAVERTGVMMGLQLNREKSSVLSMVPDGKRKKPHYVTTRTFTIGRRWLRQVDSVEHWRYLGVEMSASGAVTLEQDVKQALRNITKAPLKPQQRLEVVRTYLIPRFLHGLVLGNITDDRLRMLDVQIRHSVRQWLRLPSDVPMAYFHASVQDGGLAIPSLRTCVPDLVVRRFGKLDSSRWPVAVAASKSERIRRKVKWARKQLQRFSVENPSTGERSVAKYWREGLHASVDGVELRESTKTPASTKWIRDKCSQYSGRDYVQFVHTHINALPSRVRNTRGRREGRESELNCRAGCMVRETTAHTIQQCHRTHGGRIERHNCVAKYLAKEMGDREWTVELEPRIKTADGLRKPDIIASRGDGVGVIVDVQVV

SEQ ID NO: 18343 - protein, 1089 aa, Euschemon rafflesia
MGCRFIGTKSSRFLRLGHYESGGRTSVVGLHPATKRNYNAKDKVKDNIEKRRSGLPQEPETALNPRSGARAGTSSGSGAASDWICDQCARAFSTKTGLGVHRRRTHPVAANALSAPPQVKRRWRDEEFALLASTEARLLKEKGKCGNVDLLKALPNLGRTIESIKGVRRKVSHKIKVQEILQSSTPTPNQNKAPKSTPTRKRKGAIKQAVSEVRPMSALEDAPLVADRRQAETDGMPGCDPIVAELLARAAARGTRGFRKSMKARGGNNSIGHTEMKLTSKKRRRMEYVRVQELYRKFPSRAAAEVIEGQCRGVRHGLEALEAYWRPVLEAVSDASGPTPEALRAMRRNEQYGGTRDYSRLWAPFTVEEVKGSSFDLRSAPGPDGIRPEEWRSVPAKIQTEIFNSWLMKGEIPEALRQCRTVFVPKKDVPAGPGDYRPISIASIPLRHMHALLARRLEACCPPDIRQRGFICADGTLENSAVLDAVLGDCRKKLRECHVAVLDFSKAFDSVSHAALVAVLREKGLPVGFCDYIAHLYETAHTTLAVYDKKSEPVAVCRGVRQGDPLSPLLFNLAMDVVLASLPKEVGYGLEGEKISALAYADDLVLLAGSKAGMQEAIGAVERTGAMMGLQINRDKSSVLSMVPDGKRKKPHYVTTRSFKLGRRWLRQVDCVEHWRYLGVEMCASGAVTIEHDIKQALHNISRAPLKPQQRLEIIRTYLIPRYLHGLVLGNITDDRLRMLDMQIRHSVRRWLRLPSDVPTAYFHASIKDGGLGIPSLRTCVPDLVVHRFGKLDSSRWPVAVAASKSERIRRKVKWARKQMLRLASEDPGTGEKSVAQFWREGLHASVDGYELRDSSKISSSTKWIRSRSSLYTGRDYVQFVHTHINALPSRVRNSRGRRLGRETELNCRAGCMVRETTAHTIQQCHRTHGGRIKRHNCVARYLAEEMGKKGWSVEQEPRFLTADGLRKPDIIASRGDGVGVILDVQVVSGQRPLDDAHRDKRRKYGGHKELVEKVADKLGLPEEHVRVTSCTVSWRGVWSPRSYKEMKGLLGLKEYVYEVVPTLALRGSHMNWSRFNRMTTMSFGGCSE

SEQ ID NO: 18344 - protein, 824 aa, Spialia spio
MTARSKTHTEVKMTSRKRRRMEYARVQELFRKFPGRAAAEILDGQCRGVRHELEALEAYWRPVLEKVSGAPGPTPDALRAMRRNGQNGGELEVQALWAPFTSEEVKDAGIDVRSAPGPDGIRPDDWRAVPAETQAETFNEWMSRGEIPEPLRRCRTVFVPKKEVPAGPGDYRPISIASVPLRHMHALLARRLEACRPPDVRQRGFIRADGTLENSAVLDAVLGDCRKKLRECHIAVLDFSKAFDTVSHAALISVLRGKGLPVGFCDYIARLYESATTTLAVKEKQSEPVVVGRGVRQGDPLSPLLFNMVMDVVLASLPQGVGYRLDGELVSALAYADDLVLLAGSVAGMREALGAVERVGEMMGLQLNQEKSSVLSMVPDGKRKKPHYVTSRTFKVRGRWLRQVESVEHWRYLGVEMSSSGVCTVEHDIKEALNNIQKAPLKPQQRLEIVRTHLIPRFLHSLVLGNITDDRLRMLDVQIRHSVRRWLRLPADVPVAYFHASVQDGGLAIPSLRTCVPDLVVRRFGKLDSSRWSVARAAANSERIRRKVKWANKQLSKFSIENPRTGERSVKQFWRKSLHDSVDGAELQESTKTPASTKWIREKSALLTGRDFVQFVHTHINAIPSRIRNSRGRREGRESELNCRAGCMVRETTAHVIQQCFRTHGGRILRHNCVADYLAKEMGDRGWRVEKEPRIKTTVGLRKPDIIASRGDGVGVIVDVQVVSGRRPLDEWHRGKRSKYGSHDELVEKVADRLGLAKDHVKVTSCTVSWRGVWSSGSYKEMKELLGLKEYVYETIVTLVLRGSHTNWSRFNQMTTMRHGRPSE

SEQ ID NO: 18345 - protein, 1100 aa, Caltoris sirius
MLVIKSSRFLRLGHNKNGGRTSVRGLQPLTRRIKVAKKSNTNESKVQPDLPQESGPAHNPHSGDRPGASSGSGGSSGVSCATCGRSFNTRTGLGVHVRRAHPTIANEQSAPPQVKRRWRDEELELLACTEARLTVEGSVNVNLDLLKALPSLGRTLEAIKGVRRKDAYKVRVLELRAEMILKTTSAPTAQDAVSITKEKQVRGDGDERPTGAKVSDVWPATEPEDAPLVAGLLAQQATEGERCDSVVAELLERAAARMSRGTQRPMTRRGKTKNGSVLQSHSAKPPNAKQRRRAEYARVQGLFKKCPSRAAAEVLDGKCRSVQHRLEDLEAYWRPVLEKVSDAPGPTPEALKALGSDGRHGGALDHDQLSRLWSPISVEEVRETKVDVRSAPGPDGIRPGDWRTVPAEIQAEMFTLWMSRGAIPERLRQCRTVFVPKKETPAGPGDYRPISIASVPLRHMHAILARRLEACCPPDVRQRGFVRADGTMENSAVLDAVLGDCRKKLRECHIAVLDFSKAFDTVSHAALVSVLREKGLPAGFCDYIARLYDTAKTTLAVGTDRSDPVGVGRGVRQGDPLSPLLFNAAMDVILASLPKGVGYRLDGELVSALAYADDLILLAGSKAGMQEALVKVEETGGMMGLSLNREKSSVLSMVPDGKRKKPHYVTARSFKLGRRWLRQVDSVEHWRYLGVDMAVSGAELIELDIKEALNNISRAPLKPQQRLEVVRTYLVPRFLHGLVLGRITDDRLRMLDVQLRQAVRGWLRLPKDVPTAYFHAAIKDGGLAIPSLRTCVPDLVVRRFGKLDSSSWSVARVASNSERIRRKVKWARKQLQRFSAETPKTGARTVAQYWRIKLHSSVDGAELVETPKVAASSKWIGKHHGELGGRDYIQCVHTHINALPSRVRNSRGRRTGRESELNCRAGCMVRETTAHTIQQCHRTHGGRIMRHNCVADHLVREMMSRGWTVEQEPRIETALGLRKPDIIASHPDGSGVIVDAQVVSGRRSLDESHRDKTRKYGCHGELVEKVAGRLGVATERVLVTSCTLSWRGVWSLGSYKDLKRTLKLKEADFERIAVSVLKGSHMNWTRFNQMTSVVSGGTPG

SEQ ID NO: 18346 - protein, 1188 aa, Cristatella mucedo
MQHNNTIYASGRLDPGGCSETAPASMDVQHRSGTMLLAGPTPPNFEGLISGADLERETPNSNGIAEVTGDQVTLTIAKGATWNCIHCKLTLVSVREYSTHLQDHHKCEVKYRCPTCGNCRDLLHGAQIHASKCRNAAMKANCPQEIRPGPSLACKYCGRQYLSRSGLSTHVRSQHGGEVDECRCECTICGLKFATSRGLSQHENSRHPVAANERRRKCTERPETEGTGASGRCPTIWTPQKSERLVDLEGTFATEGNINKLIADAIGQGVTRHQVNDKRRSLKRRAERQLTFSRSRQPEDEQGPVPRENPITVRPQSSATVSRAAFRRSRCTEGPESIIDLSLRCLDAAINGQTVDHADLYGEIVTLCSDPCSPAQRRVDRRQDLSNKAKNYRRLQTLWTTRKRDLIREVLDDAKPHDKCKLSQAAVTATYRERFSRGLSEVDLREYPYNGRCDTKDLMKPIDPEEVRDTIREANVHAAPGPDRVSLRKLKAVDKIDAVLSNWFNSWLYSGEMPKEVKECRSILLPKTTSNLGDINNWRPLTIASTISRLYTALLARRLSGAVDLDHRQRGFVCQGSCSENVFLLRKVEEWAKLQQRSYGVVLLDLAKAFDTVSHVHLLSALRRMRIPEHFVRVVADMYTNATTSFQLATGNTAQIPIERGVKQGDPLSPLLFNIAMDPLMCRLATREGICSPAGNFSALAYADDIALVSESKSGMQTLLDEVTSFVEKVGMRLNVNKSDGFWREFTRKTVVLNRDVTWTVGDTRLPLVNPGTTTRYLGVNIDPSYRLPKNNLAQRLKLWCNRIGQAPLKPRQRLDLLRTVAIPRLLYQLVYARDPTYRQLEELDRVSRAAARKWFHLPAHASTAMLHSKSKEGGLGVHRLTTMIPRLKGRLFERLKNSNDPLTAEWARKSETINARETTDAEADSAEWARQPWQGKGVSYFRNTAASGWMLGDRIRDGDVVKAAKLRCNLWPMKACLAQARPMDDVRCRLCKQTTETVGHVSGHCGPMKPARIKRHNFVVDSLERSLVRNGIAYSREAKLRVSTSTHTEVLKPDLIALPTPTKDAPIRTAYVLDPTVVFEDEDSLHRAWDTKVAKYRPLKALIRKQFKVSRVVLGGIVIGARGGWLDKNDTILEKVGIASKWLNQSLCRGVLLKTLAMLRGFADEAKTPNTTHGRRSRVSHIDSLVP

SEQ ID NO: 18347 - protein, 994 aa, Ctenocephalides felis
MTNSNSGGPAGPSILTDTGNHSCRYPECNKVFNTVVGRGVHEQRQHKEWYDSRMATIEPKKARWTEEEQALMAKEEAALVIKGASHINKALLSVTPGRSLEAIKGQRKSPKYKSQVADFVNMMSNQNNTEPCSPVTTDTTGNALLEALSQAASSTVEKFNDKTLTNICHSVSAITLSDLKVRVADYLKSIFPQKNKSPPNHIRSTKRGKHPKRQNKRQLRRHQYKITQLHWARNPTKCVQFILDNKVVSNKPSADTMTQFWTNVMTGDSTISPGSEKARTQDLSHIWKPIIPNEITKSYPAKNSAPGPDGISASLLRSIPTNTLVNLYNIFLFMGNVPEQLMESYTTLIPKKDNAENPGDFRPITVSSVITRHFHKILAKRMTESIKIDNRQTAFQPIDGCAHNIFALDYLLKYHRQKFKPVFIASIDVAKAFDSVSHKALIDTLKFYNLPDRCVDYINNIYTNSWTRLRYENWYSDPISPRSGVKQGDPLSPVLFNLIINRLIESAPPEIGVMMEGMTLNILAFADDIVLVASSQKGLQVLLDHADDFLSKCGLIVNNAKSFSITIRNVPHAKKSIIDKSIKFRCGGRDLPALSRVEIWTYLGVSFTPEGAVLCDLKEKLQSIIEKLSKAPIKPQQRLFALRTVGIPRLLHQLTLGNTTLGLLKGLDTTIRKAVRSWLRLPADTTNAYFYARDRDGGLSLPSLRWLVPLRRRGRLLNLGRTESSYHQLELEKCVKRLTDNGDIITSVKLLDNRWAKLLHNSVDGRALAKSSKVPQQHRWITDGTKILSGRDFINCTRLRINTMPCRSRTTRGRHEDRFCRAGCNALETLDHILQTCHRSHRQRIDRHNAVTKYLKRALEKSHSRVDWEPVFHTPDGTRKPDLIASQGQFSMLLDTKIVGSNVDMESAHRRKINYYKDLDALIKERYNTSEVVYGTVTLNNRGVWHYESANFLLSGKVIKKEELKIISTRVLIGGLNGFGAWTKATSIKRQGIG

SEQ ID NO: 18348 - protein, 869 aa, Ctenocephalides felis
MSNQDNIEHCSPATTDTSGEALLLALGQAAADTDERFNGRMLANTCQLVSKISLNDLKEKIADYLKSTFPPKNRPMNARTRREGYKPKLNKRQTRRLQFKTIQQHWAKHPTKCVQFILDNKDVLHKPPPDIMSQFWTNVMTGLSTLSPGSDGARNIDLSLVWSPIQPDEIKNCYPASNSAPGPNGVSANLLRSVPTNTLVNLYNLFLFTGSIPEQLLKSYTTLIPKKQNAENPGDFRPITVSSVITRHFNKILAKRMTTHIKIDDRQTAFQPVDGCANNIFALDYLLKYHRQKHKPVFIASIDMAKAFDSISHKALIDTLKYYNLPSRCTQYIEYTYENSWTRLRWDNWHSDPISPRSGVKQGDPLSPVLFNLIINRLIESSPPEIGVVIEGKILNIMAFADDLVFAASSQKGLQAMLDHANDFLSKCGLIINTAKSFTITIKNVPHVKKSYVDNNIKFSCGGRDLPALSRVEVWSYLGVSFTPVGAKMCDLRQKLQDIIEKLSKAPLKPQQRLFALRTVGIPKLLHQLTLGNTTLGLLKSLDSIVRKAVRSWLRLPTDTTNAYFYAKDRDGGLSLPSLRWLVPLRRKGRLMNLGWPDSSFHQLEVENCEKRLTDNGNIIGSAKQLDDRWAKLLHNSVDGRALTKSSKVPQQHRWVTDGTKILSGRDFINCARLRINSMPCRSRTTRGRREDRFCRAGCNALETLDHILQTCHRSHRQRIERHNAVTKYVKRALEKRHSRVEWEPLFQTPEGTRKPDLIATQGDSAIVIDTQIVGSNVDMNLAHKRKIEHYKSLDAQIKERYNVSDVIFSTVTLNNRGVWHMDSANFLLSGKVIKKDELKIISTRVLIGGLNGFSAWTKTTSMRRQGIG

SEQ ID NO: 18349 - protein, 1014 aa, Ctenocephalides felis
MDLVGCQLPRSYKTVGSMYNTKPRMTNLNSGGPAGPSQPTDTGNHLCRYPQCNKAFKTSVGRGVHEQKQHKEWYDSRMALIEPKKARWSEEKQALMAKEEAALVIKETPHINKALLAVTPGRSLEAIKGQRRSPKYKSQVADFVSLMSNQDNIEHCSPATADTSGEALLLALGQAAADTDERFNGRMLANDLKKKIADYLKSTFPPKNRPLNERTRREGYKPKLNKRRTRRLQFKTTQQHWAKHPTKCVQFILDNKDVLHKPPPDIMAQFWTNVMTGLSTLSPGSDGARNIDLSLVWSSIQPDKIKNCYPASNSAPEPDGVSANLLRSVPTNTLVNLYNLFLFTRSIPGQLLESYTTLIPKKQNAKKPGDFRPITVSSVITRHFNKILAKRMTTHIKIYDRQTAFQPVDGCANNIFALDYLLKYHRQKHKPVFIASIDMAKAFDSISHKALIDTLKYYNLPSRCTQYIEYTYENSWTRLRWDNWHSDPISPRSGVKQGDPLSPVLFNLIINRLIESSPPEIGVVIEGKILNIMAFADNLVFAASSQEGLQAMLDHANDFLSKCGLIINTAKSFTIAIRNVPHAKKSYVDNNIKFSCGGRDLPALSRVEVWSYLGVSFTPVGAKICDLRQKLQDIIETLSKAPLKPQQRLFALRTVGIPKLLHQLTLGNTTLGLLKSLDSIIRKAVRSWLKLPTDTTNAYFYAKDRDGGLSLPSLRWFVPLRRKGRLMNLGWPDSSFHQLEVENCEKRLTDNGNIIGSAKQLDDRWAKLLHNSVDGRALTKSSKVPQQHRWVNDGTKILSGRDFINCARLRFNSMPCRSRTTRGRREDRFCRAGCNALETLDHILQTCHRSHRQRIERHNAVTKYVKRALEKRHSRVEWEPLFQTPEGTRKPDLIATQGDSATVIDTQIVGSNVDMNLAHKRKIEHYKSLDAQIKERYNVSDVIFSTVTLNNRGVWHMDSANFLLSGKVIKKDELKIISTRVLIGGLNGFSAWTKTTSMRIWNTACCLRITSRQT

SEQ ID NO: 18350 - protein, 996 aa, Blattella germanica
MDSTIRCNLSHNDKDSQSVKSPCPHCGKLFKSINIHISKAHPQEYRKTIVSTYDTSKEKLKQSEYLGNANSSNNDYAGCSFVNNADIHENNHPCIKDSNNENIRKHSDNTDSLLQFNKNAILEFEKAVQDLIITPNIESLNTVCVDICEFLSNAVHSLPGPKHPAIRYYNARKNKINGKSASYGNSNNPARLSKRRREDNRKKYQYEVAQYLYYNQRRKIARNIMQKQNYTACKIPIQSVKTHFQNIFENTNDMTSLHDIEPVSEEEDIEIKIDEINSAIATLKVDTSPGPDRVIVRAIKELGTSKLLCLLVNAMLKLKQCPQIFKKARTILLFKSGNVDEVSNWRPISIFSVIRRIIEKVIDKRLRSYLEFSTHQRGFVTLPGTHINTSIINGCLQNAKINKKDCCIIFLDVTKAYDNVGHDHIKRSLMRVNMPNNLRDLVIDLLQGNHIQVECGKNKTPNIELKRGVAQGSPISPVLFNLAIDDIIKNLTEHEIAQYYGFSINPDVANISALAFADDIALIAKNDVAACKLLNLALDNLTEIGLHVNPSKCKIINIKNGHINDELNIQMGEDYLECINSDETIKYLGVTFRDEIIFDQRKIIKNLEDNLSYLSLSLLLKPDQKLNIINQYIWPSIIYPIQSTPLNKIPEKFLQDVDKLLRSTIKEIIGLPNDCPNGMLYTSKKLRGLGLIKAEWEAHIQHYNIAKRLEKCNDEHLSLCRNLEEEKEQVLSQLKIPVNEETLGRSGRWLRNMMRQRSFEEWCNLPHKGKGVSVYADNLNTNAWMNNRNGLSCSQWTNAIMMSCNTSAVRAVPGRSQHTTLCRHPGCEEPETLGHVLGKCKKGELLRNSRHHTVRSAIATVLRRQSWEVHEEVHCIAENGSHRRADIVAINRKEHRGLILDPTVRMEESSEQALRVSEEKEAIYRPCIPHFSESYNLPLDAWEVKGLLFGARGVGYKSTTLLLQSLGFTQENIVNICNNILRDSLHILHSHLYSNY

SEQ ID NO: 18351 - protein, 1354 aa, Sardina pilchardus
MVQELEACEAGNRSNLMALLRERHSAAKKKRGRIPALLKAAHDYDKVVARLSELKNSDERLDKNRKAQVRRAENSQEKNLLMLMECMQKEYHDGTMDAELLSLITPEGRVYLSAEFSFLLNGFVSSNNPATTQISDDALFSVTNEAVDASNGVQQCEESENGQVNNGAAIDEPRANPPSTTENPNSDIQTPQITQNTQNILSICPSRTSLLADDCDDNNSTESVDIIEVSFRPQKRIRSAELYEDLGEFSSKRSKHTDEIQIPDTNSVFNPNPNFLDLIPSNTQEINDYLKNAREQLENVGSQTDIFVFDSSQLPETSNVDNVDVNPLNKSTISFTHPDEELNLNFSLNQAPPTEDAIEDSPPVIPPSNDHPDSPPVISPSNDRPSNEPRDYRKEKEERAARIQLLSQEIKDVMAHNNADDTVNIYGKFIEVAIKGAQDIELFQAPFKKRSPPADPTIRRPPQQPTERQRAKRLRGMFRYNRKRCLREITEPPAKWCQLSADSIASELSNQFPPLPTPRYPTFPDIPPNRSPSLNQRRPTQSQQQRQQQEAYYNPQLYDNFYFEPEDVRVAIERAKRDSSAGTDGIKMAFWKKIPQIEFQLAPLFNKILKSSIIPPSWHESRLILLPKTANPNQHSTSDYRPISITQTIYRLFMSVLNRKLRNGYVSFSKSQKGFEQCDGCGEHSFTVQEILNSVRRSSKKLTAIWIDLKKAFDSVPHYLILELLRELDDIPGYVTQLIANLYENCYNSVTDGEGENAKVKSEGRGVRQGCPLSPLLFNLIIDKFLLAVERSNIGFELEGQKFGALAFADDVILLSQTEEGAAELIKMFELFLERSNLAVNVKKCALLSVKYRLGRREVNSVANQNAFLLSGQPIPYMEDFYKYLGTHTNLTTFKGKLPPIQEFEETFMKISNSPLFPFMKLDLIRTYLFPTLDHTLKSHCIQVEELRKTDALIKREVRKWLDLPQSSTSNLFYVPIPLGGLGLRSLVHEFWALRLSTGLNILHSKDPRVMSVARNSLATITQKRSKGTLSPLEYLQLDQEIGKVHDVRSLLSSLRTNRKALKVGFRLAEEDSPASIDLDLDSVSPPYTSNDLFSRIRSTEFVTRVRRLRWHTQSTFVEQWMAQPDQGRSLTCFASNPQSNTWIRNCPIKISTYRFAVRARINVCPTKAVLKKAKSVPDARCRRCNCEVETLGHVLNGCRFNSRLIQHRHNQILDVIKANIKSKTNITVKIDNQITNIDSARRPDIQLIDEANKKISLIDLAICYESSAQRMTDVLEAKISKYEPEAAELTNLGYYVTRDAIVLGTLGSHHPANEETFNKMNVKQAHRKKFLRQLTETLLECSRGIWANHVQRR

SEQ ID NO: 18352 - protein, 1009 aa, Goniozus legneri
MLESGPESATAARGVIGFHCEYPGCARSFGSAIGRGVHHRAAHKNWNDERQRVEQVKTRWSEEERRMLARKEAELTVRDPPVRFINQELRRFFGGRSIEMIKGQRRTQGYKDMVSEYIAGMSVDVQETRGDVRCGEVGPEGPGEPDVSYRSAIMKFLDEMPAPASGLNSQKLVDICSNLERRSVDEITELIDQYLLEIFPVRESPMRKRGGSVKRPLMNKRALRRHEYKRVQTQWRYSRSRAVKEILSGSSDTECLPAHVMIPYWENLMTQRSDARPTPVTAEETLWGLLGPITPKEVWNARLENGTAPGPDGIKSRTLKGIPLGILTRIFNVFLFCGRIPRRLLEARTVFIPKVDRPVDPSQYRPITVSSVLLKTYHKILALRLAASVALDDRQRAFRPVDGCADNTFVLDLLLKYHHQECKQLYVAAIDVAKAFDSVSHGAIRAALLAKGVPPMMTDYIMFVYSNSSTILRTREWASQPIFPTIGVRQGDPLSPTIFNIIMDLVLKSLPDEVGARLDSWHINSLAFADDLFLVAQTRRGLQALLDTAADTLSTCGLRVNPGKCYTVAIRPVPSAKKTVVDPRSVFNICGASIPPMTRTDEWKYLGVPFNSEGRLHVNPVQTVTALLEKVTRAPLKPQQRLWALRTHVLPQFFHLLALGNVHVGILNKFDKVVRRFVRRWLSLPHDCPSAFVHASVKDGGLGVCAVRYVAPCHRVSRLRALRVVPVGADSANDFLAQEIARAERRLACGGGALNSRDEINGYWAAALYARVDGEALKESNKVASQNNWVQDGTSFLTGRDFVNSCKVRINALPTRSRMARGQRRERACRAGCRFTETMNHVLQACFRTHEWRIRRHNALLKYVLRNMRSYVVTQEPRILTTEGIRKPDIVATKEKCALVLDAQVVSEAADLDRAHRLKIAKYNTAEIVRHVKRTFDCDEVKFATVTLSSRGLWSRSSVEGLLELGILRKKDIMILSSRTIVGGIAIWNVFNKATYVKRRRGLRRVGVG

SEQ ID NO: 18353 - protein, 1137 aa, Morbakka virulenta
MMNTTNTSTANGVNGRDSYTTSVAPCRLPVENQAGVGRHPITGVEQEEEQKRTKGKRKWDRQDNIKVMECYFLAKSDPRTGYMNRMLKIWRDKGGRADASSQRLADQVRVIRRNGLLSQLEIEEISRRLIPSSQEQEPSDLTPDPIKNVNTPQPQHESMDETQPQEQYEQGLTDDQKEIFERLTNKLRDLNGANVNVTSLKNAMARKVRKRTQEVNEVIGRIPTATIEETNQLIYAGALVVGEDLGRKKGLTSNCISRKHEPKWKIRLENKIKEKRRDLSRLDGIEKGRCECHEYLVKKYQLNSKTVNTVKEELRQSIVAITAKKKRYLERHEQYRQNKYFEKDQKRFYQQLEGKEQVDIQPDAEEAIAFWSNIWGNGCDHNSKAAWLKDVKRDIKVDAERQDTTITVEMVTKACSSMSPWKAAGPDGVQGYWIKRFTTLHQRIADQMDEILQSAQVPSWMTKGRTLLIPKDTSKGNIPPNYRPITCLPLMWKLLTSIISHEIYNHLDEQNLLPWEQKGCTKGGRGTKEQLVIDKCTMKDSKARSTNLAMGWVDYSKAYDMVPHTWIHECLEMYGVDSRIRNMLRASMESWRTMLQSGGKDLGEVAIKRGIFQGDSLSPLLFVIAMIPLTAVLRKAAPSYVFRDKTKLNHLLYMDDLKLFGKSKSDLESLLNTVRVFSDDIKMQFGFDKCAITVLKRGKLVKDSSGIVFENNEVIRSITEDNSYKYLGVLELDVIKQNEMKINVQSEYIRRLRKVLKSKLNAGNLVKAINTWAVSLFRYGGGILEWTQQELEQLDRKTRKLMHAYGAVHPRADVDRLYVHREEGGRGLMSVYDTVKYEEESLSQYIANKSSDIMGAVKTYVKRPSKSERKTFRKEQKQQRKEGWQDKAMHGQHVRQTKEFASPLSWQWLKRGSLKRQTESLLVAAQDQALRTNYRKAKIERTRESALCRMCGQKDETVSHIISECSALVQSVYKGRHDRVAGAVHWSIMKVHGLPHSDRWYEHRAESVVENENVKILWDFNVHVDRFVEARRPDIIIIKKKEKECILVDIAVPGDARTAAKEEEKIHKYSELAREVSRLWDVKTLVIPIVVGALGSVTERLVPYLAMVGVGLSFETIQKAALLGSAHILRKVLDKSD

SEQ ID NO: 18354 - protein, 1137 aa, Morbakka virulenta
MMNTTNTSTANGVNGRDSYTTSVAPGRLPVENQAGAGRHPITGVEQEEEQQRTKGKRKWDRQDNIKVMECYFLAKSDPRTGYMNRMLKIWRDKGGRADASSQRLADQVRVIRRNGLLSQLEIEEISRRLIPSSQEQEPSDLTPDPIKNVNTPQPQHESMDETQPQEQYEQGLTDDQKEIFERLTNRLRDLNGANVNVTSLKNAMARKVRKRTQEVNEVIGRIPTATIEETNQLIYAGALVVGEDLGRKKGLTSNCISRKHEPKWKIRLKNKIKEKRRDLSRLDGIEKGRCECHEYLVKKYQLNSKTVNTVKEELRQSIVAITAKKKRYLERHEQYRQNKYFEKDQKRFYQQLEGKEQVDIQPDAEEAIAFWSNIWDNGCDHNSKAAWLKDVKRDIKVDAERQDTTITVEMVTKACSSMSPWKAAGPDGVQGYWIKRFTTLHQRIADQMDEILQSAQVPSWMTKGRTLLIPKDTSKGNIPPNYRPITCLPLMWKLLTSIISHEIYNHLDEQNLLPWEQKGCTKGGRGTKEQLVIDKCTMKDSKARSTNLAMGWVDYSKAFDMVPHTWIHECLEKYGVDSRIRNMLRASMESWRTMLQSGGKDLGEVAIKRGIFQGDSLSPLLFVIAMIPLTAVLRKAAPSYVFRDKTKLNHLLYMDDLKLFGKSKSDLESLLNTVRVFSDDIKMQFGFDKCAITVLKRGKLVKDSSGIVFENNEVIRSITEDNSYKYLGVLELDVIKQNEMKINVQSEYIRRLRKVLKSKLNAGNLVKAINTWAVSLFRYGGGILEWTQQELEQLDRKTRKLMHAYGAVHPRADVDRLYVHREEGGRGLMSVYDTVKYEEESLSQYIANKSSDIMGAVKTYVKRPSKSERKTFRKEQKQQRKEGWQDKAMHGQHVRQTKEFASPLSWQWLKRGSLKRQTESLLVAAQDQALRTNYRKAKIERTRESALCRMCGQKDETVSHIISECSALVQSVYKGRHDRVAGAVHWSIMKVHGLPHSDRWYEHRAESVVENENVKILWDFNVHVDRFVEARRPDIIIIKKKEKECILVDIAVPGDARTAAKEEEKIHKYSELAREVSRLWDVKTLVIPIVVGALGSVTERLVPYLAMVGTGLSFETIQKTALLESAHILRKVLDKSD

SEQ ID NO: 18355 - protein, 1137 aa, Morbakka virulenta
MMNTTNTSTANGVNGRDSYTTSVAPGRLPVENQAGAGRHPITGVEQEEEQQRTKGKRKWDRQDNIKVMECYFLAKSDPRTGYMNRMLKIWRDKGGRADASSQRLADQVRVIRRNGLLSQLEIEEISRRLIPSSQEQEPSDLTPDRIKNVNTPQPQHESMDETQPQEQYEQGLTDDQKEIFERLTNRLRDLNGANVNVTSLKNAMARKVRKRTQEVNEVIGRIPTATIEETNQLIYAGALVVGEDLGRKKGLTSNCISRKHEPKWKIRLKNKIKEKRRDLSRLDGIEKGRCECHEYLVKKYQLNSKTVNTVKEELRQSIVAITAKKKRYLERHEQYRQNKYFEKDQKRFYQQLEGKEQVDIQPDAEEAIAFWSNIWDNGCDHNSKAAWLKDVKRDIKVDAERQDTTITVEMVTKACSSMSPWKAAGPDGVQGYWIKRFTTLHQRIADQMDEILQSAQVPSWMTKGRTLLIPKDTSKGNIPPNYRPITCLPLMWKLLTSIISHEIYNHLDEQNLLPWEQKGCTKGGRGTKEQLVIDKCTMKDSKARSTNLAMGWVDYSKAFDMVPHTWIHECLEMYGVDSRIRNMLRASMESWRTMLQSGGKDLGEVAIKRGIFQGDSLSPLLFVIAMIPLTAVLRKAAPSYVFRDKTKLNHLLYMDDLKLFGKSKSDLESLLNTVRVFSDDIKMQFGFDKCAITVLKRGKLVKDSSGIVFENNEVIRSITEDNSYKYLGVLELDVIKQNEMKINVQSEYIRRLRKVLKSKLNAGNLVKAINTWAVSLFRYGGGILEWTQQELEQLDRKTRKLMHAYGAVHPRADVDRLYVHREEGGRGLMSVYDTVKYEEESLSQYIANKSSDIMGAVKTYVKRPSKSERKTFRKEQKQQRKEGWQDKAMHGQHVRQTKEFASPLSWQWLKRGSLKRQTESLLVAAQDQALRTNYRKAKIERTRESALCRMCGQKDETVSHIISECSALVQSVYKGRHDRVAGAVHWSIMKVHGLPHSDRWYEHRAERVVENENVKILWDFNVHVDRFVEARRPDIIIIKKKEKECILVDIAVPGDARTAAKEEEKIHKYSELAREVSRLWDVKTLVIPIVVGALGSVTERLVPYLAMVGVGLSFETIQKAALLGSAHILRKVLDKSD

SEQ ID NO: 18356 - protein, 1297 aa, Ixodes scapularis
MTLLCSGCQPVRLQSLGPKHKGKMQSISSRAGAPSPTRMSASGVGVSVADDDAATQPWFGCTECEASFSTLRGLRIHAGQKKHGTQDGSLRLPPKEARRPRRVPPVPADACRTPSAGPSRPLPVPLAPASDCWPPTPGSSRPPSAGPSRPPSAGLSRPPSAGSSRPPSAGSSRPPPLPLPVPPAPSGNCRSPPAGPCRSLPVLPVPSVDGLPPSRCPSPPVPGGSPAGSCGGLPDPFGVLRPSPAGASAGACRPVSATTADVPADAAAAVCRPPSAGTQGSGFHFTCPECSRAFSTPIGLSQHLRQAHPVAYNATIKTTRTKARWDPEETYLMASLEAGIPSDCANMNQTLCSLLPRGSQRTYDAVKSHRRTAAYRELVAGFRATASSTSADHTAPGAESGSRGRLSVPESRESFPERDLGCPPPPTESNKAALRSLIARAPPAEFEGPWLWDIARQATMGVNVVLLLDQYLKQVFTVARPRMRRKKAPPCGRNESRRKRKRREYAETQDRFSRRQSDCAREVLDGPASSTIQDPVGFLATWRDIMTGPCPAAPSEALPERLAEIDLLFPASAREISEAMIPAGSAAGPDGFTARLLKSVPPLLLRVLVNLLLLTRQVPVALREARTTFIPKTMDATEPSQFRPITVASVLQRLVHRILAKRAVAAVPQNFRQRAFQPVDGCAENIWLLSAAISEAKRSLRPLHMASIDLTKAFDRVSVEAILRGARRAGFSSDFVRYLKDLYTNSRTVLQFQGEALGVQPTTGVRQGDPLSPVLFNLVLDEYLANVDPNIGFVAGDLRLDAMAFADDLVVFASTPQGLQLRLDQIQDFFAPRGLQVNIKKSFTLSMQPSGRDKKLKIATDNLFTVAGTPLPTSEVTTLWRYLGVTFSPQGTKNTGLRAQLQELLTRVSKAPLRPQQRLVILRFHLLPRLYHRLVLGPWTNDLLRKMDVSIRGSVRRWLDLPHDTPLGFFHAPVAEGGLGITSLRAAIPSMLIQRLGNLSLSSHPGCEAAIRTPLLTGLLRRATAATSYQGRELTTKMDVHRMWAMLLHRSCDGKALKESRKVPAAHRWLTDGTHFLSGREFINLVKLKINALPTLERTSRGRDRDINCRAGCQAPESLGHVLQACHRGHRGRVKRHDNVAGYACGRLAQMQWQVKWEPHYTVSGNVMKPDLVAYKDADCVVLDAQIVGTTLGLGFHHAQKKAKYSIPDLLDQIRGDRAGTVAVSTITLNFRGVWSAESAHDLKGLGFTDNDLKNMSVRCLQGGVACFRRHRNMTTVVRATGEDAEPRCTRSGPPPV

SEQ ID NO: 18357 - protein, 838 aa, Ixodes persulcatus
MGVNVVLLLDRYLKQVFTVAQPRVRRRKAPPCRRNESRRKRKRREYAETQDRFSRRQSDCAREVLDGPASSTIQDPVGFLATWRDIMTGPCPAAPLEALPERQAEIDLLFPASAREISEAMIPAGSAAGPDGFTARLLKSVPPPLLRVLVNLLLLTRQVPVALREARTTFVPKTADATEPSQFRPITVASVLQRLVHRILAKRAVAAVPLNFRQRAFQPVDGCAENIWLLSAAISEAKRSLRPLHRASIDLTKAFDRVSVEAILRGARRAGFSSDFVRYLKDLYTNSRTILQFQGEALGVQPTTGVRQGDPLSPVLFNLVLDEYLTTVDPNIGFVAGDLRLDAMAFADDLVVFASTPQGLQSRLNEVQDFFAPRGLQVNTKKSFTLSMQPSGREKKLKISTDNIFTVAGTPLPASEVTTLWRYLGVAFSPQGTKNTGLRAQLQELLTRVSKAPLRPQQRLVILRFHLLPRLYHRLVLGPWTNDLLRKMDVSIRGSVRRWLDLPHDTPLGFFHAPVAEGGLGITSLRASIPSMLIQRLGNLSLSSHPGCEAAIQTPLLTGLLRRANAAASYQGRQLTTKMEIHRMWAMLLHRSCDGKALKESRRVPAAHRWLTDGTRFLSGREFINLVKLKINALPTLERTSRGRDRDITCRAGCQAPESLGHVLQACHRGHRGRVKRHDNVAGYACGRLTQMQWQVKWEPHYTVSGNVMKPDIVAYKDADAVVLDAQIVGTTLGLGFHHAQKKTKYNIPDLLDQIREDRAGTVAVSTITLNFRGVWSAESAHDLKGLGFTDNDLKNMSVRCLQGGVACFRRHRNMTTVVRATGEDGETRGTRSGPPPV

SEQ ID NO: 18358 - protein, 1071 aa, Bradysia odoriphaga
MEDSSDGTTNATDDPINFSIDGAQSLNLQKFLQQSDTEVECKTCNRTFASSHGLQIHKGHHAKLKENINLRKSMRKKNKFPKSELLPNEISKTPFNDLDEFLALVSKDNESKVIDSLPISNIGDSRVSCSICNFIAKNDHGLKIHMNVHKKSSVSANDPRSEQKRKKTKENVDLQLFGILLNECRLTIPLVRIIQKSVRSIVCQELTNVIKDVTNKNDVSSWMRLFGFPYIVLNCFKKEKNGPNVIRTNLNNFIQSNDINEELLKVLRKAPAMQRPKSKITENLTVKTAKRKINEGDISGAVRVLCSHESIAPNSIETIAKLISKHPDDDEIPLEEMTFRVDIQPTESQQLLNAIQSFPISSAGGVDGLRPRHLKDMISFTCGDNSTRLLSAIASFMDKIRNGKLTPEILPLFYGATLTALSKKENDVRPIAVGITWRRLAGKIGVFDIKDKLSEELRPIQFGFGTEGGCEAIIHAVRYIAETNHDGPMAIIKLDFKNAFNMMFRKYLLEEVKHLCPELYPMLQQAYRCPSYLYYMQEVIMSKRGVQQGDPLGPLAFCIGIMKLTHSISSKLNCWYLDDGTLGDKIESLMANIQKVLDFCDKSGLCLNTEKCEIYFLNTTPTMEENMLSEISSLLPGIRKLDDSSFELLGAPIFKEGLVRMLTSKIESVKILCSRLKLLDVHQAICLFRHSLSSPRFIHLLRTCRTFELECILQDADELFRTTLESISNTKIDNRKWLQASLPLSLGGLGIRRLQDLSQPAYWSSLYKSVELSNMILQKFDLKLEDVCTLIDNDIKFVPESAVDRKQQERWDYPNMEAVFDGLLNESEPLDRARLLASLNKESSKWLQVVPSSQLGLLLDNDSARIAIALRLGCQICEKHRCVCGEMVDVNGLHGLSCTKTGGHYARHSDFNKIISSSLSTARVPNILEPPGLSRDDGKKPDGMTLIPWSHGKAILWDTTVVNTLAKSYLYLSSKNAGSVAEAAERRKYNHYIQLRNDYHFTPIAFETLGCMGPDTKSFLFRVGSLLKKETGEPRSLNFLLQKISISIQRGNAACILGTFGKNLNCNSVSI

SEQ ID NO: 18359 - protein, 1090 aa, Bradysia odoriphaga
MGSTSGGSPGPSGTNDMKALLEKTRERRLQSDPRDKLWPCPFCLHKAKSLFQGLVHVKKEHPSITELDKKGAFDQMKNNIQLSSNVPNDDSLNDLQQFLLLNQKEETDDECIKDSRAEKQNTFFCGSSNLGDEDEYFHCPYCVEERCFPSLRGLNVHIGKKHKNEKKVTLEQLEFQGGSIEGYDLTDFGSQLALLKKTTPTLRRCPKGARQDLANSLNNVIRNIVQVNDEQSWNKLLLFPYTTLRLPEESENVTNLTTFVRQNIQMWNENKINVSPRTESKTSAFNTITDKADIKFAKKVEAKLADGDVSGALRLISSDDVIAPNNQATLDSLKQKHPPHPEPTNYPDRSIEIAQIIPIEEEVSRAIMTFRKGSAGGLDSLRPQILKDLLHVQNGDTGMKLLESITSLSTIILSGDVPDSICPFLYGASLTALMKKSGGIRPIAVGNTWRRISAKIACRRVASVLSNIFLPNQLGVGIPNGAEAGSHAARIYYTSKHSGVRVFLKIDIKNAFNEIRRDAILQKVKSTVPEIYNFVHQCYRLPTNVYYGEHLILSQRGVQQGDPLGPALFCLVIQDIISFLQDLDLNVWYLDDGTIAGTPENVLKAFKSIMEQAHEIGLELNYDKCELSILGTESEEIKTGIEHQFQSISDGIQSMTPENAFLLGSPLTYAASILCLNKKISDLQNLTTRLKNISMHSAYYLLRISITTPRLIFFLRGSPMWRNESGLSKYDEVLKLSLESIFNINLTEQVWIESSLPIKKGGIGIRHASDIALPCFLSSLYNASALLDRLLPETYRHVDSTKVDSEERWYREFGELPEESLRIYQSVWESYEIDQKLAWINNSLNKNVDKARFLANSSQESGAWLHALPSPPLGTHLSDDEFRISVGLRLGAAIVQPHKCVCGTKVDEFGRHGLSCSKASGTNSRHGVSNDLIQRALKSAEVPCRREPPGCSRPDGKKPDGLSLVPWARGKSLLWDFTCADTFAPSYVNKTARQLGWAAKQAETRKFNHYANLRDQFVFVPVATETSGVFGKLALDLFKKIGSKISEKTHEKRATSYFIQRISLAIQRGNVASILGTLPPSKNLNEIYYL

SEQ ID NO: 18360 - protein, 1090 aa, Bradysia odoriphaga
MGSTSGGSPGPSGTNDMKALLEKTRERRLQSDPRDKLWPCPFCLHKAKSLFQGLVHVKKEHPSITELDKKGAFDQMKNNIQLSSNVPNDDSLNDLQQFLLLNQKEETDDECIKDSRAEKQNTFFCGSSNLGDEDEYFHCPYCVEERCFPSLRGLNVHIGKKHKNEKKVTLEQLEFQGGSIEGYDLTDFGSQLALLKKTTPTLRRCPKGARQDLANSLNNVIRNIVQVNDEQSWNKLLLFPYTTLRLPEESENVTNLTTFVRQNIQMWNENKINVSPRTESKTSAFNTITDKADIKFAKKVEAKLADGDVSGALRLISSDDVIAPNNQATLDSLKQKHPPHPEPTNYPDRSIEIAQIIPIEEEVSRAIMTFRKGSAGGLDSLRPQILKDLLHVQNGDTGMKLLESITSLSTIILSGDVPDSICPFLYGASLTALMKKSGGIRPIAVGNTWRRISAKIACRRVASVLSNIFLPNQLGVGIPNGAEAGSHAARIYYTSKHSGVRVFLKIDIKNAFNEIRRDAILQKVKSTVPEIYNFVHQCYRLPTNVYYGEHLILSQRGVQQGDPLGPALFCLVIQDIISFLQDLDLNVWYLDDGTIAGTPENVLKAFKSIMEQAHEIGLELNYDKCELSILGTESEEIKTGIEHQFQSISDGIQSMTPENAFLLGSPLTYAASILCLNKKISDLQNLTTRLKNISMHSAYYLLRISITTPRLIFFLRGSPMWRNESGLSKYDEVLKLSLESIFNINLTEQVWIESSLPIKKGGIGIRHASDIALPCFLSSLYNASALLDRLLPETYQHVDSTKVDSEERWYREFGELPEESLRIYQSVWESYEIDQKLAWINNSLNKNVDKARFLANSSQESGAWLHALPSPPLGTHLSDDEFRISVGLRLGAAIVQPHKCVCGTKVDEFGRHGLSCSKASGTNSRHGVSNDLIQRALKSAEVPCRREPPGCSRPDGKKPDGLSLVPWARGKSLLWDFTCADTFAPSYVNKTARQLGWAAKQAETRKFNHYANLRDQFVFVPVATETSGVFGKLALDLFKKIGSKISEKTHEKRATSYFIQRISLAIQRGNVASILGTLPPSKNLNEIYYL

SEQ ID NO: 18361 - protein, 1074 aa, Bradysia odoriphaga
MIEGNASKTDDLLHTSVRQRLPRDCKQPKTGFCGKKSKNIESQDDLREPMTGQSQSRKNDQRNEDHEINTCEITNDLTTFLKLVERDYPSFNDLSENATCKQSKNSDEDEEMPMHFGNMMYGDEDDYFCCPYCEKVKRFHSLRGLNIHIVKKHPDKNKLKLDDFEDNDCDLNAFGDADVGQRLAFLKKSVPTLRRCPKGARQDMANALTNAINQCIRTSSEYYWNKLLLFPYATMKIPNKDENVTNLTSYVRQNIREWNEKGIQIIPDLAQLSATSENNFKTNNISKKVEAKLSDGDISGALRLISSEDIIAPNNEITLDALKQKHPQHPEPSFFPDSSIDTEQVIPTDEEVNRSIVSFRKGTAGGLDSLRPQILKDLLYVQNGDTANKLLQAITSLITQVFNGKIPNEIRPYLFGASLTALQKKTGGIRPIAVGNTWRRITAKIACRRVASVLTNLYLPHQLGVGIKNGAEAGAHAARIYFTSKHKSVRVFLKIDVRNAFNELRRDILLQKVKSTIPEIYKFVELCYRDPTNVYYREHVILSQRGVQQGDPLGPALFSLVLQDIVMSLQNLDLNIWYLDDGTIGGAPDDVFNALQDIYQKARDIGLELNYEKCEISVLGTESDECKNEIYGRFNSISNGIQKMSAKNEFLLGSPLTKAASTLCLENKTKDLMNLTEKLKQISSHSAYCLLRFSITTPRLIFFLRGSPMWQNCSGLQHYDEVLKNSLESLFNLHLTEKAWIESSLPIKKGGILLRHASDIALPCFLSSMYNVSTLLNQLLHETYRQDNLVQVEAEEQWCQRFGELRSLQSAWENFEITRKLEVIHSWPNNKIDKARLLANSSEESGVWLQALPSPQLGTHLNNDEFRVATALRLGLPIVQPHKCVCGSKVDKYGRHGLSCSKASGTQPRHRNFNNLMQRGLKSAEVPCLLKPPGCSRPDGKKPDGLSLLPWTKGKSLLWDYTCADTFASSYINRTSKELGWAAKHAEEKKYEHYVDLREQFIFIPVATETSGVFGKEAIKLIKAIGSKIAEVTHEKRATSFLFQRLALSIQRGNVASILGTIPPSKNLAELFYL

SEQ ID NO: 18362 - protein, 1030 aa, Bradysia odoriphaga
MTGQSQSRKNDQRNEDHEINTCEITNDLTTFLKLVERDYPSFNDLSENATCKQTKNSDEDEEMPTHFGNMMYGDEDDYFCCPYCKKVKRFHSLRGLNIHIVKKHPDKNKLKLDDFEDNDCDLNAFGDADVGQRLAFLKKSVPTLRRCPKGARQDMANALTNAINQCIRTSSEYYWNKLLLFPYATMKIPNKDENVTNLTSYVRQNIREWNEKGIQIIPDLAQLSATSENNFKTNNISKKVEAKLSDGDISGALRLISSEDIIAPNNEITLDALKQKHPQHPEPSFFPDSSIDTEQVIPTDEEVNRSIVSFRKGTAGGLDSLRPQILKDLLYVQNGDTANKLLQAITSLITQVFNGKIPNEIRPYLFGASLTALQKKTGGIRPIAVGNTWRRITAKIACRRVASVLTNLYLPHQLGVGIKNGAEAGAHAARIYFTSKHKSVRVFLKIDVRNAFNELRRDILLQKVKSTIPEIYKFVELCYRDPTNVYYREHVILSQRGVQQGDPLGPALFSLVLQDIVMSLQNLDLNIWYLDDGTIGGAPDDVFNALQDIIQKARDIGLELNYEKCEISVLGTESDECKNEIYGRFNSISNGIQKMSAKNEFLLGSPLTKAASTLCLENKTKDLMNLTEKLKQISSHSAYCLLRFSITTPRLIFFLRGSPMWQNCSGLQHYDEVLKNSLESLFNLHLTEKACIESSLTIKKGGIGLRHASDIALPCFLSSMYNVSTLLNQLLHETYRQDDLVQVEAEEQWCQRFGELPEESLRPLQSAWENFEITRKLEVIHSWPNDKIDKARLLANSSEESGVWLQALPSPQLGTHLNNDEFRVATALRLGLPIVQPHKCVCGSKVDKYGRHGLSCSKASGTQPRHRNFNNLMQRGLKSAEVPCLLEPPGCSRPDGKKPDGLSLLPWTKGKSLLWDYTCADTFASSYINRTSKELGWAAKHAEEKKYEHYVDLREQFIFIPVATETSGVFGKEAIKLIKAIGSKIAEVTHEKRATSFLFQRLALSIQRGNVASILGTIPPSKNLAELFYL

SEQ ID NO: 18363 - protein, 752 aa, Bradysia coprophila
MHPEPTNFPEHTIDVAQMIPIEEEVSRAIMSFRKGSAGGLDSLRPQILKDLLHVQNGDAGQKLLEAITALSTVILSGEVPSTICPYLYGASLTALMKKTGGIRPIAVGNIWRRISAKIACRKVSSVLSNLFLPKQLGVGIQNGAEAGAHAARIYYTSRHNGVRVFLKIDVKNAFNEIRRDALLWKVRSNVPEIYKFVEQCYRHPTNVYYRDNVILSQRGVHQGDPLGPALFCLVIQDIISSLQDLDLNLWYLDDGTIAGSPNNVLKAFKTIIHMSKEIGLELNYAKCEFSILESETEESKIEIEHQFKSIAEGIQTMKPENEFLLGSPLTDAASTLCLNKKILDLQKLTKRLKNISMHSAYYLLRMSITTPRLIFFLRGSPMWRNESGLLQYDEVLKNAIESIFNIELSDKAWIESSLPIKKGGIGIRHASDIALPCFLSSLYNVSALLDQLLPENYRLVDMTKVESEDHWCGKFGELPEESLRIYQGVWESYEINQKIENLRQQLNVAVDKARFLANSSKESGAWLHSLPSPQLGTHLNNDEFRISIGLRLGVAIVQPHKCVCGTKVNKYGRHGLSCSKASGTLPRHGSGNDLIQRAFRSAEIPCKREPTGCSRPDGKKPDGLTLVPWEKGKSLLWDYTCVDTFANSYVNRTARELGWAAKKAEADKFDHYTDLMSQFIFVPIATETSGVIGKCGLDLIKKIGSRITEKTHEKRATNYLIQRLGLVIQRGNVASILGTLPHSKDLNEIHYL

SEQ ID NO: 18364 - protein, 1099 aa, Bradysia odoriphaga
MLNKQNASTFTYIIHHMFRNVLFNRRRIPNNICLKMHCKHLPAFLPLLNVFHWLREVIYDEFRSSTLCTICVMCGVREYYSFAEYLSVLPCEITNDLTTFLKLVERDYPSFNDLSENATCKQTKNSDEDEEMPMHFGNMMYGDEDDYFCCPYCEKVKRFHSLRGLNIHIVKKHPDKNKLKLDDFEDNDCDLNAFGDADVGQRLAFLKKSVPTLRRCPKGARQDIANALTNAINQCIRTSSEYYWNKLLLFPYATMKIPNKDENVTNLTSYVRQNIREWNEKGIQIIPDLAQLSATSENNFKTNNISKKVEAKLSDGDISGALRLISSEDIIAPNNEITLDALKQKHPQHPEPSFFPDSSIDTEQVIPTDEEVNRSIVSFRKGTAGGLDSLRPQILKDLLYVQNGDTANKLLQAITSLITQVFNGKIPNEIRPYLFGASLTALQKKTGGIRPIAVGNTWRRITAKIACRRVASVLTNLYLPHQLGVGIKNGAEAGAHAARIYFTSKHKSVRVFLKIDVRNAFNELRRDILLQKVKSTIPEIYKFVELCYRDPTNVYYREHVILSQRGVQQGDPLGPALFSLVLQDIVMSLQNLDVNIWYLDDGTIGGAPDDVFNALQDIIQKARDIGLELNYEKCEISVLGTESDECKNEIYGRFNSISNGIQKMSAKNEFLLGSPLTKAASTLCLENKTKDLMNLTEKLKQISSHSAYCLLRFSITTPRLIFFLRGSPMWQNCSGLQHYDEVLKNSLESLFNLHLTEKAWIESSLPNKKGGIGLRHASDIALPCFLSSMYNVSTLLNQLLHETYRQDDLVQVEAEEQWCQRFGELPEESLRPLQSAWENFEITRKLEVIHSWPNDKIDKARLLANSSEESGVWLQALPSPQLGTHLNNDEFRVATALRLGLPIVQSHKCVCGSKVDKYGRHGLSCSKASGTQPRHRNFNNLMQRGLKSAEVPCLLEPPGCSRPDGKKPDGLSLLPWTKGKSLLWDYTCADTFASSYINRTSKELGWAAKHAEEKKYEHYVDLREQFIFIPVATETSGVFGKEAIKLIKAIGSKIAEVTHEKRATSFLFQRLALSIQRGNVASILGTIPPSKNLAELFYL

SEQ ID NO: 18365 - protein, 960 aa, Bradysia odoriphaga
MYGDEDDYFCCPYCEKVKRFHSLRGLNIHIVKKHPDKNKLKLDDFEDNDCDLNAFGDADVGQRLAFLKKSVPTLRRCPKGARQDMANALTNAINQCIRTSSEYYWNKLLLFPYATMKIPNKDENVTNLTSYVRQNIREWNEKGIQIIPDLAQLSATSENNFKTNNISKKVEAKLSDGDISGALRLISSEDIIAPNNEITLDALKQKHPQHPEPSFFPDSSIDTEQVIPTDEEVNRSIVSFRKGTAGGLDSLRPQILKDLLYVQNGDTANKLLQAITSLITQVFNGKIPNEIRPYLFGASLTALQKKTGGIRPIAVGNTWRRITAKIACRRVASVLTNLYLPHQLGVGIKNGAEAGAHAARIYFTSKHKSVRVFLKIDVRNAFNELRRDILLQKVKSTIPEIYKFVELCYRDPTNVYYREHVILSQRGVQQGDPLGPALFSLVLQDIVMSLQNLDLNIWYLDDGTIGGAPDDVFNALQDIIQKARDIGLELNYEKCEISVLGTESDECKNEIYGRFNSISNGIQKMSAKNEFLLGSPLTKAASTLCLENKTKDLMNLTEKLKQISSHSAYCLLRFSITTPRLIFFLRGSPMWQNCSGLQHYDEVLKNSLESLFNLHLTEKAWIESSLPIKKGGIGLRHASDIALPCFLSSMYNVSTLLNQLLHETYRQDDLVQVEAEEQWCQRFGELPEESLRPLQSAWENFEITRKLEVIHSWPNDKIDKARLLANSSEESGVWLQALPSPQLGTHLNNDEFRVATALRLGLPIVQPHKCVCGSKVDKYGRHGLSCSKASGTQPRHRNFNNLMQRGLKSAEVPCLLEPPGCSRPDGKKPDGLSLLPWTKGKSLLWDYTCADTFASSYINRTSKELGWAAKHAEEKKYEHYVDLREQFIFIPVATETSGVFGKEAIKLIKAIGSKIAEVTHEKRATSFLFQRLALSIQRGNVASILGTIPPSKNLAELFYL

SEQ ID NO: 18366 - protein, 1281 aa, Bradysia odoriphaga
MGNTSGGDPGPSTTNNLKNLLQNTREKYQLTNSGDKRWPCAFCFNKYQTFMKCRAHIIKEHGFSSERLSQSNTEESKICDVESQDDFRDASLIQGNASKTDDLLHTSVRQRLPRDCKQSKTGCCISKKKFPQVTDICEIESQDDFRDPSLFQGNASNTDDLLHVSVRQKLLRDCKQSKTGCCISKEKFPQVTEICEIESQDDFRDPSLIQINADDVLHTSVRQRLPRNCKRPKTGFCGKQSKNIETQDDFRKNPNRQSLRKKNSRRNEDHEMNMSEVNNNLTEFLRLVERDYPSFNNLSEPDNQNKNPDEGEETPIHFGNILYGDEDDYFYCPYCEKVKRFPSLRGLNIHIVKKHPDKKKLKLDDFEDNDCDLNAFGDTDVGQRLAFLKKTVPTLRRCPKGARQDMANALTIGINHCIRTSSVYSWNKLLLFPYATMKIPNKDENVTNLTSYVRQNIREWNEKGIQIIPDLPQLTTTSENNFKTNNISKKVEAKLSDGDISGALRLISSEDIIAPNNEITLNALKQKHPQHPEPSFFPDSSIDTEQVIPTDEEVNRSIVSFRNGTAGGLDSLRPQILKDLLYVQNGDTGNKLLQAITSLITQVFNGNIPDEIRPYLFGASLTALQKKNGGIRPIAVGNTWRRITAKIACRRVASVLTNLYLPHQLGVGIKNGAEAGAHAARIYFTSKHKSVRVFLKIDVKNAFNELRRDILLQKVKSTIPEIYKFVELCYRVPTNVYYREHVILSQRGVQQGDPLGPALFSLVLQDIIMSLQNVDLNIWYLDDGTIGGSPDDVFNALQDIIQKSRDIGLELNYEKCEISVLGTESDELKNEIYRRFNSISNGIQKMSAKTEFLLGSPLTEAASTLCLENKIKDLMNLTEKLKQISSHSAYCLLRFSITTPRLIFFLRGSPMWQNCAGLQHYDEVLKNSLESLFNLHLTEKAWIESSLPIKKGGIGLRQASDIALPCFLSSMYNVSTLLNQLLHETYRQDDLVQVEAEEQWCQKFGELPDESLRPLQSAWENFEITRKLETIHSWSNEKIDKARLLANSSEESGAWLQALPSPQLGTHLNNDEFRVAIALRLGSPILQPHKCVCGTKVDKYARHGLSCSKASGTLPRHRDFNNLLQRALKSAEVPCLLEPPGCSRPDGKKPDGLSLIPWTKGKSLLWDYTCADTFASSYINRTSKELGWAAKHAEEKKYEHYVDLREQFIFIPVATETSGVFGKEAVKLIKAIGSKIAEVTHEKRATSFMFQRLAISIQRGNVASILGTIPPSKNLAELFYL

SEQ ID NO: 18367 - protein, 1230 aa, Bradysia odoriphaga
MGNTSGGDPGPSRTNNLKNLLQSTREKYQIINPGDKRWPCAFCFNKYPTFMKCRTHIIDEHGFSSEHLSQSNTENSKMFEIKSQDDFRVDSLIQSKASKTDELLHASVRQRLPRDCKQPKTGCCTSKEKFSQVNETKIIEIESQDDFRVASMIEGNASKTDDLLHTSVRQRLPRDCKQPKTGFCGKKSKNIESQDDLREPMTGQSQSRKNDQRNEDHEINTCEITNDLTTFLKLVERDYPSFNDLSENATCKQTKNSDEDEEMPMHFGNMMYGDEDDYFCCPYCEKVKRFHSLRGLNIHIVKKHPDKNKLKLDDFEDNDCDLNAFGDADVGQRLAFLKKSVPTLRRCPKGARQDMANALTNAINQCIRTSSEYYWNKLLLFPYATMKIPNKDENVTNLTSYVRQNIREWNEKGIQIIPDLAQLSATSENNFKTNNISKKVEAKLSDGDISGALRLISSEDIIAPNNEITLDALKQKHPQHPEPSFFPDSSIDTEQVIPTDEEVNRSIVSFRKGTAGGLDSLRPQILKDLLYVQNGDTANKLLQAITSLITQVFNGKIPNEIRPYLFGASLTALQKKTGGIRPIAVGNTWRRITAKIACRRVASVLTNLYLPHQLGVGIKNGAEAGAHAARIYFTSKHKSVRVFLKIDVRNAFNELRRDILLQKVKSTIPEIYKFVELCYRDPTNVYYREHVILSQRGVQQGDPLGPALFSLVLQDIVMSLQNLDLNIWYLDDGTIGGAPDDVFNALQDIIQKARDIGLELNYEKCEISVLGTESDECKNEIYGRFNSISNGIQKMSAKNEFLLGSPLTKAASTLCLENKTKDLMNLTEKLKQISSHSAYCLLRFSITTPRLIFFLRGSPMWQNCSGLQHYDEVLKNSLESLFNLHLTEKAWIESSLPIKKGGIGLRHASDIALPCFLSSMYNVSTLLNQLLHETYRQDDLVQVEAEEQWCQRFGELPEESLRPLQSAWENFEITRKLEVIHSWPNDKIDKARLLANSSEESGVWLQALPSPQLGTHLNNDEFRVATALRLGLPIVQPHKCVCGSKVDKYGRHGLSCSKASGTQPRHRNFNNLMQRGLKSAEVPCLLEPPGCSRPDGKKPDGLSLLPWTKGKSLLWDYTCADTFASSYINRTSKELGWAAKHAEEKKYEHYVDLREQFIFIPVATETSGVFGKEAIKLIKAIGSKIAEVTHEERATSFLFQRLALSIQRGNVASILGTIPPSKNLAELFYL

SEQ ID NO: 18368 - protein, 1079 aa, Bradysia odoriphaga
MIEGNASKTDDLLHTSVRQRLPRDCKQPKTGFCGKKSKNIESQDDLREPMTGQSQSRKNDQRNEDHEINTCEITNDLTTFLKLVERDYPSFNDLSENATCKQSKNSDEDEEMPMHFGNMMYGDEDDYFCCPYCEKVKRFHSLRGLNIHIVKKHPDKNKLKLDDFEDNDCDLNAFGDADVGQRLAFLKKSVPTLRRCPKGARQDMANALTNAINQCIRTSSEYYWNKLLLFPYATMKIPNKDENVTNLTSYVRQNIREWNEKGIQIIPDLAQLSATSENNFKTNNISKKVEAKLSDGDISGALRLISSEDIIAPNNEITLDALKQKHPQHPEPSFFPDSSIDTEQVIPTDEEVNRSIVSFRKGTAGGLDSLRPQILKDLLYVQNGDTANKLLQAITSLITQVFNGKIPNEIRPYLFGASLTALQKKTGGIRPIAVGNTWRRITAKIACRRVASVLTNLYLPHQLGVGIKNGAEAGAHAARIYFTSKHKSVRVFLKIDVRNAFNELRRDILLQKVKSTIPEIYKFVELCYRDPTNVYYREHVILSQRGVQQGDPLGPALFSLVLQDIVMSLQNLDLNIWYLDDGTIGGAPDDVFNALQDIIQKARDIGLELNYEKCEISLLGTESDECKNEIYGRFNSISNGIQKMSAKNEFLLGSPLTKAASTLCLENKTKDLMNLTEKLKQISSHSAYCLLRFSITTPRLIFFLRGSPMWQNCSGLQHYDEVLKNSLESLFNLHLTEKAWIESSLPIKKGGIGLRHASDIALPCFLSSMYNVSTLLNQLLHETYRQDNLVQVEAEEQWCQRFGELPEESLRSLQSAWENFEITRKLEVIHSWPNDKIDKARFLANSSEESGVWLQALPSPQLGTHLNNDEFRVATALRLGLPIVQPHKCVCGSKVDKYGRHGLSCSKASGTQPRHRNFNNLMQRGLKSAEVPCLLEPPGCSRPDGKKPDGLSLLPWTKGKSLLWDYTCADTFASSYINRTSKELGWAAKHAEEKKYEHYVDLREQFIFIPVATETSGVFGKEAIKLIKAIGSKIAEVTHEKRATSFLFQRLALSIQRGNVASILGTIPPSKNLAELFYL

SEQ ID NO: 18369 - protein, 968 aa, Bradysia odoriphaga
MPMHFGNMMYGDEDDYFCCPYCEKVKRFNSLRGLNIHIVKKHPDKNKLKLDDFEDNDCDLNAFGDADVGQRLAFLKKSVPTLRRCPKGARQDMANALTNAINQCIRTSSEYYWNKLLLFPYATMKIPNKDENVTNLTSYVRQNIREWNEKGIQIIPDLAQLSATSENNFKTNNISKKVEAKLSDGDISGALRLISSEDIIAPNNEITLDALKQKHPQHPEPSFFPDSSIDTEQVIPTDEEVNRSIVSFRKGTAGGLDSLRPQILKDLLYVQNGDTANKLLQAITSLITQVFNGKIPNEIRPYLFGASLTALQKKTGGIRPIAVGNTWRRITAKIACRRVASVLTNLYLPHQLGVGIKNGAEAGAHAARIYFTSKHKSVRVFLKIDVRNAFNELRRDILLQKVKSTIPEIYKFVELCYRDPTNVYYREHVILSQRGVQQGDPLGPALFSLVLQDIVMSLQNLDLNIWYLDDGTIGGAPDDVFNALQDIIQKARDIGLELNYEKCEISVLGTESDECKNEIYGRFNSISNGIQKMSAKNEFLLGSPLTKAASTLCLENKTKDLMNLTEKLKQLSSHSAYCLLRFSITTPRLIFFLRGSPMWQNCSELQHYDEVLKNSLESLFNLHLTEKAWIESSLPIKKGGIGLRHASDIALPCFLSSMYNVSTLLNQLLHETYRQDDLVQVEAEEQWCQRFGELPEESIRPLQSAWENFEITRKLEVIHSWPNDKIDKARLLANSSEESGVWLQALPSPQLGTHLNNDEFRVATALRLGLPIVQPHKCVCGSKVDKYGRHGLSCSKASGTQPRHRNFNNLMQRGLKSAEVPCLLEPPGCSRPDGKKPDGLSLLPWTKGKSLLWDYTCADTFASSYINRTSKELGWAAKHAEEKKYEHYVDLREQFIFIPVATETSGVFGKEAIKLIKAIGSKIAEVTHEKRATSFLFQRLALSIQRGNVASILGTIPPSKNLAELFYL

SEQ ID NO: 18370 - protein, 865 aa, Bradysia coprophila
MNDEHSWNRLLLFPYATLKIPSENENVTNLTSYVRDNVKLWHEKGIRTIPILPPSATNNDETNASHKRNNIFKKVEAKLSDGDVSGALRLISSDDLIAPNNEATLNELNKKHPPHPEPSNFPDSLIEIEQITPTEEEVNLSIISFRKGTAGGLDSLRPQILKDLLYVQIGDAGVKLLQALTSLITITLKGDVPKTICPYIYGASLTALQKKDGGIRPIAVGNTWRRISAKIACRRVASVLSNLFLPHQLGVGIRNGAEAGAHAARIYYGSKHTSVRVFIKIDVKNAFNELRRDALLQKVKSTIPEIYKFVEQCYRVPTNVYYREHVILSQRGVQQGDPLGPALFCLVLQDIISSLKELDLNIWYLDDGTIAGTPDSVSKALQEIISKANEIGLKLNHSKCEMSVLGTESEKIRNDLYVHFDSIAEGIQIMKIENEFLLGSPLTEAASKICLEKKIIELKNLAEKLKHISRHSAYYLLRLSVTTPCLIFFLRGAPMWKNASGLLQYDETMKNSMELLFNIKFTELAWIESSLPIKKGGIGIRHASDIALPCFLSSVYNVSDLLNGLLPEIYRQFDLAKEEAEQHWSQEFGELPEKSLRPFQSKWEAFEIARKLTLIRSSLVEKPDQARILANSSQDAGAWLQALPAPQLGTHMSNDEFRVSFALRLGLPILQPHKCVCGTKVDEFARHGLSCSKAAGTKPRHETFNNIMQRALKSAEVPCTREPPGCSAPDGKKPDGLSLVPWTRGKSLLWDYTCSDTFAQSYVNRASREIGYVAKQAEDKKLEKYDHLRDQFIFVPVSSETTGVYGKIGHKLLKQIGSKITEVTKEKRATSYLFQRLGIAIQRGNVASILGTLPPSKNLNEIFYL

SEQ ID NO: 18371 - protein, 1100 aa, Bradysia odoriphaga
MGDASGGTPRHSGVNDLILLVENTKKTYVSLHPTERRWPCPFCLTKEKTKLQCLMHVKKEHSGLAENNSTFRLQDQDEDKPPESTEAKTSAEKDLLEFLKLVNNDCEESNDDKQDQTQKNKRKTNTMQCNDMSDGHEDDDFFHCPYCEEERLFHSLRGLNVHIGKKHKNKNKITLDMLECFDFNYDYDENASTDIGHRLATLRKTTPTLRRCPKGARQDLANALANVVNQCVRLNDEQSWHKLFLFPYAVLKIPNENENVTNLTSYVRQNISLWNEHGIRMINEGSQTTQHTTAKSKNNDKKMSQIEKKVEAKLSDGDVSGALRLISSTDIMAPNNESTLLSLKQKHPPHPEPSFYPNAEVETEQIIPTEDEVHLSIVTFKKGSAGGLDSLRPQILKDVLYIKNGEAGSRVLRAVTSLAETILKGSVPQSICPYLYGASLTALQKKCGGIRPIAVGNIWRRISAKIACRRVSSVLSNLFLPRQLGVGIKNGAEAGAHAARLYYNSIHKSIRIFLKIDIRNAFNELRRDVLLHKVKDKIPEIYKFVEQCYRYPSNVYYQEHVILSQKGVQQGDPLGPALFCLVIHDIISNLQNLDLNIWYLDDGTIAGNPEDVLIAFKTIIEKAKVVGLDVNFNKCEMAILGTDRNDVELEWQRRFNSVSDGIQIMKAENEFLLGSPLTEAASILCLNKKTEDLKNLCENLKSISMHSAYFLLRMSVTIPRLIFFLRGSPMWRNKTGLLHYDDILKSSIESILNINLMDRSWKESSLPIRHGGIGIRHASDIALPCFLSSMYNVSSLLDQLLPESFRQMDLVMAEAEEQWCQKFGSLPEDSVRIYQHSWEIFEIEQKVTTIQNSLHTKEDKARFLANSCAETGAWLQALPSPQLGTHLSNDEFRVATSLRLGAAIVQPHKCVCGSKVDKFGRHGLSCAKAAGTKPKHESVNDIIQRSLKSGEVPCVREPPGCSRPDGKKPDGLTLVPWAKGKSLLWDYTCADTFAKSYVDRTSRDRGYAAKQAEDKKFEHYRHLMDQFIFVPIASETSGVIGKTGLQLLKQIGSKIKQVTHERRATSYLLQRIAVAIQRGNVASILGTLPQSKNLGEIFYL

SEQ ID NO: 18372 - protein, 924 aa, Bradysia odoriphaga
MLECFDFNYDYDENASTDIGHRLATLRKTTPTLRRCPKGARQDLANALANVVNQCVRLNDEQSWHKLFLFPYAVLKIPNENENVTNLTSYVRQNISLWNEHGIRMINEGSQTTQHTTAKSKNNDKKMSQIEKKVEAKLSDGDVSGALRLISSTDIMAPNNESTLLSLKQKHPPHPEPSFYPNAEVETEQIIPTEDEVHLSIVTFKKGSAGGLDSLRPQILKDVLYIKNGEAGSRVLRAVTSLAETILKGSVPQSICPYLYGASLTALQKKCGGIRPIAVGNIWRRISAKIACRRVSSVLSNLFLPRQLGVGIKNGAEAGAHAARLYYNSIHKSIRIFLKIDIRNAFNELRRDVLLHKVKDKIPEIYKFVEQCYRYPSNVYYQEHVILSQKGVQQGDPLGPALFCLVIHDIISNLQNLDLNIWYLDDGTIAGNPEDVLIAFKTIIEKAKVVGLDVNFNKCEMAILGTDMNDVELEWQRRFNSVSDGIQIMKAENEFLLGSPLTEAASILCLNKKTEDLKNLCENLKSISMHSAYFLLRMSVTIPRLIFFLRGSPMWRNKTGLLHYDDILKSSIESILNINLMDRSWKESSLPIRHGGIGIRHASDIALPCFLSSMYNVSSLLDQLLPESFRQMDLVMAEAEEQWCQKFGSLPEDSVRIYQHSWEIFEIEQKVTTIQNSLHTKEDKARFLANSCAETGAWLQALPSPQLGTHLSNDEFRVATSLRLGAAIVQPHKCVCGSKVDKFGRHGLSCAKAAGTKPKHESVNDIIQRSLKSGEVPCVREPPGCSRPDGKKPDGLTLVPWAKGKSLLWDYTCADTFAKSFVDRTSRDRGYAAKQAEDKKFEHYRHLMDQFIFVPIASETSGVIGKTGLQLLKQIGSKIKQVTHERRATSYLLQRIAVAIQRGNVASILGTLPPSKNLGEIFYL

SEQ ID NO: 18373 - protein, 873 aa, Pissodes strobi
MEEIKEQMYTKYNIKTQRDYAQTIEKLKQQIAAKAQRAMRYTKRSLQFQQNKLYQENTSKFYANILGKTHETNETPEQEVKDYWKQIWEKDTVHNRDADWIQAEYESTSRVKRMEWSNISQAEVVAALSSTSNWKAPGPDGIPNFWLKKLTAMHDKLTTLYNELVSGKQNLPEWITKGKTYLIPKIDKVIHPKDMRPITCLKNCYKLLTKIIAERIQHHLTQNNIIPNEQKGCIKNTYGCKDHLLTSMMLNKDCRDNKKSLSIAWTDYKKAFDSVPHSWLAESLNIYRINTTLLSFITKSMGTWKTDLNLKANDKIVTIKDIHIRNGIYQGDSLSPLLFCMSLYPLSSLLSKTKTGYICKNEKQRIHHLLYVDDLKLIAKSDEELLEQIQNVIKMEFGLGKCAKATFQKGKLVRSEHIELDYDTTIRALDQQEAYKYLGIEENDGIQHKRMKTKLTKEYTRRIRSILNTELNSKNKISAINSLAVPVIQYSYGIIKWTLAELRKMDTKTRKQMTIHGALHPRADVDRLYIPRKNGGRGMISIQTSHIIAMEGLNNYLKIKEKDKYLCMVYRQNQKHIEKQRQKNSCQDKIEDTNPAESETKRVKIIKERLKEHMRQEQLEKWKEKKMHGQIALEAEKDTVNKNQSWKWLTTANLKTETEALVTACQEQALATNYMKFRIMKSGKDPKCRLCRTRNETTHHVVSGCPILAKKAYLDRHNLVAAHLHYNICKAYNVTVGEKWYEHTPDPVVNTQDVTIIWNTQVQTDRCIKANKPDIIIKDKKQRTCQLIDVAIPSDYNITQKEAEKYLKYKDLQIEAQRLWNLKTTIVPIVIGATGLVSYKTCEAIQQIPGEHNLISLQKSVVLRTAHIIRKVL

SEQ ID NO: 18374 - protein, 1063 aa, Pissodes strobi
MRQVKEEYTPNEQRDNEEQTIKEHDSHENKMEDQIGKMTNEPYGHEQQQQQENESENSEKDKMKYEIIQRMKSDQNTEEIRREPLLKLNNGEKANIKIKLVNIALQEILNEEPDEYNNITKLNKLTYAAAETAQNILIPKRDPKKKAKATNPPWKARIEFKIKKLRKDLSQLKECSKPQLSKHMEEIKEQMYTKYNIKTQRDYAQTIEKLKQQIAAKAQRAMRYTKRSLQFQQNKLYQENTSKFYANILGKTHETNETPSEEEVKDYWKQIWEKDTVHNRDAEWIQAEYESTSRVKRMEWSNINQAEVVAALSSTSNWKAPGPDGIPNFWLKKLTAMHDKLTTLYNELVSGKQNLPEWITKGKTYLIPKIDKAIHPKDMRPITCLNNCYKLLTKIIAERIQHHLTQNNLIPNEQKGCIKNTYGCKDHLLTSMMLNKDCRDNKKSLSIAWIDYKKASDSVPHSWLAESLNIYRINTTLLSFITKSMGTWKTDLNLKANDKIVTIKDIHIRNGIYQGDSLSPLLFCMSLYPLCSLLSKTKTGYICKNEKQRIHHLLYVDDLKLIAKSDEELLEQIQNVKNFSDDIKMEFGLGKCAKATFQKGKLVRSEHIELDYDTTRRALDQQEAYKYLGIEENDGIQHKRMKTKLTKEYTRRIRSILNTELNSKNKISAINSLAVPVIQYSYGIIKLTLAELRKMDTKTRKQMTIHGALHPRADVDRLYIPRKNGGRGMISIQTSHIIAIEGLNNYLKIKEKDKYLCMVYRQNQKHIEKQRQKNSCQDKIEDTNPAESETKRVKIIKERLKEHMRQEQLEKWKEKKMHGQIALEAEKETVNKNQSWKWLTTANLKTETEALVTACQEQALATNYMKFRIMKSGKDPKCRLCRTHNETTHHVLSGCPILAKKAYLDRHNFVAAHLHYNICKAYNVTVGEKWYEHTPDPVVNTQDVTIIWDTQVQTDRCIKANKPDIIIKDKKQRTCQLIDVAIPSDYNITQKEAEKYLKYKDLQIEAQRLWNLKTTIVPIVIGATGLVSYKTCEAIQQIPGEHNLISLQKSVVLSTAHIIRKVL

SEQ ID NO: 18375 - protein, 880 aa, Pissodes strobi
MEEIKEQMYTKYNIKTQRDYAQTIEKLKQQIAAKAQRAMRYTKRSLQFQQNKLYQENTSKFYANILGKTHETNETPSEEEVKDYWKQIWEKDTVHNRDAEWIQAEYESTSRVKRMEWSNITQAEVVAALSSTSNWKAPGPDGIPNFWLKKLTAMHDKLTTLYNELVSGKQNLPEWITKGKTYLIPKTDKAIHPKDMRPITCLNNCYKLLTKIIAERIQHHLTQNNLIPNEQKGCIKKTYGCKDHLLTSMMLNKDCRDNKNSLSIAWIDYKKAFDSVPHSWLAESLNIYRINTTLLSFITKSMGTWKTDLNLKANDKIVTIKDIHIRNRIYQGDSLSPLLFCMSLYPLSSLLSKTKTGYICKNEKQRIHHLLYVDDLKLIAKSDEELLEQIQNVKHFSDDIKMEFGLGKCAKATFQKGKLVRSEHIELDYDTTIRALDQQEAYKYLGIEENDGIQHKRMKTKLTKEYTRRIRSILNTELNSKNKISAINSLAVPVIQYSYGIIKWTLAELRKMDTKTRKQMTIHGALHPRADVDRLYIPRKNGGRGMISIQTSHIIAIEGLNNYLKIKEKDKYLCMVYRQNQKHIEKQRQKNSCQDKIEDTNPAESETKRVKIIKERLKEHMRQEQLEKWKEKKMHGQIALEAEKETVNKNQSWKWLTTASLKTETEALVTACQEQALATNYMKFRIMKSGKDPKCRLCRTHNETTHHVVSGCPILAKKAYLDRHNFVAAHLHYNICKAYNVTVGEKWYEHTPDPVVNTQDVTIIWDTQVQTDRCIKANKPDIIIKDKKQRTCQLIDVAIPSDYNITQKEAEKYLKYKDLQIEAQRLWNLKTTIVPIVIGATGLVSYKTCEAIQQIPGEHNLISLLKSVVLSTAHIIRKVL

SEQ ID NO: 18376 - protein, 1122 aa, Pissodes strobi
MVPLLYSRKTDTANLKDTFALWEKRNPNPKHKLNPNTLATQRRFILNKNKLPTEVLDKIMRQVKEEYTPNEQRDNEEQTIKEHDSHENKMEDQIGKMTNEPYGHEQQQQQENESENSEKDKMKYEIIQRMKSDQNTEEIRREPLLKLNNGEKANIKIKLVNIALQEILNEEPDEYNNITKLNKLTYAAAETAQNILIPKRDPKKKAKATNPPWKARIEFKIKKLRKDLSQLKECSKPQLSKHMEEIKEQMYTKYNIKTQRDYAQTIEKLKQQIAAKAQRAMRYTKRSLQFQQNKLYQENTSKFYANILGKTHETNETPSEEEVKDYWKQIWEKDIVHNRDAEWIQAEYESTSRVKRMEWSNITQAEVVAALSSTSNWKAPGPDGIPNFWLKKLTAMHDKLTTLYNELVSGKQNLPEWITKGKTYLIPKIDKAIHPKDMRPITCLNICYKLLTKIIAERIQHHLTQNNLIPNEQKGCIKNTYGCKDHLLTSMMLNKDCRDNKKSLSIAWIDYKKAFDSVPHSWLAESLNIYRINTTLLSFITKSMGTWKTDLNLRANDKIVTIKDIHIRNGIYQGDSLSPLLFCMSLYPLSSLLSKTKTGYICKNEKQRIHHLLYVDDLKLIAKSDEELLEQIQNVKNFSDDIKMEFGLGKCAKATFQKGKLVRSEHIELDYDTTIRALDQQEAYKYLGIEENDGIQHKRMKTKLTKEYTRRIRSILNTELNSKNKISAINSLAVPVIQYSYGIIKWTLAELRKMDTKTRKQMTIHGALHPRADVDRLYIPRKNGGRGMISIQTSHIIAMEGLNNYLKIKEKDKYLCMVYRQNQKHIEKQRQKNSCQDKIEDTNPAESETKKVKIIKERLKEHMRQEQLEKWKEKKMHGQIALEAEKETVNKNQSWKWLTTANLNTETEALVTACQEQALATNYMRFRIKKSGKDPKCRLCRTHNETTHHVVSGCPILAKKAYLDRHNFVAAHLHYNICKAYNVTVGEKWYEHTPDPVVNTQDVTIIWDTQVQTDRCIKANKPDIIIKDKKQRTCQLIDVAIPSDYNITQKEAEKYLKYKDLQIEAQRLWNLKTTIVPIVIGATGLVSYKTCEAIQQIPGEHNLISLQKSVVLSTAHIIRKVL

SEQ ID NO: 18377 - protein, 1070 aa, Pissodes strobi
MSLVRFKGIFENNNNNNNNNNIGQTIKEHDSHENKMEDHIGKMTNEPYGHEQQQQQENESENSEKDKMKYEIIQIMKSDQNTEEIRREPLLKLNNGEKANIKIKLVNIALQEILNEEPDEYNNITKLNKLTYAAAETAQNILIPKRDSKKKAKATNPPWKTRIEFKIKKLRKDLSQLKECSKPQLSKHMEEIKEQMYTKYNIKTQRDYAQTIEKLKQQIAAKAQRAMRYTKRSLQFQQNKLYQENTSKFYANILGKTHETNETPSEEEVKDYWKQIWEKDTVHNRDAEWIQAEYESTSRVKRMEWSNITQAEVVAALSSTSNWKAPGPDGIPNFWLKKLTAMHDKLTTLYNELVSGKQNLPEWITKGKTYLIPKIDKAIHPKDMRPITCLNNCYKLLTKIIAERIQHHLTQNNLIPNEQKGCIKNTYGCKDHLLTSMMLNKDCRDNKKSLSIAWIDYKKAFDSVPHSWLAESLNIYRINTTLLSFITKSMGTWKTDLNLKANDKIVTIKDIHIRNGIYQGDSLSPLLFCMSLYFLSSLLSKTKTGYICKNEKQRIHHLLYVDDLKLIAKSDEELLDQIQNVKNFSDDIKMEFGLGKCAKATFQKGKLVRSEHIELDYDTTIRALDQQEAYKYLGIEENDGIQHKRMKTKLTKEYTRRIRSILNTELNSKNKISAINSLAVPVIQYSYGIIKWTLAELRKMDTKTRKQMTIHGALHPRADVDRLYIPRKNGGRGMISIQTSHIIAIDGLNNYLKIKEKDKYLCMVYRQNQKHIEKQRQKNSCQDKIEDTNPAESETKRVKIIKERLKEHMRQEQLEKWKEKKMHGQIALEAEKETVNKSQSWKWLTTASLKTETEALVTACQEQALATNYMKFRIMKSGKDPKCRLCRTHNETTHHVVSRCPILAKKAYLDRHNFVAAHLHYICKAYNVTVGEKWYEHTPDPVVNTQDVTIIWDTQVQTDRCIKANKPDIIIKDKKQRTCQLIDVAIPSDYNITQKEAEKYLKYKDLQIEAPRLWNLKTTIVPIVIGATGLVSYKTCEAIQQIPGEHNLILLQKSVVQVVLSTAHIIRKVL

SEQ ID NO: 18378 - protein, 899 aa, Callosobruchus maculatus
MVGTGDLSGRSTAEAPHAPRAVLPPIPQHHSAPQVHLNSTFVEYLRNVRCGLNHPEHGEIKRVIDMALLGSTEQLVIALDHWVESKFKRKRQNHNSKRGQRNTNRHYNQAKGGSGKRASEYKKAQDLYAKNRSGLAEIVLEGRSTYESPELPSLGEVEDLFGGIWESGAVTDDDAISDPKVAKNATFFPISSDDVGAWKAHWQPSAPGPDGITVTDVKKFDNLELSIVFTVVFGSKIHPTSWKQSRTVLVPKDGDRRRAGNYRPITIGSALQRLLHRIVQGRIGEAVRLNHHQRGFVRMDGALANCLILDHYIGSRKDAGKSYNVLSVDLRKAFDSVHHSSILRGLERAGLEGELIDYVKSTLTDCSTVIKVGADNTRRIKIQRGVKQGDPLSPLLFNVVMDELLDKLNRDWTGGSLNPDVRIAAMGFADDIVIMTDRMLELPLMLAEVELFAQQRGLALNARKCVALCAATTSGDKRPLPITRSFLSVGGDKIPQIDMVSTFKYLGLEYGTTGVNKANIPNLQVWLRNIGTAPLKPDQKLVLLRNYLIPKLQAGLQSPRLSGGMLKDVDRHVRGAVKRFLHLATHTSDAAIHAKISDGGLGIPELRGVVPQILLKRITKLLLETGDEAVSCVLQSDRGLAMLSRLQNLAGDVPAEQVWREAIASGPSTSGMQYASEDAASRSWLQTRPSGWSGRDFVRAVQLRSANLPTNGLPYKPTEQRFCRNPGCKSVETLSHVLQKCDLAHEERVRRHNEIARKIATHARTKWQVEEEPHVRHPDQQLYKPDIVVHMEGGRTVVTDIQVSWEGKDGLGTAWQRKKLVYGNDKFVEAARLRWPGRSFEFLPIIIGARGIWPRCNEPTASALGLTKQLKESCVHSALKWGSSIHATFMRRAMAIEAR

SEQ ID NO: 18379 - protein, 1128 aa, Callosobruchus maculatus
MPEPEVLQIMAAIEAQYPTGKGFRARMAEATGLTIDQVRHKRDKPEYLKYLDIAKRKLVASRIRVFTTPSASNRTNSSAGVRAQVPTGSDSSSEQPASRICKAIPQTSASPLLHEANAGQKRTRESCSPRDLNPAKRTLKSATINQFFGHCPDKKGATCLVGATDSNGARGNQGNKRKRSIGDSPIQNKSKEPGSKIASPSDHPDVEIVPSVVPQSPRVSADATIGACDLSGRSTAVASHAPEAVLPQIPLSPPAPQVKLNSTFVEYLREVRCGLNTPEHGEIRRVIDMALLGSTKQLADALDRWVGLRFRKRKRNTNTTRGRKNTDRHYNQAKGGHGARAAGYKKAQDLYAKNRSSLAETVLEGRSMHESPELPSLGEVEALFGGIWESEPVCDNEIISDPKPAERSTFRPITPDDVSTWKADWQNSAPGPDGITVADVKAFDNKELSIVFTIILGSKIHPTTWKESRTILVPKDGDRKRANNYRPITIGSSLQRLMHRIVQGRIGEAVRLNHHQRGFVKMDGTLANIMILDHYIGSRKEAGKNYNVLSVDLRKAFDSVHHSSILRALNRVGLEEEMVEYIQSTMLDSSTSIKVGTEFTRRINIKRGVKQGDPISPLLFNIVMDELLEKLNRDWAGGSLSSDQRVAAMGFADDIVIMTDRMNDLPLMLEEIKSFAENRGLALNARKCVALCAVTTSGDKRPLPMTRSFLTIKGEKIPQMDMVSTFKYLGQYYGATGINKANVPNLQVWLRNIETSPLKPDQKLTLLRQYLIPKLQHGLQSTRLSGGMLKDVDRLVRGAVKRFLHLATHTSDAAIHAKIKDGGLGIPELRRVVPQILLKRITKLLLETGDEVVSCVLQSDRGLAILRRLQNLAGEVPAEQLWKEALASQPSTAGMQYASEDAASRSWLQTRPSGWSGRDFVRAVQLRSNNLPTNGLPYKPANLRGCRNPGCKTVETLSHVLQKCDLVHEERIRRHNEIAKKIATHARSKWQVEEEPHVRHPDQQLYKPDIVVHLDGGRTVVADIQVSWEVSEGLGQAWQRKRLVYGNDKFVEAARLRWPGRTFEFLPIIIGARGIWPRCNEPTERALGLTKQLKDSCVHSALKWGSSMHATFMRRARAIEAKSACSSR

SEQ ID NO: 18380 - protein, 1272 aa, Pristionchus maxplancki
MDPATVSIPYPFPADGPPCPLCRDHPTMPTHRAYSDKGGLAKHLKLCHSDCQVNLVCRVCGYEGGSTIKNLTSHRLVSPRCAAVPIPSAPLPSTTQRRPRVPPPITVPPPVTVPTRPATRTRTQSTTVPTARAPTRARAQPSTVTPLPSATVTPAAATTVPSAPSTVLVPASPTVPPEPDADPAPDPTPSPVRTPPRGPPATPPGSRTPLPQLVTTPVSLSPSLSLDSTPSPFRVGVSNRGGVSRVVTPAGLPPTSSPRRVSSDLRLVSPALSIGRALSPSPSLSGVSPARALSRSPVRSPGSARSEEDSPAGAAGGGPGDAHLSPLSSPPIRPSRSSPRIPPPRPVPLPPLQDTAMDWTRRIEDCSTMGVLEQILKDMERFVIDQRPPPDPNQPSRRPPRPGGNRPNGPRRRDTGTNRDPAAEAKEIQALWRSSRPRAFARITEDAPPHCEVPATDIHSHFMSVHSAPAHTPSPVPLPPLRAPSITDPFASPFTPNEVVARLRKATDTAPGLDTIKYSEWRKFDPSGRVFAVLFNRIREIGVPPHWKESVTVLAYKKGDRSLMTSWRPIALLPTLAKTYANVLSSRLTHWATTHGRISRSQKGFLPFKGCSEQNFLLQSCLQDARRSKKTIACAFLDLRNAFGSIAHTTIRASLEWIGLAPSSIALLEDSFLGSTTRIRTQSGLTATVPILSGVVQGSPLSPILFNISIEPVIRSAIAADPGYSMYGHATSVLCYADDMVVIAPSAEKLQRQLDAVSRLADWSGLSFNQGKCATITLRGKENTGASLTVQGQPIPSLANGEEYGYLGVPVGTNTFPSGTAALEAMTNQLTKIDSSLLSPWQKFDALRTYILPQISFHLLHGHVPKAPLNTLDKLIKKCGKRWLSVPSRAGNEILYMGFEDGGQNLMPLSLLADVATISHAASLLHSRDSTVADISLRAAKQVAIMRAKRSSITPTQLAEYLDGSVDGIYRTPTTDVNSLWTDARAATRRLQSTIKIGWYSRPGSTLFATLDGSPLAPNTTQRRLIEAIRTTYRISLEKKRDQGSSYRTPCDPAPSNSWVRDGSFLRYTDWRFIHRARLNLLPLNAARKYDPTCDRRCRRCGAPLETLNHVLSSCKPNLPAIRKRHNAIHDRLRKAIKTRPGVEVRHDQTVPGCGALRPDIVTIDSRSKSVVIVEVHVPFDNDTDCIARADEIKRVKYAGVVNHYQTAGFQVQFHTFVITALGKLGRGSQDVLKALQIPSWYSKLMVRLMIADSVKASRDVYVEHVTGQVQF

SEQ ID NO: 18381 - protein, 1276 aa, Pristionchus maxplancki
MDPATVSIPYPFPADGPPCPLCRDHPTMPTHRAYSDKGGLAKHLKLCHSDCQVNLVCRVCGYEGGSTIKNLTSHRLVSPRCAAVPIPSAPLPSTTQRRPRVPPPITVPPPVTVPTRPATRTRTQPTTVPTARAPTRARAQPSTVTPLPSATVTPAAAATVPSAPSTVLVPTSPTVPPEPEADPAPDPTPSPVRTPPRGPPATPPGSRTPLPQLVTTPVSLSPSLSLDSTPSPFRVGVSNRGGVSRVVTPAGLPPTSSPRRVSSDLRLVSPALSIGRALSPSPSLSGVSPARALSRSPDRSPGSARSEEDSPAGAAGGGRGDVSPLHPPTPRPPIRPSRSSPRIPPPRPRPVPPPPLQDTAMDWTRRIEDCSTMGVLEQIVKDMERYVIDQRPPPDPNQPTRRPPRPGGNRPNGPRRRDTGTNRDPAAEAKEIQALWRSSRPRAFARITEDAPPHCEVPATDIHSHFMSVHAAPAHTPSPVPLPALRAPPITDPFASPFSPNEVVARLRKATDTAPGLDTIKYSEWRKFDPSGRVFAVLFNRIREIGVPPHWKESVTVLAYKKGDRSLMTSWRPIALLPTLAKTYANVLSSRLTHWATTHGRISRSQKGFLPFKGCSEQNFLLQSCLQDARRSKKTIACAFLDLRNAFGSIAHTTIRASLEWIGLAPSSIALLEDSFLGSTTRIRTQSGLTATVPIQSGVVQGSPLSPILFNISIEPVIRSAIAADPGYSMYGHATSVLCYADDMVVIAPSAEKLQRQLDAVSRLADWSGLSFNQGKCATITLRGKENTGASLTVQGQPIPSLANGEEYGYLGVPVGTNTFPSGTAALEAMTNQLTKIDSSLLSPWQKFDALRTYILPQISFHLLHGHVPKAPLITLDKLIKKCGKRWLSVPSRAGNEILYMGFEDGGQNLMPLSLLADVATISHAASLLHSRDSTVADISLRAAKQVAIMRAKRSSITPTQLAEYLDGSVDGIYRTPTTDVNSLWTDARAATRRLQSTIKIGWYSRPGSTLFATLDGSPLAPNTTQRRLIEAIRTTYRTSLVKKRDQGSSYRTPCDPAPSNSWVRDGSFLRYTDWRFIHRARLNLLPLNAARKYDPTCDRRCRRCGAPLETLNHVLSSCKPNLVAIRKRHNAIHDRLRKAIKTRPGVEVRHDQTVPGCGALRPDIVTIDSRSKSVVIVEIHVPFDNDTDCIARADEIKRVKYAGVVNHYQTAGFQVQFHTFVITALGKLGRGSQDVLKALQIPSWYSKLMVRLMIADSIKASRDVYVEHVTGQVQF

SEQ ID NO: 18382 - protein, 1070 aa, Cecidostiba fungosa
MCHPTTSSFVRVGQRLRAADSRLWFLGAAGCQPVVRQSVGPVRRNMPRMVNNGRSTDRADPTHQAGVGPSASSMNNAEEFPCRAPNCDRIFPTLRGRGVHENHAHPDWYDQFKLQQGGSTKERWSEEEKRMLARREAELIMEGVRFMNQELLKTFKGRTLEAVKKQRQRQDHKDAVEEYRRELEERPDSQSDDSEDYESAEEDEPGDTPDPITAYFSSLEPLVVEGFETGRLNEVCLMIGNRGKEEIMAVMALYLREIFIQERPNRRPGNRRRQDGSGNLNSKRRRRAEYARAQDMWKKDPCQCVNRIINDQMNQEPGLPKETMQPFWKAVFTKENVSAPSLPEPIQELGALWVPIQAHEVKTAFPPNSTAPGPDGLKVKQLKQVPLAVLARIFTIFMWLGRLPQEFYLSRTVLIPKKKGAVDPGEFRPITVSSVLVRAFHKILANRLRVMVPLDDRQRAFRETDGCSDNIMLLDMTLKYHQAKHRSMYAAILDMAKAFDSVTFDALRKVLTTKGIPKAMINYILEVYNNSRTILQHGGWESDKIHPTCGVKQGDPLSPYMFNMVIDEMLKSLNSEIGVNIDGYKVNVLAFADDLILVASTQKGLQALIDQTADFLFKCGLEANANKCATLAIKSIPRQKKTAVDAACKFKIRGATIPALKRTSEWRYLGVTFTAAGRVHCNIKEKLEDQLSKLTKAPLKPQQRLWALRTIVIPGCLYQLALSEVTYGYLRSTDKLIRKHVRKWLALPHDCPNGYIHAAIEDGGLGISSVRWRAPLERLGRLTALSKSSYITGPAAGAYIEREISKVELRLKDNSNNILRSSDEIDKFWAKCLYSRYDGIPLKNSRQVIGQHKWISEFTKFLSGRDFVNSCKIRINALPTLARTSRGRVKDRNCRGGCGRVETSNHVIQQCHRTHGMRIKRHDAVCNYIAKKLNKNGYVVDKEPRINTDEGLRKPDLVATLGKTTIIVDAQVLGEQVDLETANQKKIDYYGNNKSLEDNIKRKYESDTVVTTAATFNWRGLWSKSSAAELQRRGIIRRSDLKILSSRVLIGGIACFNQFNSTTSRRQGIG

SEQ ID NO: 18383 - protein, 941 aa, Muscidifurax raptorellus
MLARREAELLNQGGVCFINQELLKTFRGRTLEAIKKQRQRVAHKAAVAEYLKELEERPASSSDDSNEYLSAEENEPNSIPDPLTTYFNTLEPLVVEGFATGKLNEICQMIGNRNKVEIMTIFALYLKDIFKQERPNRRPLMGRRHEGQEGVNSKKRRRAEYARAQDLWKKDPSQCVKRIINDQMNQEPGLPGTIMEPFWSAVFTKQSAVAPALPKGGQRLNALWAPVQAYEIKKAYPPNNTATGPDGLKVKQLKEIPTAALARIYSIFMWLGKLPEELYLSRTVLIPKKKGAVDPGDFRPITVSSVLIRAFHKILANRLKALVPLDDRQRAFRDTDGCSDNIMLLDMTLKYHRIRHKSMYAAILDMAKAFDSVTFDALKAVLTTKGLPDAMTSYVLEVYNNSRTILQHGGWESGKIHPTCGVKQGDPLSPFIFNMVMDEMLKSLPPEIGVDIDGYKVSVLAFADDLILVASTQKGLQSLIDQTAEFLHTCGLEANANKCATLSIKSIPRQKKTAVDAACKFKIRGATIPALKRTTEWRYLGVTFSAAGRMQCNTMEKLEDQLRKLTKAPLKPQQRLWALRTIVIPGSLYQLALSEVTYGYLRSIDKLIRKYVRKWLALPHECPNGYIHAAIEDGGLGIPSIRWKAPLERLGRLSALSKSNFINGPAAGAYIEREITKVELRLKDNSNNILRSSDEINKFWASCLHSRYDGIPLKNSKQVVGQHKWVGEFTRFLSGRDFVNSCKARINALPTLARTSRGRVRDRNCRGGCGRVETSNHVIQQCHRTHGMRIKRHDAVCNYIAKKLNKNGYIVDKEPRINTDEGLRKPDLVATLGTTTIIVDAQVLGEQVDLEAANRKKIEYYGKNISLIDNIKRKYESNTVITTAATFSWRGLWSKSSAAELQRRGIILKSDLKILSSRVLIGGIACFNQFNSTTTRKKGIG

SEQ ID NO: 18384 - protein, 967 aa, Dicyema japonicum
MQKTVKEYEICTKCNIMNKRKRMIHCTACSYGFHMSCAGMTKRALAAISDWHCRSCLLPDNTTNLPTLPSEHVPLDHQEILELISNLTHTRRLLIRIPKAARISVADCLCECIERAVSSDDSDDWVRLFCFAPFTLCIPHRRGKEEKSLTSLVKENVHTFFSKNLLANSEKLTYKFQNHEKPTSTISDTQRLRSAIRRKLSEGGIRAAVRILADQQCIIEPSEQSYASLVERHPSLPNDHRVPPCPGQLPNLLVSEEDVKDGILSFVPSSSGGLDGLRPGHIKDLIAHNTGNSGVRLVLAITKLMNRMLSGTLPETIRHVMFSAKLIAFDKKGGGIRPIAVGMVFRRLASKLVCRAILPTLITQLQPTQIGVGTPGGCEAAVHAVRTFTEKNVNIPHVIVKIDIKNAFNSIRRDTILEDCFTYYPSVYSYIHSSYGKPSSLVHGQYYIPSSSGVQQGDPLGPALFSLGIARITGYCSTPLRVWYLDDCTMGGHPKDVLDCLKSLIVQLESLCLTLNTNKCEVTNFGFPQSEWDLILGMFREIIPKATETKSEQLEILGCPLTDAGISNTLRTKEHQLKTTFRRLEMLDAHTSLFLLRNALSAQKLNYVLRGAPCYLKMQQLDAIDSLFRSTIERITNVKFDDQGWDQATLPVSLGGLGIPSTKDLACPAYLSSLGSSRLLVRMILQLQTESSEITEMEHLKGMMPEQKDRYRTICEDKYERLLNQSNQHRRACLVTGRCESSGAWINALPVGSVGTHLDDDTVRIGISTRLGLEICRTHKCRCGATVDCYGLHALSCRRSAGRFPRHKAINGIVKRALESAGYPAILEPVGLDRGDGKRPDGITIFPFEEGKPLVWDATCVDTLCPSNIVGSAVDTLYSAEKTMMAKEKKYEALRDRFAFYPIVVETTGGISGKSLRFLKKLGRLATLKSHDARETRWLLQLISVAIVRGNATSIMSAGSTLDGWQF

SEQ ID NO: 18385 - protein, 957 aa, Rhinocypha anisoptera
MNPNLTELTNHRVNFLVTASCPTSCKTLIECDHFESIVIIPKRIQEERRPHQWQCLRCPENPKSCNQLVRHLLTAHNITSSFLCNICLRNNFRSLVHIIAHMKTCDQNPTYPPDMPIPSRPPRQLLPIIPNLNHLLDSLEPSKFKNIAQNTLNGTDQLENLVSELNHLCKSITAQSNKTARKRRNNRHRNNHINSNRLPPNIQQQYDRNQYLWYNDRSKCYSNIMNGEHHSNLDPQEAITYFVNLFGNPGNCTAKFYCTKPAQSISLIHFINPYEIEIYLNDKTSSAPGPDEITAKTLLSFTTELAIILNLCLLFRKIPFTWKTSRTILVPKSDSDQLCDHRPLSITPMAYRAFAAILAQTLYNQCDLHCAQHGFIQKDGIHEAITTVKYMTNRAIPLASIDLAKAFDSVPHVTLLKACKANGLDSDSLKLINRIYKDTKTTINVNGHCSEPITIKRGVRQGDPLSPILFNLTMDQLLRHIYSNNLGPLIGTRPLPAIAYADDLILFAKTQNELAQIYNLTTIRLENLGFQINRQKSFTLHANIGLEVRNRLNYLGVEIMKDDRLSLWDVQSPLIKLHQAVLRGNQKVYFLRHHLLPSFYHRMVHEKTTARTLNAINAMVRSYVRKWTHLPPTTNSSFIHLNPANGGMGIPDLRLRIPWISRQRLLRLRNNQNWFIQHITATQWFKSELNRVHRLCPFIEPQKWHLNNITKFNPAHLNFVIGGASLINRQLRGDQLLQGGQYYHFLQIRSSIDYWSSNRNRPDSCRLCPDNPTPATLHHLLSACPNNQHAFRERHDLIVNHIYRQLNNRGYLVLREHRLANGLRPDLIVRTPQNKIYCLDISICYELTRHSLLIADLIKRNKYRPFRREIINLITRDQLPWNRPNYVRFYGIIFGCRGSIHNVTLNLLRHHFKLPKYLIEQFQSIILWKSMKMLRPFPANMTNQRPTRITSTTNTAV

SEQ ID NO: 18386 - protein, 968 aa, Graphium evemon
MDFSTDTALHLYSPPSLVHENSTQSNYHRQTEPSNNSSSQQISLTTHRVNFQATGFCTTSCSNLLDCNHYRSLILIPKPIYKERRPYQWQCLRCPLNPKSCLKLAQHMESDHDVRISYLCNMCLRDDFQSFVQITAHMKSCNRNYTDIPEEPRLPHPTRPLFPILPLLQKDIDALEPSLFKNTAINLLNGNNSIDDLVLELNDLCKPTPARQTRPPRRPRNTRNRPNNSLSIQQQFDRNQYWWHNDRHKCYSIIMNGEHQSNPVIQEAESYYTDLFGTPGSCSARMFCTQPAQSISFRYYISPGEISTYLKDKLNSAPGPDEISAKDILPFSIHLACLLNCCLLLSKIPSTWHTSRTILVPKSNSDQLADHRPLSITSIAYRTLAAILARTLSEQIRLNCAQRGFIREDGIHEAITIVRYMSTRGTPIASIDLAKAFDSVPHETLLKACKANGLDPASLNLIHHIYKHAKTTINTNGYQTRPIRIRRGVRQGDPLSPILFNLTMDQLLRHLNYHHLGVQIQNRPLPAIAYADDLILFADTPSELAELYDITVMTLEDLGLQINRQKSHTVHANIGLQVKDSLNYLGVEIMPENRLSIWEFHSALIKLHQAVLRGNQKVYFLRHHLLPSFYHRMTHEKTIARTLNSINSLVRTYVRKWTHLPLTTNSSFIHLKPGNGGMGIPDIRLQIPWTTRQRLLRLTHSPAWYTKYITTTRWFKNELNRIHRLCPEIPPQKWHLNNIVKFNPGHLNFLVGGANMINRHLRGDQLLHGRRYYRFLQLRSSIDHWSSGHRRPNPCHRCPDNPAPATLHHLLSGCPNNQQPYHQRHDEILDKVYRHLTAKGYLVFREQTLSSGLRPDLLVRTPKNKIYCLDVSICFELTRHSLKVADLIKRNKYRSCRQEIIGLMTRDLLPWHRPTHVAFYGLIFGCRGSIHNVTLNLLLRHFCMPKWKIERLQSLVVWKSLAILRPLP

SEQ ID NO: 18387 - protein, 957 aa, Papilio phestus
MNPNLTELTNHRVNFLVTASCPTSCKTLIECDHFESIVIIPKRIQEERRPHQWQCLRCPENPKSCNQLVRHLLTAHNITSSFLCNICLRNNFRSLVHIIAHMKTCDQNPTYPPDMPIPSRPPRQLLPIIPNLNHLLDSLEPSKFKNIAQNTLNGTDQLENLVSELNHLCKSITAQSNKTARKRRNNRHRNNHINSNRLPPNIQQQYDRNQYLWYNDRSKCYSNIMNGEHHSNLDPQEAITYFVNLFGNPGNCTAKFYCTKPAQSISLIHFINPYEIEIYLNDKTSSAPGPDEITAKTLLSFTTELAIILNLCLLFRKIPFTWKTSRTILVPKSDSDQLCDHRPLSITPMAYRAFAAILAQTLYNQCDLHCAQHGFIQKDGIHEAITTVKYMTNRAIPLASIDLAKAFNSVPHVTLLKACKANGLDSDSLKLINRIYKDTKTTINVNGHCSEPITIKRGVRQGDPLSPILFNLTMDQLLRHIYSNNLGPLIGTRPLPAIAYADDLILFAKTQNELAQIYNLTTIRLENLGFQINRQKSFTLHANIGLEVRNRLNYLGVEIMKDDRLSLWDVQSALIKLHQAVLRGNQKVYFLRHHLLPSFYHRMVHEKTTARTLNAINAMVRSYVRKWTHLPPTTNSSFIHLNPANRGMGIPDLRLRIPWISRQRLLRLRNNQNWFIQHITATQWFKSELNRVHRLCPFIEPQKWHLNNITKFNPAHLNFVIGGASLINRQLRGDQLLQGGQYYHFLQIRSSIDYWSSNRNRPDSCRLCPDNPTPATLHHLLSACPNNQHAFRERHDLIVNHIYRQLNNRGYLVLREHRLANGLRPDLIVRTPQNKIYCLDISICYELTRHSLLIADLIKRNKYRPFRREIINLITRDQLPWNRPNYVRFYGIIFGCRGSIHNVTLNLLRHHFKLPKYLIEQFQSIILWKSMKMLRPFPANMTNQRPTRITSTTNTAV

SEQ ID NO: 18388 - protein, 1335 aa, Hirudo medicinalis
MMFDGLTKSWFISVPFDGNEKICCRCPDHAPFSDHNALVKHLRFVHKASSVLFKCQLCSSSFVLLKKANRHLAKIHSDQRCPDKGSSGLSVHGRKQIVSGKRSGSPSSDGDDQISVDFPSTSGIPRLAPQVVDATVHVGSNLNPATPLTGARVLRLADKPVPIPKCQEGISVELQEEIFPIQVCPVMPQEVPVLRLTDQPVLQFNTRNANSLQAPVLPDDTVYRDARPVRPSRGPRRARVGVFPQLDDPLPHQLDWIAKLDCCTTSGEVEDLALDLVLSIRAVVEEKSKAFSPLPFSNKPDVDVSQAAKRIQKIYRENKRSAYREVTSIRGPRCELDGVTLSNHLGLDSSPPAFVPLPPSNISLAEPEAAPASSSSSSPPLFNPLAQPFSSSEVWAKLQKTSNSAPGPDRIRYLHLQKFDPGSYILSSLFNKVIEFSIIPASWKVSKTILIHKAGPTEEAGNWRPISLLNTSYKLFCACVARRLLTWCISANVLAPQQKGFMPSEGCLEHNFVLQSLIQDSKRSKKDLAVAWLDLSNAFGSVPFEVIFNALEAKGLHPFFIGLIQQMYLGSTTQLALSSGLSEVKYILKGVKQGCPLSPLIFNLAVDDLVRSVSTLAMDFGYSAYDQSHAILAYADDWTVVANSERNLQHLLDGLQNEANAKFLKFNPSKCASLHLKRGRVSLTSFSIQGSQIRTCSSIDQFKHLGIPTGFRSYIDLGDKVAEMRQELLALDASLLAPWQKANASSTFLLSKISFFLKSGFVKKEQLGGFDGLLKSLAKGWLNLENNASPEILYISNKMGGLGLIPLTILADIVVVSQELKFLQCRDLSVRSLARDSARAATNIRLKKDASWLEVAAFLDGSLEGALGNRSNDIATLWSRGRINITSLKKSFQVQWSVNEVDDLVLSLDGSPLLPNMAERALKSSFRNAQLNSLKAKVLQGRFFRINGSDQISNHFLNSGSGLGFRDWRFIFRARLGLLPLNNRPWCEGNNCRNCEEPYESVGHVMSVCPPMMGLRTARHNRVVDRLVKALPVNGPKPSLNKRVPLIDSPLKPDIVLFDRSSSAMVIVDVVVCFESDLDSLDLARGEKIHKYSMLAPLLNEKGIKLEVEAFVMGSLGMTHKDNTKAMKALGIPNFKHSDLMKLAVSDVIRGSSDIYHSHVSRPHSKNFGYRRKVPSAQVISNSRSRRRVSLEVSRESRLSFASSPIQEIDRDRNRQVPLITTPVGPTLCSSNAPNESLIFSPLDPFAQEIESHPSACGTIVTFESSPVSFSPEKFNRPDGLMSKSPPLATGEVRQEFSNDQLIFSPLDPFAQEISCCSVLNLNEDSNDTIVYNDT

SEQ ID NO: 18389 - protein, 1154 aa, Catotricha subobsoleta
METNNPNPIINAVQRTRRAPDNGSASIADRSRVRGAELDGNTMTNRRDNRRSLWTDQLDNDLLSCYDASIVPNRRGYMVRLHTLWCQKHPELSHVSQQVLRNRAVNLSRTRDVRGTLPQQLQEQAAEEIQEATLRPTAETRLPLRDDGDFSTRRNVNIQVSPKPQDLAEMDATLREDLSEDADLWTITCSVYDAARALGDSNRRSKPTIDEKTKKRLHQLNKKIGWARQNASRMQCVIDYIKSGKPFTAKVRKFAHELRIHHHTLKMSKLLTIKQHIVDKIRVLSDARRRIKKREGWVRENQKFLADPSRLFSDPPVFVKNPPESEEVETFWREIYEVKHPLNEGTENIIRFKELCNNLITSERECPPITAEEVKKALRGTKNFSAAGPDCIKNFWWKKFTSTHQHLARIFTSYLKSEIPIPQWLVLGRTVLLPKKGDLSNPRNYRPITCLNTVYKIFTSILNDRIVRIIGPVWSEIYEQRGSKRGAAGCRENLLIDRSICKDAANHKRNLSMAWIDYQKAFDSTSHRLIICLLKSLKVHPDIVGCIERLMPLWKTRFTITSGKHRVTTNSVTFQRGVFQGDAMSPLLFCITLLPLSLALRDSHGYLCGGTNVREHKVTHIFYMDDLKIYASGKEHLEDALSVVGKYTREIGMDFGLDKCAKIHLKRGRIAGIDKDPELVDRSAIRHLSAGETYKYLGVPESRIQDTTSVKEVLQSRYKHLLRRVWSSNLSSLNKISATNMLAVPVLLYSFGVVPWTKSELRALDTTTRKMMHMKKSLHINSSVPRLYIARRKGGRGLLNLECLYNRIILSTVHIIANGRDPLLAMVRNHEMNGEGAFLYKAAEKAAETLGLELNIRSEDSALLHQDASLLKAQVKKAEAKNFLKQHEDKVMHGKFYRIVKEKSLSHELTFAFLKSSGLNSGTESFIFACQDGVISTLAYRRSILRQEVSSDRCRACLKLPEHLWHILSNCPIHAGTTYLYRHNAALRVLYYHLCRSYGVGRDPALPNAPRGIESIVENEECRIYWNYDFSTMAPIQHTRPDIVLLDKRDRTMFVIEFSAPADYNIKDKETEKKERYKDLREHLQRQHQGYSVKLIVLIIGALGGATPSLVSNLKAIPVCQKYAVALAGWMQRAVILGSLRVLKTHEGFAGPSL

SEQ ID NO: 18390 - protein, 1113 aa, Teleogryllus occipitalis
MNTSFTAKLESDLTAYREPLYQMVIGKYPELSTKTVQNIVDQKRSILVNKRLRESQIYQIKEEIKQELGLHQLGTEENQNLTDLTCSSNGNVRINLSETPPSDNKNELENLVKQQWEESYAEFYGSDPFQRPKMPKLQIRAKTNLILSEVDRILQYETKNIHNIELLHNFVFIGAVTVLKANGQKLILINDRKQVQPVQPPWERRLQRQIETLRKSIGRLSQTLKDNCSAKIKREAEKIMFKYKNEGNQTVITVLDQLKQTLSVKSNRLRRYRESNLRKKQNKLFQINEKQFYRSIQMDNAQEPNQGEMPDAQEVNRYWGDIWTQSKHHNFNAEWIQTVKDECEDIPMMNDHSIHIEDVKRAVKKTLNWKGTGRDNIHNFWFKNFPSIHETMAGLFTKALNNQEALPSFLTYGLTYLIPKSKIPSSDPGKYRPITCLPTLYKLLTSIITDKIYQHLEDNNILAEEQKGCKRGSQGCKEQLIIDAAVCGHVKKTGGTLYTAYIDYQKAFDSLPHSWLIDVLDMYKIDPLVVSFLKAQMQRWTTRLHICTQNNHVNAGDIHIKQGSFQGDSLSALWFCLAMNPLSTLLNKDQMGYKINSKIDHVRLSHLLYMDDLKLFSTTREKLNHLLDTTAKFSNDIGMHFGVEKCKLNALRKGKWQHQMDYTLGEGNAKHERIHAMNPEEYYKYLGYLQRSNVDQKITKSNITQEFKTRLSKILKTKLSAGRKIKAINTYVISVLTYSFGIVKWTQTELDAFNTNCRVLCTRFRCHHPKSAVERFHLPRSLGGRGVIDIVNLHHQQLERLRQYFHEKANGSKIHRIVTYIDRKITPLNLSDEKMNLQKQIQTNEMKISNWKEKQLHGRYPYQIEGELMDRKSSIKWLCLGELFAETEGFMVAIQDQVVSTKNYRKFILKDTNVRDDKCRLCGEHRENIDHIISGCSSLASSEYTKRHDDVCKVVYQQLCHNNNLLTGNLTPYYKYTPEPVIDTNNHKMYWNRSIITDRSVSSNKPDIVWHDKKNKKVYLIDVAVPLAHNIPKKRSEKILKYQPLANEIKEMWSDVEMVTIVPIVLGATGEIPKFLHESLAELHLKKGLYIQMQKIVILDTCNIVRKFLNIDG

SEQ ID NO: 18391 - protein, 1214 aa, Teleogryllus occipitalis
MEKRNLRSLGKEPLPGERQGISGAIAGGDSMRTDGGRMLTGRAPAGEPEEPTAYLRRRTQHSPSPAEPAIDVSMETQPLTTLAGKLRQKTKWTEEMNEYIVYCYLKITKLESDLTAYREPLYQMVIGKYPELSTKTVQNIVDQKRSILVNKRLRESQIYQIKEEIKQELGLHQLGTEENQNLTDLTCSSNGNVRINLSETPPSDNKNELENLVKQQWEESYAEFYGSDPFQRPKMPKLQIRAKTNLILSEVDRILQYETKNMHNIELLHNFVFIGAVTVLKANGQKLILINDRKQVQPVQPPWERRLQRQIETLRKSIGRLSQTLKDNCSAKIKREAEKIMFKYKNEGNQTVITVLDQLKQTLSVKSNRLRRYRESNLRKKQNKLFQINEKQFYRSIQMDNAQEPNQGEMPDAQEVNRYWGDIWTQSKHHNFNAEWIQTVKDECEDIPMMNDHSIHIEDVKRAVKKTLNWKGTGRDNIHNFWFKNFPSIHETMAGLFTKALNNQEALPSFLTYGLTYLIPKSKIPSSDPGKYRPITCLPTLYKLLTSIITDKIYQHLEDNNILAEEQKGCKRGSQGCKEQLIIDAAVCGHVKKTGGTLYTAYIDYQKAFDSLPHSWLIDVLDMYKIDPLVVSFLKAQMQRWTTRLHICTQNNHVNAGDIHIKQGIFQGDSLSALWFCLAMNPLSTLLNKDQMGYKINSKIDHVRLSHLLYMDDLKLFSTTREKLNHLLDTTAKFSNDIGMHFGVEKCKLNALRKGKWQHQMDYTLGEGNAKHEHIHAMNPEEYYKYLGYLQRSNVDQKITKSNITQEFKTRLSKILKTKLSAGRKIKAINTYVIPVLTYSFGIVKWTQTELDAFNTNCRVLCTRFRCHHPKSAVERFHLPRSLGGRGVIDIVNLHHQQLERLRQYFHEKANGSKIHRIVTYIDRKITPLNLSDEKMNLQKQIQTNEMKISNWKEKQLHGRYPYQIEGELMDRKSSIKWLCLGELFAETEGFMVAIQDQVVSTKNYRKFILKDTNVRDDKCRLCGEHRENIDHIISGCSSLASSEYTKRHDDVCKVVYQQLCHNNNLLTGNRTPYYKYTPEPVIDTNNHKMYWNRSIITDRSVSSNKPDIVWHDKKNKKVYLIDVAVPLAHNIPKKRSEKILKYQPLANEIKEMWSDVEMVTIVPIILGATGEIPKFLHESLAELHLKKGLYIQMQKIVILDTCNIVRKFLNIDG

SEQ ID NO: 18392 - protein, 1213 aa, Teleogryllus occipitalis
MEKRNLRSLGKEPLPGERQGISGAIAGGDSMRTDGGRMLTGRAPAGEPEEPTAYLRRRTQHSPSPAEPAIDVSMETQPLTTLAGKLRQKTKWTEEMNEYIVYCYLKITKLESDLTAYREPLYQMVIGKYPELSTKTVQNIVDQKRSILVNKRLRESQIYQIKEEIKQELGLHQLGTEENQNLTDLTCSSNGNVRINLSETPPSDNKNELENLVKQWEESYAEFYGSDPFQRPKMPKLQIRAKTNLILSEVDRILQYETKNMHNIELLHNFVFIGAVTVLKANGQKLILINDRKQVQPVQPPWERRLQRQIETLRKSIGRLSQTLKDNCSAKIKREAEKIMFKYKNEGNQTVITVLDQLKQTLSVKSNRLRRYRESNLRKKQNKLFQINEKQFYRSIQMDNAQEPNQGEMPDAQEVNRYWGDIWTQSKHHNFNAEWIQTVKDECEDIPMMNDHSIHIEDVKRAVKKTLNWKGTGRDNIHNFWFKNFPSIHETMAGLFTKALNNQEALPSFLTYGLTYLIPKSKIPSSDPGKYRPITCLPTLYKLLTSIITDKIYQHLEDNNILAEEQKGCKRGSQGCKEQLIIDAAVCGHVKKTGGTLYTAYIDYQKAFDSLPHSWLIDVLDMYKIDPLVVSFLKAQMQRWTTRLHICTQNNHVNAGDIHIKQGIFQGDSLSALWFCLAMNPLSTLLNKDQMGYKINSKIDHVRLSHLLYMDDLKLFSTTREKLNHLLDTTAKFSNDIGMHFGVEKCKLNALRKGKWQHQMDYTLGEGNAKHERIHAMNPEEYYKYLGYLQRSNVDQKITKSNITQEFKTRLSKILKTKLSAGRKIKAINTYVIPVLTYSFGIVKWTQTELDAFNTNCRVLCTRFRCHHPKSAVERFHLPRSLGGRGVIDIVNLHHQQLERLRQYFHEKANGSKIHRIVTYIDRKITPLNLSDEKMNLQKQIQTNEMKISNWKEKQLHGRYPYQIEGELMDRKSSIKWLCLGELFAETEGFMVAIQDQVVSTKNYRKFILKDTNVRDDKCRLCGEHRENIDHIISGCSSLASSEYTKRHDDVCKVVYQQLCHNNNLLTGNRTPYYKYTPEPVIDTNNHKMYWNRSIITDRSVSSNKPDIVWHDKKNKKVYLIDVAVPLAHNIPKKRSEKILKYQPLANEIKEMWSDVEMVTIVPIILGATGEIPKFLHESLAELHLKKGLYIQMQKIVILDTCNIVRKFLNIDG

SEQ ID NO: 18393 - protein, 1214 aa, Teleogryllus occipitalis
MEKRNLRSLGKEPLPGERQGISGAIAGCDSMRTDGGRMLTGRASAGEPEEPTAYLRRRTQHSPSPAEPAIDVSVETQPLTTLAGKLRQKTKWTEEMNEYIVYCYLKITKLESDLTAYREPLYQMVIGKYPELSTKTVQNIVDQKRPILVNKRLRESQIYQIKEEIKQELGLHQLGTEENQNLTDLTCSSNGNVRINLSETPPSDNKNELENLVKQQWEESYAEFYGSDPFQRPKMPKLQIRAKTNLILSEVDRILQYETKNMHNIELLHNFVFIGAVTVLKANGQKLILINDRKQVQPVQPPWERRLQRQIETLRKSIGRLSQTLKDNCSAKIKREAEKIMFKYKNEGNQTVITVLDQLKQTLSVKSNRLRRYRESNLRKKQNKLFQINEKQFYRSIQMDNAQEPNQGEIPDAQEVNRYWGDIWTQSKHHNFNAEWIQTVKDECEDIPMMNDHSIHIEDVKRAVKKTLNWKGTGRDNIHNFWFKNFPSIHETMAGLFTKALNNQEALPSFLTYGLTYLIPKSKIPSSDPGKYRPITCLPTLYKLLTSIITDKIYQHLEDNNILAEEQKGCRRGSQGCKEQLIIDAAVCGHVKKTGGTLYTAYIDYQKAFDSLPHSWLIDVLDMYKIDPLVVSFLKAQMQRWTTRLHICTQNNHVNAGDIHIKQGIFQGDSLSALWFCLAMNPLSTLLNKDQMGYKINSKIDHVRLSHLLYMDDLKLFSTTREKLNHLLDTTAKFSNDIGMHFGVEKCKLNALRKGKWQHQMDYTLGEGNAKHEHIHAMNPEEYYKYLGYLQRSNVDQKITKSNITQEFKTRLSKILKTKLSAGRKIKAINTYVIPVLTYSFGIVKWTQTELDAFNTNCRVLCTRFRCHHPKSAVERFHLPRSLGGRGVIDIVNLHHQQLERLRQYFHEKANGSKIHRIVTYIDRKITPLNLSDEKMNLQKQIQTNEMKISNWKEKQLHGRYPYQIEGELMDRKSSIKWLCLGELFAETEGFMVAIQDQVVSTKNYRKFILKDTNVRDDKCRLCGEHRENIDHIISGCSSLASSEYTKRHDDVCKVVYQQLCHNNNLLTGNRTPYYKYTPEPVIDTNNHKMYWNRSIITDRSVSSNKPDIVWHDKKNKKVYLIDVAVPLAHNIPKKRSEKILKYQPLANEIKEMWSDVEMVTIVPIILGATGEIPKFLHESLAELHLKKGLYIQMQKIVILDTCNIVRKFLNIDG

SEQ ID NO: 18394 - protein, 980 aa, Teleogryllus occipitalis
MPKLQIRAKTNLILSEVDRILQYETKNMHNIELLHNFVFIGAVTVLKANGQKLILINDRKQVQPVQPPWERRLQRQIETLRKSIGRLSQTLKDNCSAKIKREAEKIMFKYKNEGNQTVITVLDQLKQTLSVKSNRLRRYRESNLRKKQNKLFQINEKQFYRSIQMDNAQEPNQGEMPDAQEVNRYWGDIWTQSKHHNFNAEWIQTVKDECEDIPMMNDHSIHIEDVKRAVKKTLNWKGTGRDNIHNFWFKNFPSIHETMAGLFTKALNNQEALPSFLTYGLTYLIPKSKIPSSDPGKYRPITCLPTLYKLLTSIITDKIYQHLEDNNILAEEQKGCKRGAQGCKEQLIIDAAVCGHVKKTGGTLYTAYIDYQKAFDSLPHSWLIDVLDMYKIDPLVVSFLKAQMQRWTTRLHICTQNNHVNAGDIHIKQGIFQGDSLSALWFCLAMNPLSTLLNKDQMGYKINSKIDHVRLSHLLYMDDLKLFSTTREKLNHLLDTTAKFSNDIGMHFGVEKCKLNALRKGKWQHQMDYTLGEGNAKHEHIHAMNPEEYYKYLGYLQRSNVDQKITKSNITQEFKTRLSKILKTKLSAGRKIKAINTYVIPVLTYSFGIVKWTQTELDAFNTNCRVLCTRFRCHHPKSAVERFHLPRSLGGRGVIDIVNLHHQQLERLRQYFHEKANGSKIHRIVTYIDRKITPLNLSDEKMNLQKQIQTNEMKISNWKEKQLHGRYPYQIEGELMDRKSSIKWLCLGELFAETEGFMVAIQDQVVSTKNYRKFILKDTNVRDDKCRLCGEHRENIDHIISGCSSLASSEYTKRHDDVCKVVYQQLCHNNNLLTGNRTPYYKYTPEPVIDTNNHKMYWNRSIITDRSVSSNKPDIVWHDKKNKKVYLIDVAVPLAHNIPKKRSEKILKYQPLANEIKEMWSDVEMVTIVPIILGATGEIPKFLHESLAELHLKKGLYIQMQKIVILDTCNIVRKFLNIDG

SEQ ID NO: 18395 - protein, 1117 aa, Owenia fusiformis
MTDLDPSTRDTDKNRAANTDDDTETRRRCDSCGGIFKNEKGVKIHLGKTKLNCKEKLKQRIAGNTTKRAASEPEEDRGQEANHSATDFHVEVDPSQVASQVKGKETPVLERKPRLKYPPAKDAKWKELDDNLDTILESTLRGSATSKITTMTSIVFEEAEELFGVTETSRKGKRQSGPSRRQRKITSLRREMRQLRKQFRKADAEAKQGLKQLLTELHKDIIRLRQAENLRKKAREKAKARKAFFGNPFSFVSNLLGKPKNGQLQCSKTEAEESIKVAHSDPQQNTPLGECPYPLPCQEPEIPFKLSDITFQEVQDIVRHARAASAPGPSGITYRIYKNCPKLLKRLWKLIHAIWKKKEIPTCWTYAEGCFVPKEDKSSSLDQFREISLLDVEGKIFWSVVAKRMTSFLINNNYIDPSVQKGGISGYSGCIEHTSAISQLIKEAQQQKSTLAVVWLDLAKAYPNVPHQLIQTALSHYHIPEEVINLTTNHLSNMKMRFTTNSFTTAWQPLEKGIMAGCTISVILFIAAMNMLLKVGESRCKGPKAKDGTRHPCCRAFMDDITVMTQSIPGMRWILTSLEDMATWSRMQFKPKKSRSMTIVKGRPTERHTFNIQGAVIPSIQDEPIKCLGKVYDETLKDSNTTKEVCKELERWMETINKSYLLGKFKVWCFQFGVIPRLQWPFSLYEFPLSLINSMERLCNRFLRKWLGVPPSFSSCNLYSTSSKLSLPISSLVEEFKVSKVRTITTLRTSKDTKVLSAGETISTGRKWKPQQAISEAEERERHEQLVGVVCQGRLGLGNYGSKLLDKTPKGRKDRLVRQTRKAQEEERLVKAVGLSKQGSWTQWETIQDRSPTWKDLWTVDQASLSFILRAFTDLLPTPMNLNTWGLENDNTCLLCKRPRCTLNHILCSCQTALGDGRYRWRHDKVLQKIAEWVDRSRINNNEQSVPKKPMFTAFQQEGKQPTPVTKNADKSILLSALSKASDWELHVDLDRKLVFPQNIAATTLRPDMLLLSKATKTILVIELTVPWEERIDISHQLKYNKYQDLIHEAENKGWQARLYPVEVGCRGFPAVSLRSMFKDIGVHPRQLRQAMREIGAAAESCSKWLWMRRGDKWAHQ

SEQ ID NO: 18396 - protein, 966 aa, Owenia fusiformis
MTRIVFEEAEELFGVTEMSHKVKRHAGPSRRQRKITSLRREMRQLRTQFWKAGPEAKQGLKQLLTELHKDILRLRQAENLRKKAREKSRARKAFFGNPFRFVSSLLGKPKNGHLQCSKEEAEESIKAAHSDPQQNTPLGECPYPLPCPEPTIPYKLSDITFQEIQDIVKHARAASAPGPSGVTYRIYKNCPKLLKRLWKLIHAIWKKKELPTSWTYAEGCFVPKEDKSSSLDQFREISLLDVEGKIFWSVVAKRMTSFLISNNYIDPSVQKGGISGYSGCQEHTAAISQLIKEAKQQKSTLAVVWLDLAKAYPNVPHQLIQTALSHYHIPEEVINLTTNHLGNMKMRFTTRNFTTSWQPLEKGIMAGCTISVILFIAAMNMLLKVGEAQCKGPKAKDGTRHPCCRAFMDDITVMTQSIPGMRWILTSLEEMATWSRMQFKPKKSRSMTIVKGQLTQRHTFNIQGAAIPSIQDERIKCLGKVYDETLKDSNTTKEVFKELERWMETINKSHLLGKFKVWCFQFGVIPRFQWPFSLYEFPLSLVNSMERLCNRFLRKWLGVPPSFSSCNLYSTSSKLSLPISSLVEEFKVAKVRAITTLRMSKDPKVLSSGESLSTGRKWKPQQAIAEADERERHEQIVGVVCQGRLGLGNYGSKLLEKTPKAKKDRLVKQTRKAQEEERLVKAVGLSKQGNWTQWESIMERSPTWKDLWTVDQASLSFILRAFTDLLPTPTNLSTWGLENDNTCPLCKRPRCTLTHILSSCQTALSEGRYRWRHDKVLQKIAEWVDRARTHNKQLVPTKPIFTAFQLEGKQPTPRTKNTDPSIPLSSLSKASDWKLHVDLDKKLIFPQNIVATTLRPDMLLLSESSKTILVIELTVPWEERIDISHQLKYNKYQDLIHEAQSKGWQARLYPVEVGCRGFPALSLRSLFKDIGVHSSQLRRAMREIGAVSESCSRWLWIRRRDKWTHQ

SEQ ID NO: 18397 - protein, 966 aa, Owenia fusiformis
MTRIVFEEAEELFGVTEMSHKGERHAGPSRRQRKITSLRREMRQLRTQFRKAGPEAKQGLKQLLTELHKDILRLRQAENLRKKAREKSRARKAFFGNPFRFVSNLLGKPKNGQLQCSKEEAEESIKAAHSDPRQNTPLGECPYPLPCPEPTIPYKLSDITFQEIQDIVKHARAASAPGPSGVTYRIYKNCPKLLKRLWKLIHAIWKKKELPTSWTYAEGCFVPKEDKFSSLDQFREISLLDVEGKIFWSVVAKRMTSFLISNNYIDPSVQKGGISGYSGCQEHTAAISQLIKEAKQQKSTLAVVWLDLAKAYPNVPHQLIQTALSHYNIPEEVINLTTNHLSNMKMRFTTRNFTTSWQPLEKGIMAGCTISVILFIAAMNMLLKVGEAQCKGPKAKDGTRHPCCRAFMDDITVMTQSIPGMRWILTSLEEMATWSRMQFKPKKSRSMTIVKGQPTQRHTFNIQGAAIPSIQDERIKCLGKVYDETLKDSNTTKEVFKELERWMETINKSHLLGKFKVWCFQFGVIPRLQWPFSLYEFPLSLVNSMERLCNRFLRKWLGVPPSFSSCNLYSTSSKLSLPISSLVEEFKVAKVRAITTLRTSKDPKVLSSGESISTGRKWKPQQAIAEAEERERHEQIVGVVCQGRLGLGNYGSKLLEKTPKAKKDRLVKQTRKVQEEERLVKAVGLSKQGNWTQWESIMERSPTWKDLWTVDQASLSFILRAFTDLLPTPTNLSTWGLENDNTCPLCKSPRCTLTHILSSCKTALSEGRYRWRHDKVLQKIAEWVDRARTHNKQLVPTKPIFTAFQLEGKQRTPRTKNTDPSIPLSSLSKASDWKLHVDLDKKLVFPQNIVATTLRPDMLLLSESSKTILVIELTVPWGERIDISHQLKYNKYQDLIHEAQSKGWQARLYPVEVGCRGFPALSLRSLFKDIGVHSSQLRRAMREIGAVSESCSRWLWIRRRDKWTNQ

SEQ ID NO: 18398 - protein, 1115 aa, Owenia fusiformis
MDPSTCDTDKNRTANLDNDDFETRRRCDSCGGIFKNEMGVKIHLGKTKLNCKEKLKQRIAASIPKRAASEPEEDRGQEANHSATDLHVEADPSQVASRGRGKEMKVLERKPRLKYPPANDAKWKELDNNLDTILESTLKGSAPSKITTMTRIVFEEAEELFGVTEMSLKGKRHAGPSRRQRKITSLRREMRQLRKQFRKAGAEAKEGLKQLLTELHKDILRLRQAENLRKKAREKARARKAFFGNPFRFVSNLLGKPKNGQLQCSKEEAEESIKTAHSDPQQNTPLGECPYPLPCPEPDIPYKLSDITFQEIQDIVKHARAASAPGPSGVTYRIYKNCPKLLKRLWKLIHAIWKKKEVPTSWTYAEGCFVPKEDKSSSLDQFREISLLDVEGKIFWSVIAKRTTSFLISNNYIDPSVQKGGISGYSGCVEHTSAISQLIKEAQQQRSTLAVVWLDLAKAYPNVPHQLIQTALSHYHIPEEVINLTTNHLSNMKMRFTTRSFTTSWQPLEKGIMAGCTISVILFIAAMNMLLKVGESRCKGPKAKDGTRHPCCRAFMDDITVMTQSIPGMRWILTSLEDMATWSRMQFKPKKSRSLIIVKGQPSKRHTFNIQGAAIPSIQDERIKCLGKFYDETLKDSNTTKEVYKELERWMETINKSYLLGKFKVWCFQFGVIPRLQWPFSLYEFPVSLVNSMERLCNRFLRKWLGVPPSFSSCNLYSTSSKLSLPISSLVEEFKVSKVRAITTLRTSKDSKVLSTGESIATGRKWKPQQAISDAEERERHEQIVGVVCQGRLGLGNYGSKLLDKTPKAKKDRLVKQIRRAEEEERLVKAVGLSKQGNWTQWETIMDMSPTWKDLWAIDQGSLSFILRAFTDLLPTPMNLNTWGLENDNSCPLCKRPRCTLTHILSSCTTALSEGRYRWRHDKVLKKIAEWVDRSRTTNNKQSVPQTPMFIAFQQEGKQPTPRTKKTDPSIPLSALSKASDWELHVDLDKKLVFPQNIVATTLRPDMLLVSKSSKTILVIELTVPWEERIDISHQLKYSKYQDLILEAQSKGWQARLYPVEVGCRGFPALSLRSLLKDVGVHPIQLRRAMREIGAVSESCSRWLWIRRRDKWSHQ

SEQ ID NO: 18399 - protein, 1241 aa, Melanis pixe
MFCYFLAKAEGVGYISRLEYHFKTRNTDNPKVHRFNGNTLSNQARSIINRNLISTEVLNEIKMAAENSLNPINAQELNENVNLDQIQITNFNANIDTQHIPFHSADAIPSQDIRHINTQTLNTHPIEDTQQTNSHTSDTYNTQDRIHLIDHISSILSDLEAASARTQFIVEDQEPLIVNFLQILAETREINLENRQILPKFFQNLGIINSFLPNILKESDTLTDINNVIYAAAKTLIIENNQKPYTITNNKKTSKKEPPWKVRLQIKVEHLRKELGRLLEIRNGVATRRMRNIRDKFFDKYSIFGEQDRDNTIEIHKQKVKATAARLKRYEDMDNRKQQNLMFKENQHKFYTRLTEKQTTSIEIPSKSTIEEFWSSILSRPMTYNKNAQWIKDIEHTTLSYNETDFDITEEKVQGAINKTANWKAPGLDKIQNFYLKYLKNTHVYLAKLFEKMLTGEEVPPYWFTTRHVVLIPKYSNTGDPANWRPIACLPTMYKLLTTILASQLDTHCRNNDIIFPEQRGCRKHARGCKDHLMINKAILEDAHLAQKNLSMGWIDYRKAFNSISHDWLVKILDLYKCPNKIKSFINIMMPKWNVFMTAHGNDQTVTTDNISIRRGIFQGDSLSPILFCLAINPLSQILNKYETKGYKLKDSIWINHLLYMDDLKIYANSRNNLQILLESIEIFTKDIGMSFGFHKCNVLHLTAGKRSACQGEGHVLLSGEQFKTLQINQTYKYLGVNEAGTINHGELRQSVQKQYLKRVKCLAESHLNSRNLIRAINSFAVPVLLYSFGIINFKQRDLHNIDIKTRKILTLNKAHQQKSEIERLYLPIHEGGRGLINSETIYKTQIIKYRNYLRQERDDLIKAIVQHDRNKDKYSIFTEAQSNLLEIGLTTETNHTDIELKKAVTEFKTEKWKSKPLHGQFHRAILQKSNTDKITSFQWLKKQSISPTLEASIFAIQDQAVMTKQHERDILKKAVDGKCRLCLIKDETIQHIISGCEKLAGTHYTKRHNNIVQYVFWTIAKKHNFEVSNLWWKETLDRPQVRENNEAKLMWEMSVQTDLTVPNNRPDIIYIDKIINHTYLIDVTIPSDYNIGPKEIEKLSKYNLLKHEITRLWKTKTSIIPIVVGTTGVVNKSLKRYCDTLNSNITIMQAAIHTSIILAKVLGDTIFFALPKKQMSQQESITHSTQHLNTQNLMQLPTTQNSPQSSITQNTQQLSASQNTPQMSITQVTIQSSSTQSEEM

SEQ ID NO: 18400 - protein, 919 aa, Apodemia mejicanus
MQRKIQNIRRELGRLIEIRNGVTTRRMINIREKLFNKYNIFSDQDTDNTIEILKQKVKAVAARLKRYEDINNRKQQNILFKENQHNFFRNLTQNQPQANEVPSKSTIEEFWSNILSKPISYNKNSYWIKELENKYSYFTNHDFDISKDMIENAVGKISNWKAPGIDKIQNFYLKYLSNTHEYLAKVFNRILAGEEEPQDWFTTGHVILIPKSNITADPSHWRPIACLSSIYKLLTSILASQLNVHCQNNNIMAMEQRGCKKQARGCKDHLMVNKAILEDAHQSQKNLSVAWVDYKKAFDSISHEWLLKVLDMYRCPNKIKYFLEIMMPKWSVVMTARGTAGTITTDTIHIRRGIFQGDSLSPLLFCLALNPLSEILNKYKTKGYKLKDSLFVNHLLYMDDLKLYANNRNNLRILLDSSEIFTKDIGMNFGFSKCNVLHLTAGRRSECQGDGHVLLSGEQFKVLEKGQSYKYLGINEAGTIDHNNLRQQVQKEYLHRVKCLAKTRLNSRNLIKAINLYATPILIYSFGIINFKTRDLQSIDIKTRKILTLYKAHRQKAEIERLYLPIASGGRGLINIEMLYKTQIIKYKRYLEQGMDDLIIAIAQHDRNREKYSIFKETYDNLDEIGLAPEEIHTDTEIKKAVIQLKIERWKSKPLHGQFYKSIFLKSNTDRIISFQWLKEKPISPTLEASIFAIQDQAIITKQHERDILNKAIDGKCRLCSVKDETVQHIISGCEKLAGTYYTKRHNNIVQYIFWTIAKKHQFEVTNQWWKETLNGPQVRENSEAKIMWEMPVQTDLTVPNNRPDIIYTDKHKNHTYLIDVTIPSDYNIGPKEIEKLSKYSLLKHEISRLWKTKTLIIPIVIGATGIVNKSIKRYCDILDSGINISIMQKQAAIHTSIILFKVLGDNIFVSGETEIPSP

SEQ ID NO: 18401 - protein, 1381 aa, Calephelis perditalis
MSSNEESRLGPLPGGNRQGTSGADAGRDSMWTVSGMQLNRRAAAGEPEDTTAEHTVFTNAALQSEAMPTSSAGTLEETTTSLRFNDSRRKWSTQEQHELMFCYFLAKAEGVGYISRLEHLFKSRNINNPKVQRFNGNTLSNQARSIINRNLISVEVLNEIKAAAERSINSTNTQELSENINIESIVNTNTQHIQTETNNTQYTHHVYTQTPNTDITLLEDIHILDNHTTQEGRTSIGDIRHILSDLELHSNTAHFVVEEQEPLIVEFLQILADTKETNIENRQSLPKPKFNKTFFKNLTIINNFLPNIFKETDTLIDINNIIYASAKTLIIENKQKPYTITHNKIKGERQPPWKIRLQNKIQCLRKELGRLIEIRNGVTTRRMENIRESLFYKYSIFCERDLDNTIENLKQKIKATAARLKRYEDISNRKQQNGMFKENQHKFFTSLSEKHTTSLEIPTKAAIEEFWSSILSKPKTYNKNAYWIKDLENNSNNLTETDFEINEQIVQDAIKKTLNWKAPGLDKIPNFYLKYLTNTHEHLAKLYNKILTGEEEPPSWFTTGHVVLIPKDNNTSDPANWRPIACLSTMYKLLTNILATQLDIHCQNNSIIASEQRGCRKQARGCKDHLMINKAILEDAHYSQKNLSMGWIDYRKAFDSISHDWLMKILDVYRCPNKIKSFLEIMMPRWSVVMTARGTTDTVTTDIIPIRRGIFQGDSLSPILFCLAVNPLSHVLAKYETKGYKLKDSIWVNHLLYMDDLKIYSNSRHNLQIILDSTEIFTRDIGMSFGFNKCNVLHLTAGKRSACQGDGHVLLTGEQFKVLEKHATYKYLGVNEAGNIDHNELRQQIQKEYVRRVKCLAESHLNSRNLIGAINSFAIPVLLYSFGVINFKTRDVQNIDIKTRKILALNKAHQQKSEVERLYLPINEGGRGLINVEMLYKTQIIKYKNYLERERDDLIRAIAQHDRNRDKYSIFKEAQINLAEIGLTSEHNYTDIDLKKAVAKFKIEKWKSKPLHGQFYRAILSKNDTDKITSFHWLKEKPLSPSLEASIFAIQDQAVMTKQHERDILKKAVDGKCRLCSMKDETAQHIISGCEKLAGTHYTKRHNNVVQYLFWTIAKKHKFEVSNLWWKETLDGPQVRENSEAKLMWEISVQTDLTVPNNRPDIIYIDKTHNHTYLIDVTIPSDYNLGPKEIEKLSKYNLLKHEITRLWKTKTSIIPIVIGTTGIVNKSLKRYCDTLNSNINISIMQKQAAIHTSIILSKVLGDTIFVGAEADETQITHQTANAQNIQQVSITQNTPNTQQLPNTHITQESQITTNNQYLTLTQGTEQPPISQNTHQSSTQVSITHTTQQLPVSQNIQQSSTTQLTTDRNIHQPYNTRSRSRR

SEQ ID NO: 18402 - protein, 921 aa, Apodemia mejicanus
MRIQRKIQNIRKELGRLIEIKNGVTTRRMVNIREKLFNKYNIFSSQDRDNIIESLKQKVRAMAARLKRYEDINKRKHQNIQFKENQHKFFRNLAQNQTIPNNVPSKSTIEEFWSNILSKPINYNKNAQWIRELEVKTSYFTNHDFDISKEMVQNAIKKTSNWKAPGLDRIQNFYLKYFTNTHDYLAELFNRILTGEETPQDWFTTGHVILIPKNSSTSDPSNWRPIACLSTMYKLLTSILATQLDIHCQNNNIIAMEQRGCKKQARGCKDHLMINKAILEDAHQTQKNLSMAWVDYQKAFDSISHEWLLKVLDLYKCPDKIKYFLEIMMPQWKVVMTARGTTDIITTDTIPIRRGIFQGDSLSPILFCLALNPLSEILNKYKTKGYKLRDSIFINHLLYMDDLKIYANNRNNLKILLDSSEIFTKDIGMNFGLNKCNVLHLAAGKRSDCQGVGHVLLNGEQFKILDEGQTYKYLGVNEAGTIDHKNLRQQIQKEYLRRVKCLVATGLNSRNLIRAINLYAVPILLYSFGIVNFKTRDLQNIDIKTRKMLTLNKAHYLKAEIERLYLPIDTGGRGLINIEMLYKTQIIKYKTYLEREIDDLIKAIAQHDKNRDKYSIFKETKNNLMEIGLLAEELYSDMEIRKAIIKFKTEKWKSKPLHGQFYKSVLLKGNTDNIISFQWLKETPISPALEASIFAIQDQAIITKQYQRDILHKAIDGKCRLCSVKDETVQHIISGCEKLAGTHYTTRHNNIVQYVLWTIAKKHQFEVANQWWKETLNGPQVRENNKAKIMWEIPVQTDLTVPNNRPDIIYIDKHDNHTYLIDVTIPSDYNIGPKEIEKLSKYNLLKHEISRLWKTKTSIIPIVVGATGVVNRSLKRYCDILDSNINISIMQKQAAIHTSIILFKVLGDNIFVSGETETPSP

SEQ ID NO: 18403 - protein, 1250 aa, Apodemia duryi
MKSSRNNCSQGPLPGGDRRGISGADAGYDSLRTVSGAQLNRRTAAGEPENATAEHISNTDATLQNEATSTPISSAGTSEITTTSFNQHDSRRKWSIQEMHELMFWFYKAKAQGIGYINRLEMLFKERNPNNIKVNRFTGNTLANQARSIINRNFISMEVLNEIKTAAENSLNPATIQLDSENIEIDQNTPQSQHVGLTSSNTTSTQNLAESLKETQFILPVPEIISITQFTVEEQEPLILELLQNLTEVSKINIKEREILPKPKLNKTFFKNLDQVNRFLPKLLEQKHSLKEINDIIYAAAKTLIIANNQKPYTVTTTKKTESREPPWKMRIQRKIQNIRKELGRLIEIKNGVTTRRMVNIREKLFNKYNIFSSQERDNIIESLKQKVRAMAARLKRYEDINKRKHQNIQFKENQHKFFRNLAQNQTIPNNVPSKSTIEEFWSNILSKPINYNKNAQWIRELEVKTSYFTNHDFDISKEMVQNAIKKTSNWKAPGLDRIQNFYLKYFTNTHDYLAELFNRILTGEETPQDWFTTGHVILIPKNSSTSDPSNWRPIACLSTMYKLLTSILATQLDIHCQNNNIIAMEQRGCKKQARGCKDHLMINKAILEDAHQTQKNLSMAWVDYQKAFDSISHEWLLKVLDLYKCPDKIKYFLEIMMPQWKVVMTARGTTDIITTDTIPIRRGIFQGDSLSPILFCLALNPLSEILNKYKTKGYKLRDSIFINHLLYMDDLKIYANNRNNLKILLDSSEIFTKDIGMNFGFNKCNVLHLAAGKRSDCQGVGHVLLNGEQFKILDEGQTYKYLGVNEAGTIDHKNLRQHIQKEYLRRVKCLVATGLNSRNLIRAINLYAVPILLYSFGIVNFKTRDLQNIDIKTRKMLTLNKAHYLKAEIERLYLPIDTGGRGLINIEMLYKTQIIKYKTYLEREIDDLIKAIAQHDKNRDKYSIFKETKNNLMEIGLLAEELYSDMEIRKAIIKFKTEKWKSKPLHGQFYKSVLLKGNTDNIISFQWLKETPISPALEASIFAIQDQAIITKQYQRDILHKAIDGKCRLCSVKDETVQHVISGCEKLAGTHYTTRHNNIVQYVLWTIAKKHQFEVANQWWKETLNGPQVRENNKAKIMWEIPVQTDLTVPNNRPDIIYIDKHDNHTYLIDVTIPSDYNIGPKEIEKLSKYNLLKHEISRLWKTKTSIIPIVVGATGVVNRSLKRYCDILDSNINISIMQKQAAIHTSIILFKVLGDNIFVSGETETPSP

SEQ ID NO: 18404 - protein, 938 aa, Limenitis arthemis
MQTIIYCAAYTAAIINGSKIFTEPMLKNNKNKIPRWEKNLKGRIDDLRVKIGRLTEYIKGTNSRKLQKRVDKIKEQYKVHTKHENENTELSHFLDTLKQKLNALSNRLRRYKVTSLRKIQNKQFNNSEKQFYRKITQNNQDDKIPSPDELHKYWKNIWSNPTEHTEGYWAEEEKKLLSNLSHMEFEDVSIDCLKAIIAKTHNWKATGSDKIHNFWFKKFTNMHQLLHKHINNFIKYPETIPQYITKGITYMLPKDPKDTKNPAKYRPITCLQNIYKIITGCISQLIYNHAEKNNILTEQQKGCRKNSQGCKEQLIIDSVTSNQAFNKKRNIYTMYIDYKKAYDSVPHSWLLYILQNYKIHPVIINFLKQTMVNWSTVLRLYSNSDIIETESIQISRGIFQGDSLSPVWFCLAINPLSNILNHLNKGFQIKYNNNYHIINHLLYMDDIKLYGSSLDEINRLADVTQEFSTDIKMEFGIEKCKIQSVRAGILEENSYSMKNNETIEPIDTFTGYKYLGYVQSRQIHQKETKTILKQKFNSRLHKILNTYLNSRNTVKAINSFAIPILTYSFGIINWSQTELKTLQRTINTNLTKYRKHHPRACSQRMTLSRWEGGRGIIDIQNLHNGLITKLREFFHNKANSSELHMAIVEADKKLTPLNLQDYSTQINQKIKKPQEKILEWSRKSLHGRHFHDLISPTVDKIASNAWLRRGELFPETEAFMMAIQDQIIDTNNYRKYIIRNANSDLCRHCHSASETIQHITGSCKAIAQTDYKHRHDQVAAIIHQYLAYKYGFIKEKTAYYKYKPEVILDESKYKIYWDRAIITDKTVHCNRPDITLYDKSNKTVYLIDISIPNTHNLQATYTEKLTKYKDLAIEIKSQWRVNTVRTVPIIISSTGVIPISLQDNLKVLQIHPLTFILMQKAVILNTCRIVRKFLSITS

SEQ ID NO: 18405 - protein, 1033 aa, Limenitis camilla
MYTKNSTDDQHNIQQTDLPSQPSQPNCSSLPQGITQITDHEEKFLQILTEFTNSDATKRPSIPKQKSSKKLALIVEHINNKILPKHITLDSDYNIVQTILYCAAYTAAIINGSKIATERISRVHKNKTTGWEKNLQGRIDDLRVKIGRMTEYIKGNNSNRLQKHIDKIKAQYKIHTKHENENTELSHFLDILKQKLNALSNRLRRYKITTLRKVQNNQFVHSEKSFYRKMTQNNDDKTVTENPTSEDLLKFWKDIWSKPVQHKEGEWLEEEKKLHVNIKEMVFEEISIDSLKAVITKTNNWKATGSDNIHNYWYKKFDYILLKHINNFIKSPQTIPPYIMEGITYMLPKDLKDTKNPAKYRPITCLQNIYKIVTGCISQLIYNHVEQNNILTEQQKGCRKNSQGCKEQLIIDAVTSKQALNKKRNIYTMYIDYKKAYDSVPHSWLLYILQSYKIHPVIIGFLKQAMANWSTNLRLYNNSDTIETESIKVKRGIFQGDSLSPLWFCLALNPLSSLLNNSNKGFKIKHNNSSYTINHLLYMDDIKLYGGSLEEINYLADITQDFSMNIKMEFGIEKCKIQSVRGGILEKNSYCMKNDEIIEPVDNIIGYKYLGYAQSRQIHQKETKVKLQQKFKSRLHKIFNTYLNSRNTIKAINSFAIPILTYSFGIINWSQTELKSLQQIINTHLSKYRKHHPRTCLQRMTLPRFDGGRGIIDIQNLHNGLITKLRHFFHDKANISRLHMAIVESDKKFTPLNLNNYNLQINQKIKKPQEKIEEWSQKSLHGRHHHDLINPNVDKIASNAWLRRGELFPETEAFMMAIQDQVIDTNNYRKHIIHNSNSDICRHCRSASETIQHITGACKAIAQTDYKHRHDQVAAIIHQYLAFKYGFIKEKIAYYKYNPEVILDAANCKMYWDRSIITDKTIHCNRPDITLYDKINKIVYLIDISIPNTHNLQATYTEKLTKYKDLAIEIKTQWRVHTVRTVPIIISSTGIIPNSLKTNLKILQIHPLTFILMQKAVILNTCRIVRKFLFRII

SEQ ID NO: 18406 - protein, 1370 aa, Boloria selene
MNGQLRRYNLRPLPGGRRGTLGANAECSSMRAVGDGELIRRASVGQKSEDMTAEIIITNPSSPTSSINSVFQSSSSSFHPEDNPSRSSSITPMSCDVVQEAQATSSVSAYDTREMRTRKKWSKDMNMFILRTYFIITKLETDNINNYLTALHSLFTSQYPNMAATKQRIGDQRRAILRTQLLSSKEINEIRKQAEQHLKDTENLTLNSQTVNYDNLTQDTNKRMKWTNSMNETIIKQYYIITELESNKTGYRQSLHQAVIAKHPELNQVSEQRISDQLRVIIRNKMIKENRLQEIREEASRELFKLHKHVNNNKQSEHMTQEPTVLQISLNPTESVSDTRNLTDDLQSEYTHNHSTDTLQCNNHNLPLLNTKKYKEIFYEAYVKFKNSEATDRPNIPKQRSTKKLASIVQHINSEILPKYLTLDSDFQTMQCILYCGAYTSAVLNGTKIHSQTLARPVNNFSIPPWQRRLQNRIENLRAKIGKITEFIRGNNSIKLKKQIELIKIQYRVHTIHENENSELSHFLDTLKQKLSALSNRMRRYKTTALRKVQNKQFNTSEKLFYRSITDTTNDSMTPSPTSQELYEFWTNIWSKPEQHNEGTWLDIDKKKLTNVTSMKFESISLDQLKTAITKTHNWKATGSDKLHNYWYKKFTYLHPLLHKHINRFINNPETLPLYITQGITYMIPKDPNDTKNPAKYRPITCLQSIYKIITACISQIIYTHIDQNNILAEQQKGARKYSQGCKEQLIIDAITSKQAVSKKKDIYTMYIDYKKAFDSIPHSWLSCVLQHYKIHPKIIEFLNKNMGNWSTKLKLHTKTEIIETQPIQIRRGIFQGDSLSPLWFCLAINPLSSALNNENIGFKLKYNKKQYIINHLLYMDDIKLYGNSLNEIQRLADITQNISLDIKMNFGIEKCRILSVHRDTVEENTYLMNNGEVIEPLDNTIGYKYLGYTQSRQIHHKEIKTTLKQKFKLRLHKILKSHLNSRNTIKAINSFAIPILTYSFGVIKWSQTELVALQRIINTHLTLYRKHHPKACIQRLTLPRHEGGRGLIDIQYLHSKLITGLRDFFHSKSLVSTLHMAVVESDRKLTPLNLQNRLNQTNQTVKLPEQKIEEWLQKALHGRHRHDLMNPFIDKVASNAWLKRGDLFPETEGFMVAIQDQTIDTKNYRKYILHNTTSDLCRHCHHASETIQHITGACKAIAQTDYKHRHDQIAAIVHQYLSHKYGFVKEKVPYYKYTPQIILDSDRYKIYWDRTIITDKTIYCNRPDITLHDKHAKTVYLIDIAVPNTHNLQTTYTEKLAKYKELEVEVKAQWRVNIVKTVPIVLSTTGVIPKSLHSSLKTLQIHPLTYILMQKAAILNTCRIVRKFLSIST

SEQ ID NO: 18407 - protein, 1370 aa, Boloria selene
MNGQLRRYNLRPLPGGRRGTLGANAECSSMRAVGDGELIRRASVGQKSEDMTAEIIITNPSSPTSSINSVFQSSSSSFHPEDNPSRSSSITPMSCDVVQEAQATSSVSAYDTREMRTRKKWSKDMNMFILRTYFIITKLETDNINNYLTALHSLFTSQYPNMAATKQIIGDQRRAILRKQLLSSKEINEIRKQAEQHLKDTENLTLNSQTVNYDNLTQDTNKRMKWTNSMNETIIKQYYIITELESNKTGYRQSLHQAVIAKHPELNQVSEQRISDQLRVIIRNKMIKDNRLQEIREEASRELFKLHKHVNNNKQSEHMTQEPTVLQISLNPTESVSDTRNLTDDLQSEHTHNHSTDTLQCNNHNLPLLNTKKYKEIFYEAYVKFKNSEATDRPNIPKQRSTKKLASIVQHINSEILPKYLTLDSDFQTMQCILYCGAYTSAVLNGTKIHSQTLARPVNNFSIPPWQRRLQNRIENLRAKIVKITEFIRGNNSIKLKKQIELIKIQYRVHTIHENENSELSHFLDTLKQKLSALSNRMRRYKTTALRKVQNKQFNTSEKLFYRSITDTTNDSMTPSPTSQELYEFWTNIWSKPEQHNEGTWLDIDKKKLTNVTSMKFESISLDQLKTAITKTHNWKATGSDKLHNYWYKKFTYLHPLLHKHINRFINNPETLPLYITQGITYMIPKDPNDTKNPAKYRPITCLQSIYKIITACISQIIYTHIDQNNILAEQQKGARKYSQGCKEQLIIDAITSKQAVSKKKDIYTMYIDYKKAFDSIPHSWLSCVLQHYKIHPKIIEFFNKNMGNWSTKLKLHTKTEIIETQPIQIRRGIFQGDSLSPLWFCLAINPLSSALNNENIGFKLKYNKKQYIINHLLYMDDIKLYGSSLNEIQRLADITQNISLDIKMNFGIEKCRILSVHRDTVEENTYLMNNGEVIEPLDNTIGYKYLGYTQSRQIHHKEIKTTLKQKFKLRLHKILKSHLNSRNTIKAINSFAIPILTYSFGVIKWSQTELVALQRIINTHLTLYRKHHPKACIQRLTLPRHEGGRGLIDIQYLHSKLITGLRDFFHSKSLVSTLHMAVVESDRKLTPLNLQNRLNQTNQTVKLPEQKIEEWLQKALHGRHRHDLMNPFIDKVASNAWLKRGDLFPETEGFMVAIQDQTIDTKNYRKYILHNTTSDLCRHCHHASETIQHITGACKAIAQTDYKHRHDQIAAIVHQYLSHKYGFVKEKVPYYKYTPQIILDSDRYKIYWDRTIITDKTIYCNRPDITLHDKHAKTVYLIDIAVPNTHNLQTTYTEKLAKYKELEVEVKAQWRVNIVKTVPIVLSTTGVIPKSLHSSLKTLQIHPLTYILMQKAAILNTCRIVRKFLSIST

SEQ ID NO: 18408 - protein, 1376 aa, Fabriciana adippe
MNEQIRRYNLRPLPGGRRGTLGANAECSSMRAVGDGELNRRTSVGQEPEDTTADFIITNASSPTSSINSVIQSSNSSYHPDENPSRSSSITPLSCDVVQEAKATNSAPAYGTTEMRTRKKWSKDMNMFILRTYFIITKLETYITNDYLTLLHSLFTSQYPNMAVTKQRIGDQRRAIIRKQLLSHEEIKEIREQAEQHLKNTENLTLNSHIVQHENLTQDTNKRMKWTKSMNETIIKQYYIITELEINKTGYRQSLHQAVIAKHPELNQVSEQRISDQLRVIIRNKMINEDRLQEIREEASRELFKLNKHVNNNKNSQSQHMTHAPTVLEISQKSTSCTETDDTHNLIVDLQLGRHNINNLSSDPLQRNKHIPQLNTKNYEETFLQTFIQFKNSEATDRPNIPKQRSTKKLALIVQHINSEILPKFLTMDSDFQTMQCILYCGAYTSALLNGAKIYSQPMTNKVNNNNIPPWQKRLQNRINNLRAKIGKITEFIRGNHSTKLKKQIEIIKTQYKIHTIYENENSELSHFLDTLKQKLSALSNRMRRYKTTTLRKTQNKQFITAEKSFYRAITNTIPNSSNTPSPTPQELYEFWSNIWSKPVQHYEGTWLDIDKKNIINVTSMEFESISLDQLKAVIAKTHNWKATGSDKLHNYWYKKFTYIHPLLHTHLNRFINNPETMPLYITQGITYMIPKDPNDAKNPAKYRPITCLQNIYKIITACISQIIYTHIEQNNILAEQQKGARKYSQGCKEQLIIDAITSKQAINKKKDIYTMYIDYKKAYDSIPHSWLSYILEHYKIHPKIREFLNKNMNNWSTNLKLHTKTEIIETEPIRIRRGIFQGDSLSPLWFCLAINPLSSVLNNENIGFKLKYNENYCIINHLLYMDDIKLYSSSLNEIQRLADITQNISLDIKMNFGIDKCRILSVHRDTIERNTYVMKTGEVIEPVDNITGYKYLGYAQSRQIHQKEIKTTLKQKFKSRLHKILKTHLNARNTVKAINSFAIPILTYSFGVINWSQTELKALQRIINTHLTLYRKHHPRACTQRLTLPRNEGGRGIIDIHYLHNKLITGLRDFFHNKSLVSTLHKAVVEADRKLTPLNLHNKSDQTNQTAKLPEQKIEEWLQKALHGRHRHDLISPYVDKSASNAWLTRGDLFPETEGFMVAIQDQTVDTRNYRKYILHNNSSDLCRHCHHASETIQHITGACKNIAQTDYKHRHDQIAAIVHQYLSHKYGFIKEKVPYYKYTPQIILDSDKYKIYWDRTIITDKTVYSNRPDITLYDKHSKTVYLIDIAVPNTHNLQTTYTEKITKYKELEVEIKAQWRVNIVKTVPIVLSATGVIPKSLHISLKTLQIHPLTYILMQKAAILNTCRIVRKFLAITT

SEQ ID NO: 18409 - protein, 1141 aa, Boloria selene
MNETIIKQYYIITELESNKTGYRQSLHQAVIAKHPELNQVSEQRISDQLRVIIRNKMIKENRLQEIREEASRELFKLHKHVNNNKQSEHMTQEPTVLQISLNPTESVSDTRNLTDDLQSEHTHNHSTDTLQCNNHNLPLLNTKKYKEIFYEAYVKFKNSEATDRPNIPKQRSTKKLASIVQHINSEILPKYLTLDSDFQTMQCILYCGAYTSAVLNGTKIHSQTLARPVNNFSIPPWQRRLQNRIENLRAKIGKITEFIRGNNSIKLKKQIELIKIQYRVHTIHENENSELSHFLDTLKQKLSALSNRMRRYKTTALRKVQNKQFNTSEKLFYRSITDTTNDSMTPSPTSQELYEFWTNIWSKPEQHNEGTWLDIDKKKLTNVTSMKFESISLDQLKTAITKTHNWKATGSDKLHNYWYKKFTYLHPLLHKHINRFINNPETLPLYITQGITYMIPKDPNDTKNPAKYRPITCLQSIYKIITACISQIIYTHIDQNNILAEQQKGARKYSQGCKEQLIIDAITSKQAVSKKKDIYTMYIDYKKAFDSIPHSWLSCVLQHYKIHPKIIEFLNKNMGNWSTKLKLHTKTEIIETQPIQIRRGIFQGDSLSPLWFCLAINPLSSALNNENIGFKLKYNKKQYIINHLLYMDDIKLYGSSLNEIQRLADITQNISLDIKMNFGIEKCRILSVHRDTVEENTYLMNNGEVIEPLDNTIGYKYLGYTQSRQIHHKEIKTTLKQKFKLRLHKILKSHLNSRNTIKAINSFAIPILTYSFGVIKWSQTELVALQRIINTHLTLYRKHHPKACIQRLTLPRHEGGRGLIDIQYLHSKLITGLRDFFHSKSLVSTLHMAVVESDRKLTPLNLQNRLNQTNQTVKLPEQKIEEWLQKALHGRHRHDLMNPFIDKVASNAWLKRGDLFPETEGFMVAIQDQTIDTKNYRKYILHNTTSDLCRHCHHASETIQHITGACKAIAQTDYKHRHDQIAAIVHQYLSHKYGFVKEKVPYYKYTPQIILDSDRYKIYWDRTIITDKTIYCNRPDITLHDKHAKTVYLIDIAVPNTHNLQTTYTEKLAKYKELEVEVKAQWRVNIVKTVPIVLSTTGVIPKSLHSSLKTLQIHPLTYILMQKAAILNTCRIVRKFLSIST

SEQ ID NO: 18410 - protein, 1370 aa, Boloria selene
MNGQLRRYNLRPLPGGRRGTLGANAECSSMRAVGDGELIRRASVGQKSEDMTAEIIITNPSSPTSSINSVFQSSSSSFHPEDNPSRSSSITPMSCDVVQEAQATSSVSAYDTREMRTRKKWSKDMNIFILRTYFIITKLETDNINNYLTALHSLFTSQYPNMAATKQRIGDQRRAILRKQLLSSKEINEIRKQAEQHLKDTENLTLNSQTVNYDNLTQDTNKRMKWTNSMNETIIKQYYIITELESNKTGYRQSLHQAVIAKHPELNQVSEQRISDQLRVIIRNKMIKDNRLQEIREEASRELFKLHKNVNNNKQSEHMTQEPTVLQISLNPTESVSDTRNLTDDLQSEHTHNHSTDTLQCNNHNLPLLNTKKYKEIFYEAYVKFKNSEATDRPNIPKQRSTKKLASIVQHINSEILPKYLTLDSDFQTMQCILYCGAYTSAVLNGMKIHSQTLARPVNNFSIPPWQRRLQNRIENLRAKIGKITEFIRGNNSIKLKKQIELIKIQYRVHTIHENENSELSHFLDTLKQKLSALSNRMRRYKTTALRKVQNKQFNTSEKLFYRSITDTTNDSMTPSPTSQELYEFWTNIWSKPEQHNEGTWLDIDKKKLTNVTSMKFESISLDQLKTAITKTHNWKATGSDKLHNYWYKKFTYLHPLLHKHINRFINNPETLPLYITQGITYMIPKDPNDTKNPAKYRPITCLQSIYKIITACISQIIYTHIDQNNILAEQQKGARKYSQGCKEQLIIDAITSKQAVSKKKDIYTMYIDYKKAFDSIPHSWLSCVLQHYKIHPKIIEFLNKNMGNWSTKLKLHTKTEIIETQPIQIRRGIFQGDSLSPLWFCLAINPLSSALNNENIGFKLKYNKKQYIINHLLYMDDIKLYGSSLNEIQRLADITQNISLDIKMNFGIEKCRILSVHRDTVEENTYLMNNGEVIEPLDNTIGYKYLGYTQSRQIHHKEIKTTLKQKFKLRLHKILKSHLNSRNTIKAINSFAIPILTYSFGVIKWSQTELVALQRIINTHLTLYRKHHPKACIQRLTLPRHEGGRGLIDIQYLHSKLITGLRDFFHSKSLVSTLHMAVVESDRKLTPLNLQNRLNQTNQTVKLPEQKIEEWLQKALHGRHRHDLMNPFIDKVASNAWLKRGDLFPETEGFMVAIQDQTIDTKNYRKYILHNTTSDLCRHCHHASETIQHITGACKAIAQTDYKHRHDQIAAIVHQYLSHKYGFVKEKVPYYKYTPQIILDSDRYKIYWDRTIITDKTIYCNRPDITLHDKHAKTVYLIDIAVPNTHNLQTTYTEKLAKYKELEVEVKAQWRVNIVKTVPIVLSTTGVIPKSLHSSLKTLQIHPLTYILMQKAAILNTCRIVRKFLSIST

SEQ ID NO: 18411 - protein, 834 aa, Fabriciana adippe
MRRYKTTTLRKTQNKQFITAEKSFYRAITNTIPNSSNTPSPTPQELYEFWSNIWSKPVQHYEGTWLDIDKKNIINVTSMEFESISLDQLKAVIAKTHNWKATGSDKLHNYWYKKFTYIHPLLHTHLNRFINNPETMPLYITQGITYMIPKDPNDAKNPAKYRPITCLQNIYKIITACISQIIYTHIEQNNILAEQQKGARKYSQGCKEQLIIDAITSKQAINKKKDIYTMYIDYKKAYDSIPHSWLSYILEHYKIHPKIREFLNKNMNNWSTNLKLHTKTEIIETEPIRIRRGIFQGDSLSPLWFCLAINPLSSVLNNENIGFKLKYNENYCIINHLLYMDDIKLYSSSLNEIQRLADITQSISLDIKMNFGIDKCRILSVHRDTIERNTYVMKTGEVIEPVDNITGYKYLGYAQSRQIHQKEIKTTLKQKFKSRLHKILKTHLNARNTVKAINSFAIPILTYSFGVINWSQTELKALQRIINTHLTLYRKHHPRACTQRLTLPRNEGGRGIIDIHYLHNKLITGLRDFFHNKSLVSTLHKAVVEADRKLTPLNLHNKSDQTNQTAKLPEQKIEEWLQKALHGRHRHDLISPYVDKSASNAWLTRGDLFPETEGFMVAIQDQTVDTRNYRKYILHNNSSDLCRHCHHASETIQHITGACKNIAQTDYKHRHDQIAAIVHQYLSHKYGFIKEKVPYYKYTPQIILDSDKYKIYWDRTIITDKTVYSNRPDITLYDKHSKTVYLIDIAVPNTHNLQTTYTEKITKYKELEVEIKAQWRVNIVKTVPIVLSATGVIPKSLHISLKTLQIHPLTYILMQKAAILNTCRIVRKFLAITT

SEQ ID NO: 18412 - protein, 1357 aa, Dryas iulia
MDTQLRKYNLRPLPGVRRGTPGANAGCSSMRAVGNGELSRRASVGLQPEDVTAATIISNSSSPTSSIHSIFQSSSSSYHPNHDPSRSPSNSPMSFDVVQEARAENSVSTSGTTEMRTRKRWSKDMNTFILRMYFIITKLETQTTNYLTSLHTLFNQHYPDMAATKQRIGDQRRAIIRKKYFNSEEVEKIKKDAAKYLTNTNQNQITQTIISDPNKRRKWTRNINETIIKQYYTITQLETNKTGYRQLLHTAVIAEHPELNQVSEQRISDQLRVIIRHKMIDDNRLMELREEVTREINYSPQSPTITDNNTQIQTTDDLHAPVHPNTAYSQNITSEELAQETNILLPQCYVTNCKEIFEGALTNFANASICDRPNIPKQKSSKKLAIIVQHINTEVIPSYITNDTDFETLQNIIYCAAYTAASVNGSKVILEQEIKKHTTIIPNWQLRLQGRIDDLRVKIGRLTNYIKGNQSKRLERQIEKIKIKYKIHAQYENENTELSHFLDTLKQKLNALANRMRRYKLTTLRKNQNKQFIRSEKSFYRTLTQDNFNNLNTQTPNAQQFYDFWSQIWSNPVQHEEGEWLNAENDLLKDINNMQFESISMDQLKTVLNKTHNWKATGSDKIHNFWYKKFSTLHPLLHTHVSNFIQKPKAMPRYITQGMTYMLPKDPNDTKNPSKYRPITCLQNIYKIITSCICQLVYKHIEQNNILTEQQKGCRKYSQGCKEQLIIDAIVSKKALKEKKDIFTMYIDYQKAYDSVPHSWLVHVLQRYKIDPIIIEFLKYNMNNWSTILKFHNGTCSLKTDPIQIRRGIFQGDAFSPLWFCLAINPLSIFLNKTNLGYPIKYKQPNQPDSTEHNVRLNHLLYMDDIKLYGCSLKEINQLADATQEFSSDIKMQFGIQKCKIQSIRNNNIEENSYITKSGGSIEPVDNIIGYKYLGFAQSRQIHQKEAKITLKKKFKSRLHKILKTYLNARNTVKAINTYAISLLIYSFGIINWTQTELKTMQRIINTHLTLHRKHHPRACIQRLTLPRCEGGRGLIDILILHNKLITSLRIFFHNKSQESLLHMAIMETDKKLTPLNLYDRSIQINRKVTDIKQKIQEWSQKSLHGRHLHDLLSPNVDKYASNAWLRYGELFPETEGFLMAIQDQIIDTKNYRKHILRNTNIDTCRHCHNASETIQHITGACKAIAQTDYKHRHVQIASIIHQNLAYKYGFIKEKLAYYKYIPETVLDSNNYKIYWDRTIITDKTIYCNRPDITLLDKRAKTVYLIDIAIPNTHNLQTTYTEKISKYKDLTIEIKTQWRVNNVKTIPIVISSTGIIPKLLHESLQTLQIHPLTYVLIQKAAILNTCRIVRKFLSITT

SEQ ID NO: 18413 - protein, 1353 aa, Dryas iulia
MDTQLRKYNLRPLPGVRRGTPGANAGCSSMRAVGNGELSRRASVGLQPEDVTAATIISNSSSPTSSIHSIFQSSSSSYHPNHDPSRSPSNSPMSFDVVQKARAENSVSTSGTTEIRTRKRWSKDMNTFILRMYFIITKLETQTTNYLTPLHTLFNQHYPDMAATKQRIGDQRRAIIRKKYFNSEEVEKIKKDAAKYLTNTNQNEITQTIISDPNKRRKWTRNINETIIKQYYTITQLETNKTGYRQLLHTAVIAEHPELNQVSEQRISDQLRVIIRHKMIDDNRLMEIREEVTREINYSPQSPTIADNNTQIQTTDDLHAPVHPNTAYSQNITSEELAQETNILLPQCYVTNCKEIFEGALTNFANASICDRPNIPKQKSSKKLAIIVQHINTEVIPSYITNDTDFETLQNIIYCAAYTAASVNGSKVILEQESKKRTTTIPNWQLRLQGRIDDLRVKIGRLTNYIKGNQSKRLERQIEKIKIKYKIHAQYENENTELSHFLDTLKQKLNALANRMRRYKLTTLRKNQNKQFIRSEKSFYRTLTQDNFNNLNTQTPNAQQFYDFWSQIWSNPVQHEEGEWLNAENDLLKDINNMQFESISMDQLKTVLNKTHNWKATGSDKIHNFWYKKFSTLHPLLHTHVNNFIQKPEAMPRYITQGMTYMLPKDPNDTKNPSKYRPITCLQNIYKIITSCICQLVYKHIEQNNILTEQQKGCRKYSQGCKEQLIIDAIVSKKALKEKKDIFTMYIDYQKAYDSVPHSWLVHVLQRYKIDPIIIEFLKYNMNNWSTILKFHNGTCSLKTDPIQIRRGIFQGDAFSPLWFCLAINPLSIFLNKTNLGYPIKYKQPNQPDSTEHNVRLNHLLYMDDIKLYGCSLKEINQLADATQEFSSDIKMQFGIQKCKIQSIRNNNIEENSYITKSGGSIEPVDNIIGYKYLGFAQSRQIHQKEAKITLKKKFKSRLHKILKTYLNARNTVKAINTYAISLLIYSFGIINWTQTELKTMQRIINTHLTLHRKHHPRACIQRLTLPRCEGGRGLIDILNLHNKLITSLRIFFHNKSQESLLHMAIMETDKKLTPLNLYDRSIQINRKVTDIKQKIQEWSQKSLHGRHLHDLLSPNVDKYASNAWLRYGELFPETEGFLMAIQDQIIDTKNYRKHILRNTNIDTCRHCHNASETIQHITGACKAIAQTDYKHRHDQIASIIHQNLAYKYGFIKEKLAYYKYIPETVLDSNNYKIYWDRTIITDKTIYCNRPDITLLDKRAKTVYLIDIAIPNTHNLQTTYTEKISKYKDLTIEIKTQWRVNNVKTIPIVISSTGVIPKLLHESLQTLQIHPLTYVLIQKAAILNTCRIVRKFL

SEQ ID NO: 18414 - protein, 1357 aa, Dryas iulia
MDTQLRKYNLRPLPGVRRGTPGANAGCSSMRAVGNGELSRRASVGLQPEDVTAATIISNSSSPTSSIHSIFQSSSSSYHPNHDPSRSPSNSPMSFDVVQKARAENSVSTSGTTEIRTRKRWSKDMNTFILRMYFIITKLETQTTNYLTPLHTLFNQHYPDMAATKQRIGDQRRAIIRKKYFNSEEVEKIKKDAAKYLTNTNQNEITQTIISDPNKRRKWTRNINETIIKQYYTITQLETNKTGYRQLLHTAVIAEHPELNQVSEQRISDQLRVIIRHKMIDDNRLMEIREEVTREINYSPQSPTIADNNTQIQTTDDLHAPVHPNTAYSQNITSEELAQETNILLPQCYVTNCKEIFEGALTNFANASICDRPNIPKQKSSKKLAIIVQHINTEVIPSYITNDTDFETLQNIIYCAAYTAASVNGSKVILEQESKKRTTTIPNWQLRLQGRIDDLRVKIGRLTNYIKGNQSKRLERQIEKIKIKYKIHAQYENENTELSHFLDTLKQKLNALANRMRRYKLTTLRKNQNKQFIRSEKSFYRTLTQDNFNNLNTQTPNAQQFYDFWSQIWSNPVQHEEGEWLNAENDLLKDINNMQFESISMDQLKTVLNKTHNWKATGSDKIHNFWYKKFSTLHPLLHTHVNNFIQKPEAMPRYITQGMTYMLPKDPNDTKNPSKCRPITCLQNIYKIITSCICQLVYKHIEQNNILTEQQKGCRKYSQGCKEQLIIDAIVSKKALKEKKDIFTMYIDYQKAYDSVPHSWLVHVLQRYKIDPIIIEFLKYNMNNWSTILKFHNGTCSLKTDPIQIRRGIFQGDAFSPLWFCLAINPLSIFLNKTNLGYPIKYKQPNQPDSTEHNVRLNHLLYMDDIKLYGCSLKEINQLADATQEFSSDIKMQFGIQKCKIQSIRNNKIEENSYITKSGGSIEPVDNIIGYKYLGFAQSRQIHQKEAKITLKKKFKSRLHKILKTYLNARNTVKAINTYAISLLIYSFGIINWTQTELKTMQRIINTHLTLHRKHHPRACIQRLTLPRCEGGRGLIDILNLHNKLITSLRIFFHNKSQESLLHMAIMETDKKLTPLNLYDRSIQINRKVKDIKQKIQEWSQKSLHGRHLHDLLSPNVDKYASNAWLRYGELFPETEGFLMAIQDQIIDTKNYRKHILRNTNIDTCRHCHNASETIQHITGACKAIAKTDYKHRHDQIASIIHQNLAYKYGFIKEKLAYYKYIPETVLDSNNYKIYWDRTIITDKTIYCNRPDITLLDKRAKTVYLIDIAIPNTHNLQTTYTEKISKYKDLTIEIKTQWRVNNVKTIPIVISSTGVIPKLLHESLQTLQIHPLTYVLIQKAAILNTCRIVRKFLSITT

SEQ ID NO: 18415 - protein, 842 aa, Dryas iulia
MRRYKLTTLRKNQNKQFIRSEKSFYRTLTQDNFNNLNTQTPNAQQFYDFWSQIWSNPVQHEEGEWLNAENDLLKDINNMQFESISMDQLKTVLNKTHNWKATGSDKIHNFWYKKFSTLHPLLHTHVNNFIQKPEAMPRYITQGMTYMLPKDPNDTKNPSKYRPITCLQNIYKIITSCICQLVYKHIEQNNILTEQQKGCRKYSQGCKEQLIIDAIVSKKALKEKKDIFTMYIDYQKAYDSVPHSWLVHVLQRYKIDPIIIEFLKYNMNNWSTILKFHNGTCSLKTDPIQIRRGIFQGDAFSPLWFCLAINPLSIFLNKTNLGYPIKYKQPNQPDSTEHNVRLNHLLYMDDIKLYGCSLKEINQLADATQEFSSDIKMQFGIQKCKIQSIRNNNIEENSYITKSGGSIEPVDNIIGYKYLGFAQSRQIHQKEAKITLKKKFKSRLHKILKTYLNARNTVKAINTYAISLLIYSYGIINWTQTELKTMQRIINTHLTLHRKHHPRACIQRLTLPRCEGGRGLIDILNLHNKLITSLRIFFHNKSQESLLHMAIMETDKKLTPLNLYDRSIQINRKVTDIKQKIQEWSQKSLHGRHLHDLLSVNVDKYASNAWLRYGELFPETEGFLMAIQDQIIDTKNYRKHILRNTNIDTCRHCHNASETIQHITGACKAIAQTDYKHRHDQIASIIHQNLAYKYGFIKEKLAYYKYIPETVLDSNNYKIYWDRTIITDKTIYCNRPDITLLDKRAKTIYLIDIAIPNTHNLQTTYTEKISKYKDLTIEIKKQWRVNNVKTIPIVISSTGVIPKLLHESLQTLQIHPLTYVLIQKAAILNTCRIVRKFLSITT

SEQ ID NO: 18416 - protein, 1188 aa, Adelognathus sp.
MGSNEDSASDMDESDPEAFMADQSAGQGVTEDDNGNEQVNELEIGNKEIEVPLGEGITMCDVCVAAGQQRGFLNLRDLDSHYKENHAGINVSYKCRRCQRQCPTTKSWHAHKGKCKGPVEAIRHAHACTACQESYATKRALSIHELHAHPRIRNEKRRAEAERPPARAGRKNTVWSDEDTKRLKRLSRIHAQETHINLFLVRFFPGKTSKQISDKRRNLSEESSSSSDTEEELPNREITVVDIASEDTESDQSLTNQEISEANTQVLVETEEEEEVFQDAEEILLLAQDEAPGEGAAAQQRALEYEDRPDDIRVWRENMELYIEELRLQPDQPLKLAEERLTELWNSNRQDLVELKAALNEFVENTLVSALTNNDEENEQEAETRGQARGGRRRPNHTQRKRMGYARCQELYNNCPKRLADAAVSGEFGFMEFEQNALKAGDVEVLYTELWGTEQRVTYECETIPPQSLVICLSVVTPEEVGKRIQKLASNSAAGPDGVKKANLCRAGTTTLLAKLFNILILVQQYPEPWKVNRTTLIPKAGKDGKDVKNWRPITIGSMVGRIFSSTIDKKIRGFTTQNRRQKGFTEDDGCKHNTLLFNETIKLMKEKGGVATIVDISKAFDTVPHQMIGGGLRRKGVPNHLVSLVEEMYVGCKTKIKTAERQVDIGLKRGVKQGDPLSPLLFNLAIEPIIERLDTETEGVTVGEGHLSVLAFADDVIMIGKNVEEAQVQVNLLSEYLTSLGMSLSAPKCLTFQIIPRGKTWYMKDPGLQVEETRIPYVEPEDTVPYLGAKYSPWSGMKRGMEKQIIERAIKNLRRLYLKPHQKVEILHNYILPRYIYGLTTSPPAVTTLRELDRAVRVEVKEILHLPQSTVSGFFYTARKSGGIGLLKFEDIVGIAQLKTNIGLEGSRDPVLHEILIRSGQEAKMRDIAEKSHVEWPVTEAKVVAAKKIAKRTNFEKWESSRTQGQGARDFRNDKFGNAWLVKPGVYLKSSRHITALKLRTNTFGTRVALARAHPNMDTTCRRCHDQRETLGHVLGQCIHTKPSRIRRHDEMVDFLVERLARSGIVIKEPTINDEGELKKPDIVYKRDDNVKIIDVTVVYEKGDYIANAAEVKRQKYNRVAEHERARMEAREAEVLPIVIGARGAMPKATVNALKLLGMNNKDILTMSMSVLRSSIEMAHAFLDYNQ

SEQ ID NO: 18417 - protein, 975 aa, Heliopetes sublinea
MSMNHEPQVTNSVTGSSFLLASGVTQGMSNTLPGSETPVPPAVGQLNNPNNTPTMEQKILMEELDAVSEPYLINELALRVAQYLGRLKDRSSSPRVPRPGFPRATNNQNSDRMEEATKLQRLYRKNRMGAVRRILSGPAVFCDIDVETIENHFRAALVRRDGQDEWPDVFGRDPPTAASNDRICESFKRQIVNRKLKSKTNTSPGPDGLTYGDLKKADPGSFVLTSLFNAVWRLESVPDCWKESHTILLHKKGEKNNLDNWRPIALGNTVPKLFASLLADKIKRWASANHRFSDSQKGFRQYEGCFEHNFLIQESIRDAKRAKNELVVVWLDLASAFTSVPHSSIERAMEGHGVPEKVRTLVSSLNHNTSTRIRVGPALTSPIYMQSGVKQGCPLSPDIFNLTLEVVLREITRTGEGYLLGDTKISNLAYADDIALLADSAEGMRRMLGAAERAAKAVGLIFNPSKCGALHIAEGGDDGVRESEFLIENKPIPCLSLNDAYEHLGIPTGYQVRQTPINTISDIIADIRKIDESLLAPWQKLDAASTFVLPRIDFIMRGGVIEKEYLKEADRLIKKLGKKWMHLPQRASAELVFLPPSQGGGGLLPLADLYDIQTVTHAFKMLNASDHAVRSVAETLLQKTVSERIKKPAGGEDLAGYLSRSVEYPRSTATGSFWSTVRTSIGRLSPMLQLQWVCCPQSGSLKISLDNGKSITPTAKGSAYRLLRLGLINHYVQRLAAKRDQGKVFEVTGRNRHSNHFLRTGRNTRFCDWRFIHRARLGVLPLNATKRWQNNVDRRCRRCGYSLETIPHVLNHCGVHAATRQQRHDAIQNRLVVAAKCPGSVTVNRRVEGTTGDMASLRPDITVRDEVNKVITIVDVAVPFENRIEAFKAARREKIQKYAPIAAQMRTKGYKVKVEAFLIGSLGAWDPKNETVLSLLKVNKYYARMMRRFMVSDAIRWSRDLYVEHVTGTRQYGNQ

SEQ ID NO: 18418 - protein, 1173 aa, Pyrgus malvae
MGELAPSSHIVVNGSEFFVLLPIPVEQHLQCPLCVRSGSFRGVRKIENFNRHCKDSHQAMTVTYKCYRCGFTAPDGKRYPRKIVTQHCGTCVPSVTIAPSGNDRERRIAIRSRLGTAPPLEEPATQSAPSTAQVLQPPQLQSPVPGLGVAEETDSNSPQSHELERGELLNQIRVPIVTSEPGSEDTTHGVASASQTSAPSETPVENRALNCPTSPGSSPRVSEEAQELNRITLSGMGPLSGAIGQQDRNSPSMEQKSLMEELDAVVDSRLLNDLAVRVSQFLGRLKNPPPSPQEPRRTAPRPLGPNNHGPSRIEEATRLQRLYRNNRKAAVRHILSGPATYCSIDIATIEAHFRDASARRDGQDVWPSVFDQAPPTSASNVRICEPFQRQIVHRKLKSKTNTSPGPVGLSYADLRKADPGAYVLTSLFNAVWRLESVPECWKESNTILLHKKGDRSVPDNWRPITMSNTGPKLFASLLADKIKKWATTNHRLSDSQKGFRQYEGCFEHNFLLQESIRDARRAKKELVVVWLDLASAFTSVPHSSIDRAMEGHGMPDKVRTMISSLNADNYTRVRVGRDFTSPIHLQAGVRQGCPLSPDIFNLTLEVVLREMARTGEGYLLGDTKISNLAYADDVALLANSVEGMRHLLEVAERAAKAVGLTFNPGKCAALHIDGGGVEGVRESEFRIENQPIRCLGPNDAYEHLGIPTGYQVGQTPVDTISDIIADVRKIDESLLAPWQKLDAAGAFIIPRLDFIMRGGSVEKEYLKEADRIVKKLGKKWMHLPQRASAELVFLPPSQGGGGLLPLADLYDVHTVAHAYKMLYASDHAVSSVASDMLWKTVSERIRGPARGEDLAKYLSGDLDCPRSTETASFWSAIRKSVGRLASKVKLQWIWCHQNGTLKICLDNGTAITPTAKGTAYRLLRLGLIKHYAQRLTAKRDQGKAFEVTSQCRHTNHFLRTGRNTRFCDWRFIHRARLGVLPLNATKRWQNNVDKRCRRCGYGLETIPHVLNHCGVHSTARQRRHDAIQNRLVVAAKCPGAININRRVDGTAGDIASLRPDITVRDEVTKRIVIVDVAVPFENRTEAFKAARQQKIEKYAPVADQLRALGYKVEVEAFLIGSLGAWDPKNERVLSLLKVNKYYTRMMRRLMVSETIRWSRDIYVEHVTGNKQYE

SEQ ID NO: 18419 - protein, 1173 aa, Pyrgus malvae
MGELAPSSHIVVNGSEFFVLLPIPVEQHLQCPLCVRSGSFRGVRKIENFNRHCKDSHPAMTVTYKCYRCGFTAPDGKRYPRKIVTQHCGTCVPSVTIAPSGNDRERRIAIRSRLGTAPPLEEPATQSAPSTAQVLQPPQLQSPVHGLGVAEETDSNSPQSHELERGELLNQIRVPIVTSEPGSEDTTHGVASALQTSAPSETPVENRALNCPTSPGSSPRVSEEAQELNSITLSGMGPVSGAIGQQDRNSPSMEQKSLMEELDAVVDSRLLNDLAVRVSQFLGRLKNPPPSPQEPRRTAPRPLGPNNHGPSRIEEATRLQRLYRNNRKAAVRHILSGPATYCSIDIATIEAHFRDASARRDGQDVWPSVFDQAPPTSASNVRICEPFQRQIVHRKLKSKTNTSPGPDGLSYADLRKADPGAYVLTSLFNAVWRLESVPECWKESNTILLHKKGDRSVPDNWRPITMSNTGPKLFASLLADKIKKWATTNHRLSDSQKGFRQYEGCFEHNFLLQESIRDARRAKKELVVVWLDLASAFTSVPHSSIDRAMEGHGMPDKVRTMISSLNADNYTRVRVGRDFTSPIHLQAGVRQGCPLSPDIFNLTLEVVLRETARTGEGYLLGDTKISNLAYADDVALLANSVEGMRHLLEAAERAAKAVGLTFNPGKCAALHIDGGGVEGVRESEFRIENQPIRCLGPNDAYEHLGIPTGYQVGQTPVDTISDIIADVRKIDESLLAPWQKLDAAGAFILPRLDFIMRGGSVEKEYLKEADRIVKKLGKKWMHLPQRASAELVFLPPSQGGGGLLPLADLYDVHTVAHAYKMLYASDHAVSSVASDMLWKTVSERIRGPARGEDLAKYLSGDLDCPRSTETASFWSAIRKSVGRLASKVKLQWIWCHQNGTLKICLDNGTAITPTAKGTAYRLLRLGLIKHYAQRLTAKRDQGKAFEVTSQCRHTNHFLRTGRNTRFCDWRFIHRARLGVLPLNATKRWQNNVDKRCRRCGYGLETIPHVLNHCGVHSTARQRRHDAIQNRLVVAAKCPGAININRRVDGTAGDIASLRPDITVRDDVTKRIVIVDVAVPFENRTEAFKAARQQKIEKYAPVADQLRALGYKVEVEAFLIGSLGAWDPKNERVLSLLKVNKYYTRMMRRLMVSETIRWSRDIYVEHVTGNKQYE

SEQ ID NO: 18420 - protein, 1173 aa, Pyrgus malvae
MGELAPSSHIVVNGSEFFVLLPIPVEQHLQCPLCVRSGSFRGVRKIENFNRHCKDSHPAMTVTYKCYRCGFTAPDGKRYPRKIVTQHCGTCVPSVTIAPSGNDRERRIAIRSRLGTAPPLEEPATQSAPSTAQVLQPPQLQSPVHGLGVAEETDSNSPQSHELERGELLNQIRVPIVTSEPGSEDITHGVASALQTSAPSETPVENRALNCPTSPGSSTRVSEEAQELNSITLSGMGPVSGAIGQQDRNSPSMEQKSLMEELDAVVDSRLLNDLAVRASQFLGRLKNPPPSPQEPRRTAPRPLGPNNHGPSRIEEATRLQRLYRNNRKAAVRHILSGPATYCSIDIATIEAHFRDASARRDGQDVWPSVFDQAPPTSASNVRICEPFQRQIVHRKLKSKTNTSPGPDGLSYADLRKADPGAYVLTSLFNAVWRLESVPECWKESNTILLHKKGDRSVPDNWRPITMSNTGPKLFASLLADKIKKWATTNHRLSDSQKGFRQYEGCFEHNFLLQESIRDARRAKKELVVVWLDLASAFTSVPHSSIDRAMEGHGMPDKVRTMISSLNADNYTRVRVGRDFTSPIHLQAGVRQGCPLSPDIFNLTLEVVLREMARTGEGYLLGDTKISNLAYADDVALLANSVEGMRHLLEAAERAAKAVGLTFNPGKCAALHIDGGGVEGVRESEFRIENQPIRCLGPNDAYEHLGIPTGYQVGQTPVDTISDIIADVRKIDESLLAPWQKLDAAGAFIIPRLDFIMRGGSVEKEYLKEADRIVKKLGKKWMHLPQRASAELVFLPPSQGGGGLLPLADLYDVHTVAHAYKMLYASDHAVSSVASDMLWKTVSERIRGPAREEDLAKYLSGDLDCPRSTETASFWSAIRKSVGRLASKVKLQWIWCHQNGTLKICLDNGTAITPTAKGTAYRLLRLGLIKHYAQRLTAKRDQGKAFEVTSQCRHTNHFLRTGRNTRFCDWRFIHRARLGVLPLNATKRWQNNVDKRCRRCGYGLETIPHVLNHCGVHSTARQRRHDAIQNRLIVAAKCPGAININRRVDGTAGDIASLRPDITVRDDVTKRIVIVDVAVPFENRTEAFKAARQQKIEKYAPVADQLRALGYKVEVEAFLIGSLGAWDPKNERVLSLLKVNKYYTRMMRRLMVSETIRWSRDIYVEHVTGNKQYE

SEQ ID NO: 18421 - protein, 1173 aa, Pyrgus malvae
MGELAPSSHIVVNGSEFFVLLPIPVEQHLQCPLCVRSGSFRGVRKIENFNRHCKDSHQAMTVTYKCYRCGFTAPDGKRYPRKIVTQHCGTCVPSVTIAPSGNDRERRIAIRSRLGTAPPLEEPATQSAPSTAQVLQPPQLQSPVPGLGVAEETDSNSPQSHELERGELLNQIRVPIVTSEPGSEDTTHGVASASQTSAPSETPVENRALNCPTSPGSSPRVSEEAQELNRITLSGMGPLSGAIGQQDRNSPSMEQKSLMEELDAVVDSRLLNDLAVRVSQFLGRLKNPPPSPQEPRRTAPRPLGPNNHGPSRIEEATRLQRLYRNNRKAAVRHILSGPATYCSIDIATIEAHFRDASARRDGQDVWPSVFDQAPPTSASNVRICEPFQRQIVHRKLKSKTNTSPGPDGLSYADLRKADPGAYVLTSLFNAVWRLESVPECWKESNTILLHKKGDRSVPDNWRPITMSNTGPKLFASLLADKIKKWATTNHRLSDSQKGFRQYEGCFEHNFLLQESIRDARRAKKELVVVWLDLASAFTSVPHSSIDRAMEGHGMPDKVRTMISSLNADNYTRVRVGRDFTSPIHLQAGVRQGCPLSPDIFNLTLEVVLREMARTGEGYLLGDTKISNLAYADDVALLANSVEGMRHLLEVAERAAKAVGLTFNPGKCAALHIDGGGVEGVRESEFRIENQPIRCLGPNDAYEHLGIPTGYQVGQTPVDTISDIIADVRKIDESLLAPWQKLDAAGAFIIPRLDFIMRGGSVEKEYLKEADRIVKKLGKKWMHLPQRASAELVFLPPSQGGGGLLPLADLYDVHTVAHAYKMLYASDHAVSSVASDMLWKTVSERIRGPARGEDLAKYLSGDLDCPRSTETASFWSAIRKSVGRLASKVKLQWIWCHQNGTLKICLDNGTAITPTAKGTAYRLLRLGLIKHYAQRLTAKRDQGKAFEVTSQCRHTNHFLRTGRNTRFCDWRFIHRARLGVLPLNATKRWQNNVDKRCRRCGYGLETIPHVLNHCGVHSTARQRRHDAIQNRLVVAAKCPGAININRRVDGTAGDIASLRPDITVRDEVTKRIVIVDVAVPFENRTEAFKAARQQKIEKYAPVADQLRALGYKVEVEAFLIGSLGAWDPKNERVLSLLKVNKYYTRMMRRLMVSETIRWSRDIYVEHVTGNKQYE

SEQ ID NO: 18422 - protein, 1383 aa, Taractrocera maevius
MKSTLKRYNLRPLPGGRRGTSGADAGCFSMRTVGDGGLSRRVPLEQYTTADRSPPMSCTSNFEHLSVSNISPTSSSHTLFRSPDSSPQSYEKICSSPYSSSPDSHLSCDSVYPKITMLGDVAQEVYLAKVPAPTANIQNKRKKWSNEMNEFIMRTYLTITKMESENLHTYLQTLHSKFTEKFPDMTVSRQRVGDQRRAIMRNKLLTQETLDRIYREIKDKTNTTDHDNPTSIAVQPSQRMKWLQEHNETIIRAYFRITEIETNMTNYRKQLHQDFISKYPHLNHLTEQRIADQRRIIINNKRISDERLKTIKAEVAGEIQNINVKGKQSDDNRQTVNMQNKIHDDLNVELEQDQSVQYNRSNDISPLLEKDIINEYQQAFNFFKNKFPTERKYIPKQKISKHFIRVIHFINNKILPEFINFDTSFNTFQTIIYCAAWTAAKINGARLKFTDHDHNYNPKSNKMKWQIRLEKKITDLRAKIGRLTQYINGNRNKKLVIHVQDILEKYKMHTIHEEINNELIEYLDTLKQKLTVAASRLRRYTACTLRKTQNNQFKNNEKHFYRTLKLNNTEQTSKSIQYPKPEHLKKFWTDIWEKPVSHNEKAYWIQEEKESTKHTSEMNFESVPIEIFKDVIKNLHNWKTPGSDHIHNFWYKKFDYIHPFLHKHINNFIKDPNSMPKYITEGITYLLPKDSDLTNPTKYRPITCLQTIYKIITTCLTQAIYNHVEHNQILTEQQKGSRKFSYGCKEQLIIDSVILKHACKVKKDLFSMFIDYRKAYDSVPHSWLLEVLHIYKIHPLIISFLQSIMTKWHTKLKLMIHSKSIQTESIKINRGIFQGDALSPLWFCLALNPLSKKLNKTNLGYRLSCKSTESYTCANLRSVVIHNHLLYMDDLKLYASRETDLYELADITQEFSIDICMEFGVDKCKISSYKSGRNYRHQFSLQNGQQITSLSESETYKYLGYIQSKNVHHDQIKSSLTQEFKRRLNLVLKTQLNSRNLIKAINTFAIPLLTYSFGIIKWNKADLQKLQRTVNTLMTNTRKHHPRSCVQRLTIPRAEGGRGLIDILNLHNKQIKTLRTYFYSKLFTSNLHNIIIHNDCRITPLNLYNKTEQKNELLIDIQEKKDQWKQKSLHGRHFQDLHQQHIDKAASNTWLKIGDIFPETEGFMLAIQDQVIETRNYQKYIIKTPNTTDLCRKCSKSSETIQHITGACVAIVQSDYKHRHDQIANVIHQKMALQYKLINDEPLPYYKYSPKLVLENATHKLYFDRAILTDKTVHYNRPDITLIDKTNKIAQIIDIAIPNTHNIQSTITEKLTKYTELKEEITRMWHLKQVNIIPIVLSTTGVIPKQLHTALTSLKLPPTTYITMQKAAVLNTCRIVRKFMQTE

SEQ ID NO: 18423 - protein, 1012 aa, Telicota sp.
MFIRKPSISSKIDVPPSENIYPNKKLQNIFFKIVHFINSKVLPQFINNDIDFNIFQTVIYCAAWTAAKINGSKLKLIENTQNLKTNCSKMKWQLRLEKKIADLRAKIGKLTQYINGNRRKKLVTQVKMILEKFKIHTIHEETNSELIEYLDTLKQKLSVAASRLRRYTACTLRKTQNNQFKNNEKQFYRTLKNSKANQTPKCKRHPIPEDLKRFWSSVWEEPVNHNKNAHWIQEEKDSNLNIDEMNFENISIEIFQDVIKKLHNWKTPGSDHIHNFWYKKFDYIHPFLYNHINRFIKHPNTMPTYITEGTTYLLPKDCNDLTNPAKYRPITCLQTIYKIITTCITQVIYKHIEDNKILTEQQKGCRKFSYGCKEQLIIDAVILKHSNKVKTDLFSMFIDYRKAYDSVPHSWLLEVLYIYKIHPSIIAFLQNTMSKWQTKLNLPLDDKLILTEAIKINRGIFQGDALSPLWFCLALNPLSKNLNKMNIGYTLKYSTTESKSNTNIRGEVIHNHLLYMDDLKLYATSETDLNQLADLTEIFSLDICMQFGVDKCKINSHKSGQNYKHQFSLQNGEQITSLNDNEAYKYLGYNQSQNVHHEQIKNTLTEEFKRRLNLILKTQLNSRNLIKAINTFAIPLLTYSFGIIRWKKAELQKLQRTINIHMTKFRKHHPRSCVQRLTIPRAEGGRGLIDILNLHNKQVTTIRTYFYNKTSTSDLHNAIVNNDRRITPLNLSNKNSQKNEILINIQGKKDLWKQKSLHGRHYQDLHQQHIDIVASNAWLQIGDIFPETEGFMLAIQDQVVETKNYQKYIMKTPNAPTDLCRKCNKASETIQHITGACVAIAQSDYKHRHDQVANIIHQKLALKFKLIKDKQMPYYKYSPKLVLESNTHKLYFDRAILTDKTVHYNRPDITLIDKINKTAQIIDIAIPNTHNLQCTINEKISKYAELKDEMARMWHLKKINITPIVLSTTGVIPKQLHASILSLNLPRKTYITMQKAAILNTCRIVRKFMQTE

SEQ ID NO: 18424 - protein, 1376 aa, Epargyreus clarus
MKKSPIKYNLRPRSGRDRGLPQAKEGSSSSSDCRGSNGLFMSIKPTNEVEISDTDSNVSLFSSLPSPSSSHNSSSSSFSPSPTSSSNINIALEDVAQKANLQATMTAPTTNVLNKRRKWSNEMNQFILRTYFILTKMETDNSTYLPQLHSKFLDRFPDMTVSRQRVGDQRRAIIRSKLLPQDTIDEIHKEAQDELQHLTENYTQHSTQNNLNTVPNQQLKRMKWTQEYNETIIRAYFRITELEANLTNYRTQLYEDFINKFPHLNHLSEQRIADQRRVIINNKLIKDERLQIIKQEVANDLNTTHNMETQQDNSFIHNNSLLSDTNIDINHTCTTEPPTELSSNSNMNTGGIDICIKETFQEAFDFFKNTSATERIYIPKQKTSKYLFKIVNFINSEILPHIINDDTDFWTLQTIIYCSAWTAAKLNGSNLKLTTQVMNQCRNKMKMRWQIRLENKVKDLRVKIGRLTQYINGNRNKKLSTQVEAILDNYKIHTIHEDTNKDLTEFLDTLKQKLSVASSRLRRYKECTLRKTQNKQFNFNEKQFYRTLKDNNINENSKNVQYPTSDNLKTFWTDIWDDNVTHDKNASWIQAEIEQNLQTREMQFRNIPSETFQNVIKNLHSWKTPGSDYIHNFWYKKFTYMHPFLYKYINQFVKDPSSMPNYITVGTTNLLPKDFNNLKDPDKYRPITCLQTIYKIITSCLTHIIYKHIEDNNILTEQQKGCRRFSYGCKEQLIIDHPLSVILKQVQKNKSDLYTMFIDYKKAYDSVPHSWLLEVLGIYKIHPLVISFLKNTMSNWETRLKLTLNNQTIETQPIKIKRGIFQGDALSPLWFCLALNPLSNKLNSLNVGCKLISSIKSDNLIINKEIKHNHLLYMDDLKLYASSENDLNQLADITEKFSLNICMRFGIDKCKISSFQDGQQHLHHFSLQNGEQISPLMQNDVYKYLGYNQSKSIHYSEIKLNLTKEFKCRLNVILKTQLNSRNLIKAINTYAIPLLTYSFGVINWTKTDLQKLQRTININMTKHRKHHPRSCTPRMTLPRAERGRGLVDIFNLHIKQIINLRTYFHNKIDISSLHSAIIHNDRRLTPLNLYSKTLQKHQKPVDVQTKRNQWKYKSLHGRHFHDLDQPHVDSKASNTWLRIGDIFPETEGFMVAIQDQIIETRNYRKHIIKVPNISTDLCRKCNRASETIQHITGACVSIVQTDYKHRHDQVAHIIHQKLALQYKLIDIEPLPYYKYLPKTVLENSTHKLYFDRAILTDKTVHYNRPDITLIDKINKTAQIIDVAIPNTHNLQNTIAEKLSKYTELRDEIIRMWQLKTVNIVPIVLSTTGVIPKQLHISLESLHLSANTYINMQKAVILNTCRIVRKFLQTDKDTHLT

SEQ ID NO: 18425 - protein, 1403 aa, Autochton zarex
MKKTFIKYNLRPRSGRDRGLPQAEEGCSRNDGGDSNRLFINPMNTAEVSDRDSTVSLFSSLSSSNSSHNSFSFASSSSLSPSPNSSSNYNIVLEDVAQEANLAKKTAPTTNTQNKRKKWTKEMNQFIIRTYLILTKMETDNNSYLPELHTKFLENFPNMIVSRQRIGDQRRAIMRNKYLPQTTIDQIYKEAQEESQHIYTQQSSQNNLNIIPQQPPKRMKWTQEYNETIIRAYLRITELETNLTNYRPQLHQDFINKFPHLNHLTEQRIADQRRVIINNKLVKDERLQVIKQEVANDLQMTDNTETHVNNTLINNNNLPPQLDINSSLSCTTEQSNECNLNRNQNTKQIDILIKETFNEAFDFFKNTSPTERMYIPKQKTSKYLFKIINFINSEILPKKINEHTEFCTLQTIIYCSAWTTAKLNGSNIKLTTQVNQNRNKIKMKWQIRLENKVKDLRVKIGRLTQYIKGNRNKKINKHIEAILKNYKIHTIHEDTNKELTDFLDTLKQKLSVAASRLKRYKDCTLRKTQNKQFTLNERQFYRTLKDDNIRETNKIFQYPTAENLKNFWTSIWEDTATHNTNASWIRTERENNLHVNEMQFQDIPSEIFQNVIKNLHSWKTPGSDYIHNFWYKKFTYMHLYLYKYINQFIKNPGSMPNYITLGTTYLVPKDFNNLTDPDKYRPITCLQTIYKIITTCLTQVIYKHIEDNNILTEQQKGCRKFSYGCKEQLIIDSVILKQAQKYKTDIYTMFIDYKKAYDSVPHSWLIQVLDFYKIHPLVISFLQDTMANWETRLKLTLNNKTIETEPIKIKRGIFQGDALSPLWFCLALNPLSNKLNSMNIGYNLKTDIKSTNLNINKEIRHNHLLYMDDLKLYASSEPDLNHLADTTEKFSLDICMRFGVNKCKISSFKAGQYHQHQFNLQSGEQINSLMENDVYKYLGYNQSKNIEHNQIKIGLTKEFKRRLTLILKTQLNSRNLIKAINTYAIPLLTYSFGVISWTKTDLQKLQRTININMTKYRKHHPRSCIQRMTLPRAEGGRGFIDIYNLYIKQITSLRTYFQNKINTSNLHNAIVHNDRRLTPLNLNSKTLQKHEKTIDIQMKRNQWKIKALHGRHFHDLEQPHVDKKASNTWLRIGDIFPETEGFMMAIQDQIIETRNYQKHIMKIPNISTDLCRKCNRASETIQHVTGACVSIVQTDYKHRHDQVAHIIHQKLALQYKLIDNEPLPYYKYLPKTVLENSTHKLYFDRAILTDKTVHYNRPDITLIDKHNKTAQIIDVAIPNTHNLQSTITEKLAKYTELRDEITRMWQLRTVNIIPIVISTTGVIPIQLHTSLKSIHLSANTYINMQKAVILNTCRIVRKLLQTTRNKQTLSTLIAPKKDFLDRTHKDEYTNTQTQKRNLNSSNS

SEQ ID NO: 18426 - protein, 1366 aa, Urbanus proteus
MKKSPIKYNLRSRNGRGRGLPQVEEGCSSNDGKDSNLSFKSTNVRTNTAEISDTDSNVSLFSSLPSSSSSHNSSSSSSSFSPSSFPSLNINRVLEDVAQEANLAKNTAPTTNALNKRKKWSSDMNEFILRTYLILTKMETDNNTHLPQLHTKFIEKYPSMTVSRQRVGDQRRAIIRNKLLPQATIDRIYSETREELQHTTVNNTHSSQNNLNNPCQPLKRMKWTQEYNETIIRAYLKITELETNLTNYRTQLHQNFINKFPHLSHLTEQRIADQRRVIINNKQIKDERMRIIRQEVANDLKMTENMETQENNTFIQNIDINNSIMHRTEQPVESLLDTNQNTQEADIQYIRETFKEAFDYFKNTTPTERIYIPKQKTSKYLFKIINFINSEILPEIINENTDFYTLQTAIYCSAWTAAKLNGSNIKLTTQGVNKNRSEIKMKWQIRLENKISDLRVKIGRLTQYIKGNRNKKLNVHVESILNSYKIHTTHEDINKELTEFLDTLKQKLSVAASRLKRYKECTLRKTQNKQFTLNEKQFYRTLKDNNIIEANKIDQYPMSEDLKNFWSNIWEHPVTHNKNASWIRTERDNNKHNREMLFQDIQPEIFENVIKYLHSWKTPGSDHIHNFWYKKMTYIHPFLHKYINKFIKNPSCMPNYITVGVTYLLPKDYNNLTDPDKYRPITCLQTIYKIITSCLTQVIYKHIEDNNILTEQQKGCRRFSYGCKEQLIIDSVILKQVQKNKTDLYTMFIDYKKAYDSVPHSWLLEILDIYKIHPVVISFLRSTMSNWETRLKLTLNNTTIQTESIKIKRGIFQGDSLSPLWFCLALNPLSNKLNSIKIGYKLKCNINATNSIINKEIHHNHLLYMDDLKLYASSEKDLNRLADVTEKISFDICMRFGIDKCRISSFKAGQHHQHQYNLQNGEQINSLVDNDVYKYLGYNQSKSIHHNEIKLSLAEEFKRRLKLILKTQLNSRNLVKAINTYAIPLLTYSFGVITWTKTDIQKLQRTININMTKYRKHHPRSCTQRMTLPRVEGGRGFIDIYNLHIKQLTSLRTYFRNKVNTSSLHNAIVNNDRRLTPLNLYSNTLQKHEKPVDTQMKRMQWKNKSLHGRHFRDLEQPHVDNKASNTWLKIGDIFPETEGFMVAIQDQIIETRNYQKHIMKIPNMSTDLCRKCNRASETIQHITGACVSIVQTDYKHRHDQVAYIVHQKLALLYKLIDNDPIPYYKYLPKTVLENSTHKLYFDRAILTDKTVHYNRPDITLINKHNKTAQIIDIAIPNTHNLQSTIAEKLSKYTELRDEITRMWQLKTVNIIPIVLSTTGVVPKQLHTSLKSIQLPANLYINMQKAVILNTCRIVRKFLQTDKDTLT

SEQ ID NO: 18427 - protein, 1366 aa, Cecropterus toxeus
MKKSTIKYNLRSRSGRDRGLPQTKEGCSRKDGRDSNTAEVTDTESNVSLFSSIPSLYSSHNSLSSSSLLSPSPILSSNINIVLGDVAQEANLAKIPAPTTNTLNKRRKWSKEMNQFIIRTYLILTKMETDNSSYLQKLHSKFLENFPHITVSRQRIGDQRRAIMRNKLLPQATIDRIYKEAQEQLQHHTENFTELSSQNNLNIMPQQPPKRMKWTQEYNETLIRAYFRITELETNLTNYRSQLHQDFVNKFPHLNHLTEQRIADQRRVIINNKLVKDERLQIIKQEVANDLQISNNIETQENNTLTHTNSLLPQLDTSNSQNCSIEQPKECHKNTNQSTKQIDICIKETFNEAFDFFKNTNPTERIYIPKQKTSKYLFKILNFINSEILPQKINEETDFDTLQTVIYCSAWTAAKLNGTNLKLTPQVLNQRSSKMKMKWQIRLENKVKDLRVKIGRLTQYIRGNRNRNLNIHIEAILKNYKIHTIHEDTNKELTDFLDTLKQKLSVVASRLKRYKDCTLRKTQNKQFTLNEKQFYRTLKDNNMSETNNFFQYPKSEDLKKFWTSIWDDTAAHNTNASWICTERENNSHINKMQFDDIPSETFQNVINKLHSWKTPGSDYIHNFWYKKFTYMHSFLYKYINQFIKDPGSMPNYITLGTTYLVPKDYNNLTDPDKYRPITCLQTIYKIITSCLTQIIYKHVEDNNILTEQQKGCRKFSYGCKEQLIIDSVILKQVQKYKSDLYTMFIDYKKAYDSVPHSWLLQVLDIYKIHPLVISFLQETMTNWETRLKLTLNNKTIETEPIKIKRGIFQGDALSPLWFCLALNPLSNKLNSINIGYKLKSNIKTTNPIINKEVLHNHLLYMDDLKLYASSELDLNQLADTTETFSLDICMRFGINKCKISSFKAGQHHQHHFNLQSGEQINSLMENDVYKYLGYNQSKNIEHNQIKFTLTEEFKRRLTLILKTQLNSRNLIKAINTYAIPLLTYSFGVISWTKTDLQKLQRTINTNMTKYRKHHPRSCTQRMTLPRAEGGRGCIDIYNLYIKQLTNLRTYFQNKINTSSLHNAIVHNDRRLTPLNLNSKTLQKHEEIVNIQMKKNLWKKKALHGRHYHDLEQPYVDNKASNTWLRIGDIFPETEGFMVAIQDQIIETRNYQKHIMKIPNISVDLCRKCNRASETIQHITGACVSIVQTDYKHRHDQVAYIIHQKLALQYKLIDSDPLPYYKYLPKTVLENTTHKLYFDRAILTDKTIHYNRPDITLIDKQNKTAQIIDIAIPNTHNLRSTITEKLSKYTELRDEITRMWQLKTVYIIPIVVSTTGVIPTQLHTALKSIHLSANTYISIQKAVILNTCRIVRKFLQTDKDINIYSDT

SEQ ID NO: 18428 - protein, 1374 aa, Cecropterus confusis
MKKSPIKYNLRPRCGRDRGVPQVEEGCSRNDGGDSDRLVKSIKPANTAGISDTESNVPLFSSNSSHNSFSSASSSLLSPSSILSSNSNIVLEDVAQEANLAKKAGPTTNTLNKRRKWSKEMNQFIIRTYLILTKMETDNSSYLPKLHSKFLENFPNMNVSRQRIGDQRRAIIRSKLLPQATINRIYKEAQDQLQHHTENYTQQSSQNNLNSMPQQPTKRMKWTQEYNETIIRAYFRITELETNLTNYRSQLHQDFINKFPHLNHLTEQRIADQRRVIINNKLVKDERLQVIKQEVANDIQITNNVDTQENNTSTHTNSLLPHLDTSNSLNCRIEQPKECHTNTNQHTKQIDICIKETFNEAFDFFKNTNPTERIYIPKQKTSKYLFKIINFINSEILPQKINEETDFYSLQTVIYCSAWTSAKLNGSNLKLATQTLHQNRNKMKMKWQIRLENKVKDLRVKIGRLTQYIKGNRNRNLNIHIEAILKNYKIHTIHEDRNQELADFLDTLKQKLSVAASRLKRYKDCTLRKTQNKQFTLNEKQFYRTLKDNTKSNKIFQYPTSEDLKTFWSSIWEDNVTHNTNASWIHTERENNLHINQMQFQDIPSETFQNVIKNLHSWKTPGSDYIHNFWYKKFTYMHSFLYKYINQFIKDPGSMPNYITLGTTYLVPKDYNNLTDPDKYRPITCLQTIYKIITSCLTQIIYKHIEDNNILTEQQKGCRKFSYGCKEQLIIDSVILKQVQKYKTDLYTMFIDYKKAYDSVPHSWLLQILGIYKIHPLVISFLQDTMTNWETRVKLTLNNKTIETEPIKIKRGIFQGDALSPLWFCLALNPLSNRLNSINIGYKLKSNIKTTNPIINKEILHNHLLYMDDLKLYASSERDLNQLADTTENFSYDICMRFGINKCKISSFKAGHHHQHNFNLQSGEQINSLMENDVYKYLGYNQSKNIEHNQIKSSLTEEFNRRLTLILKTQLNSRNLVKAINTYAIPLLTYSFGVISWTKTDLQKLQRTIHINMTKYRKHHPRSCIQRMTLPRLEGGRGFIDIYNLYIKQLTNLRTYFQNKKNTSSLHNAIIHNDRKLTPLNLNSKSSQKHEEIVDIQMKINQWRNKTLHGRHYHDLEQPHVDNKASNTWLRVGDIFPETEGFMVAIQDQIIETRNYQKHIMKIPNISTDLCRKCNRASETIQHITGACVSIVQTDYKHRHDQVAHIIHQKLALQYKLIDNDPLPYYKYLPKTVLENSTHKLYFDRAILTDKTIHYNRPDITLIDKHNKTAQIIDIAIPNTHNLQSTIAEKLSKYTELRDEITRMWRLKTVNIIPIVVSTTGVIPTQLHTALKSIRLSANTYINIQKAVILNTCRIVRKFLQTDKDINIHSDLQK

SEQ ID NO: 18429 - protein, 1372 aa, Epargyreus clarus
MKKSPIKYNLRPRSGRDRGLPQAKEGCSSSDGRGSNGLFKSIKPTNEVEISDTDSNVSLFSSLPSPSSSHNSSSSSFSPSPTSSSNINIALEDVAQKANSQATKTAPTTNVLNKRRKWSNEMNQFILRTYFILTKMETDNSTYLPQLHSKFLDRFPDMTVSRQRVGDQRRAIIRSKLLPQDTIDKIHKEAQDELQHLTENYTQHSTQNNLNTVPNQQLKRMKWTQEYNETIIRAYFRITELEANLTNYRTQLYEDFINKFPHLNHLSEQRIADQRRVIINNKLIKDERLQIIKQEVANDLNTTHNMETQQDNSFIHNNSLLSDTNIDINHTCTTEPPTELSSNSNMNTGGIDICIKETFQEAFDFFKNTSATERIYIPKQKTSKYLFKIVNFINSEILPHIINDDTDFWTLQTIIYCSAWTAAKLNGSNLKLTTQVMNQCRNKMKMRWQIRLENKVKDLRVKIGRLTQYINGNRNKKLSTQVEAILDNYKIHTIHEDTNKELTEFLDTLKQKLSVASSRLKRYKECTLRKTQNKQFNFNEKQFYRTLKDNNINENSKNVQYPTSGDLKTFWTDIWEDNVTHDKNASWIQAEIEQNLQIREMQFQNIPSETFQNVIKNLHSWKTPGSDYIHNFWYKKFTYMHPFLYKYINQFVKDPSSMPNYITVGTTYLLPKDYNNLKDPDKYRPITCLQTIYKIITSCLTHIIYKHIEDNNILTEQQKGCRRSSYGCKEQLIIDSVILKQVQKNKSDLYTMFIDYKKAYDSVPHSWLLEVLGIYKIHPLVISFLKNTMSNWETRLKLTLNNQTIETQPIKIKRGIFQGDALSPLWFCLALNPLSNKLNSLNVGYKLISSIKSDNLIINKEIKHNHLLYMDDLKLYASSENDLNQLADITEKFSLDICMRFGIDKCKISSFQAGQQHLHHFSLQNGEQISPLMQNDVYKYLGYNQSKSIHYSEIKLNLTKEFKHRLNVILKTQLNSRNLIKAINTYAKPLLTYSFGVINWTKTDLQKLQRTININMTKHRKHHPRSCTQRMTLPRAEGGRGLVDIFNLHINQIINLRTYFHNKIDISSLHSAIVHNDRRLTPLNLYSKTLQKHQKPVDVQTKRNQWKYKSLHGRHFHDLEQPHVDSKASNTWLRIGDIFPETEGFMVAIQDQIIETRNYRKHIIKVPNISTDLCRKCNRASETIQHITGACVSIVQTDYKHRHDQVAHIIHQKLALQYKLIDIEPLPYYKYLPKTVLENSTHKLYFDRAILTDKTVHYNRPDITLIDKINKTAQIIDIAIPNTHNLQNTIAEKLSKYTELRDEIIRMWQLKTVNIVPIVLSTTGVIPKQLHISLESLHLSANTYINMQKAVILNTCRIVRKFLQTDKDTHLT

SEQ ID NO: 18430 - protein, 1371 aa, Telegonus cellus
MKKSPKKYNLRPRNGKERGLPQAEEGCSSNDGRDSNRLFNSTNVRTNTAEISDTDSSVSLFSSLPSSSSSHNSSSSSSLLSPSPFPSSNINIVLEDVAQEANLAKNTAPTTNALNKRRKWSKEMNEFILRTYLILTKMETDNSTYLPQLHSKFLEKYPSMTVSRQRVGDQRRAIIRSKLLPQATIDRIYNETQGELQHHTGNYTQQSSQNNLNIIPCQPPKRMKWTHDYNETIVRAYFKITELETNLTNYRTQLHQDFIKKFPHLNHLTEQRIADQRRVIINNKLIKDERLLIIRQEVANDLQMTDNIETQENNTLIHNIDINNSIIHRVEQPIESHSNTNQNTQEIDVCIKETFKEAFDFFKNTTPTERIYIPKQKTSKYLFKIINFINSVILPEIVNENTDFCTLQTAIYCSAWTAAKLNGSNIKLTTQVVNQNRNKMKMKWQIRLENKVKDLRVKIGRLTQYIKGNRNRKLNIHVESILNSYKIHTIHEDTNKELTDFLDTLKQKLSVAASRLKRYKECTLRKTQNKQFTLNEKQFYRTLKDNNINKANKNVQYPTSDVLKQFWTNIWEDTVTHNENASWIRTEGENNKHTSEMQFQDIQSEIFHNVIKNLHSWKTPGSDYIHNFWYKKITYMHPFLYKYINQFIKDPTSMPNYITTGVTYLLPKDYNNLIDPDKYRPITCLQTIYKIITSCLTQVIYKHAEDNNILTEQQKGCRRFTYGCKEQLIIDSVILKQVQKSKTDLYTMFIDYKKAYDSVPHSWLLQVLDIYKIHPVVISFLQNTMANWETRLKLTLNNTTIETGPIKIKRGIFQGDSLSPLWFCLALNPLSNKLNSINVGYKLKSNTNTSNSIINKEILHNHLLYMDDLKLYASSENDLNHLADTTEKMSFDICMRFGIDKCKISSFKAGQHHQHQYNLQNGEKINSLIDSDFYKYLGYNQSKSIHHNEIKLTLTKEFKRRLNLILKTQLNSRNLIKAINTYAIPLLTYSFGVISWTKTEIQKLQRTININMTKHRKHHPRSCTQRMTLPRVEGGRGFVDIYNLHIKQLTNLRTYFQNKLNTSSLHSAIVHNDRRLTPLNLYSKTLQKHEKPVDIQMKRNQWKNKSLHGRHFHDLEQPHVDNKASNTWLKIGDIFPETEGFMMAIQDQIIETRNYQKHIMKIPNMSTDLCRKCNRASESIQHITGACVSIVQTDYKHRHDQVAHIIHQKLALQYKLIDNGPIPYYKYLPKTVLENPTHKLYFDRAILTDKTVHYNRPDITLIDKHNKTAQIIDIAIPNTHNLQSTIAEKLSKYTELRDEITRMWQLKTVNIIPIVLSTTGVIPRQLHTSLKSLYLSDNTYINMQKAVILNTCRIVRKFLQTDKDTLISQLT

SEQ ID NO: 18431 - protein, 1373 aa, Epargyreus clarus
MKKSPIKYNLRPRNGRDRGLPQAKEGSSSSSDGRGSNGLFKSIKATNEVEISDTDSNVSLFSSLPSPSSSHNSSSSSFSPSPTSSSNINIALEDVAQEANLQATKTAPTTNVLNKRRKWSNEMNQFILRTYFILTKMETDNSTYLPQLHSKFLDRFPDMTVSRQRVGDQRRAIIRSKLLPQDTIDRIHKEAQDELQHLTENYTQHSTQNNLNTVPNQQHKRMKWTQEYNETIIRAYFRITELEANLTNYRTQLYEDFINKFPHLNYLSEQRIADQRRVIINNKLIKDERLQIIKQEVANDLNTTHNMETQQDNSFIHNNSLLSDTNIDINHTCTTEPPTELSSNSNMNTGGIDICIKETFQEAFDFFKNTSATERIYIPKQKTSKYLFKIVNFINSEILPHIINDDTDFWTLQTIIYCSAWTAAKLNGSKLKLTTQVMNQCRNKMKMRWQIRLENKVKDLRVKIGRLTQYINGNRNKKLSTQVEAILDNYKIHTIHEDTNKELTEFLDTLKQKLSVASSRLKRYKECTLRKTQNKQFNFNEKQFYRTLKDNNINENSKNVQYPTSDDLKTFWTDIWEDNVTHDKNASWIQAEIEQNLQTREMQFQNIPSETFQNVIKNLHSWKTPGSDYIHNFWYKKFTYMHPFLYKYINQFVKDPRSMPNYITVGTTYLLPKDYNNLKDPDKYRPITCLQTIYKIITSCLTHIIYKHIEDNNILSEQQKGCRRFSYGCKEQLIIDSVILKQVQKNKSDLYTMFIDYKKAYDSVPHSWLVEVLGIYKIHPVVISFLKNTMSNWETRLKLTLNNQTIETQPIKIKRGIFQGDALSPLWFCLALNPLSNKLNSLNVGYKLMSSMKSDNLIINKEIKHNHLLYMDDLKLYASSENDLNQLADITEKFSLDICMRFGIDKCKISSFQAGQQHLHHFSLQNGEQISPFMQNDVYKYLGYNQSKSIHYSEIKLNLTKEFKRRLNVILKTQLNSRNLIKAINTYAIPLLTYSFGVINWTKTDLQKLQRTININMTKHRKHHPRSCTQRMTLPRAEGGRGLVDIFNLHIKQIINLRTYFHNKIDISSLHSAIVHNDRRLTPLNLYSKTLQKHQKPVDVQTKRNQWKYKSLHGRHFHDLEQPHVDSKASNTWLRIGDIFPETEGFMVAIQDQIIETRNYRKHIIKVPNISTDLCRKCNRASETIQHITGACVSIVQTDYKHRHDQVAHIIHQKLALQHKLIDIEPLPYYKYLPKTVLENSTHKLYFDRAILTDKTVHYNRPDITLIDKINKTAQIIDIAIPNTHNLQNTIAEKLSKYTELRDEIIRMWQLKTVNIVPIVLSTTGVIPKQLHISLESLHLSANTYINMQKAVILNTCRIVRKFLQTDKDTHLT

SEQ ID NO: 18432 - protein, 1323 aa, Venada nevada
MKKSPIKYNLRPRCGTQRGLPQTREGGSRNDGSNCSRRFNNVEPMNPAEISGTDSNVSLFSSLPSSISSHSSFSSSSSSSLSLSSVPPSNINLVPEDVVQEANFAEKTVPTTDILNKRRKWSKEMNQFILRTYLILTKMETDNSTYLPQLHSKFIENFPDMNVSRQRVGDQRRAIIRSKLLSQETIDRIYKEAQEELQNITVNYTQQSRQSSQNNLHTMTNQPFQRMKWTQEYNEAIIRAYFRITELETNLTNYRTQLHQDFLNKFPHLSHISEQRIADQRRVIINNKRIKDERLQVLKQEVANDLQKNNSIQTQMNNRVSKSNNESSNTNTDTNFLYTTEQSTECSSDTSKNTKNIDVSIKETFQKAFNYFKNTIPTERMYIPKQKTSKYLFKIINYINIELLPQMINTNTDFCTFQTILYCSAWTAAKLNGSNLKLTTQVRNQNSNKMKWQLRLENKVKDLRVKIGRLTQYIKGNRNKNVTTQVKAILENYKIHTIHEDVNKDLTDFLDTLKQKLSVAASRLKRYNECTLRKYQNTQFTLNEKHFYRTLKNSQTNKIIEYPSSEELKAFWTNIWGNSVTHNKNASWISTEKDNNLHTNEMQFQNIPTETFQKVIKNLHSWKTPGSDYIHNFWYKKFTYMHPFLCKYINNFIMDPTSMPNYITVGTTYLLPKDYNNLRNPDKYRPITCLQTIYKIMTSCLTDIIYKHIEDCKIFTEQQKGCRRFSYGCKEQLIIDSVILKQAQKHKKDLYTMFIDYKKAYDSVPHSWLIQVLTIYKIHPVVISFLQKAMSNWETRLKLTLNNKTIETEPIKIKRGIFQGDAFSPLWFCLALNPLSNKLNSINNGYKLKYNIKNTSSGINKGHRHNHLLYMDDLKLYASSETELYQLADITEKISLDICMRFGIDKCKINSFKSGQHHLHYFNLQNGEQISPLLENDVYKYLGYNQSKSIHHREIKLNLTKEFKRRLNIILKTQLNSRNLIKAINTYAIPLLTYSFGVISWTKADLQKLQRTINTHMTKHRKHHPRSCTQRMTLPRMEGGRGFIDIFNLYIKQITNLRAYFQNKMNTSTLHNAVVHNDRRLTPLNLYSNTLQKHHKPVDIQTKLNKWKDKSLHGRHFNDLHQSHNDKIASNAWLRFGDIFPETEGFMVAIQDQIIETRNYQKHIMKLSNISTDSCRKCNRASETIQHITGACVSIVQTDYKHRHDQVAYIIHQKLALEYKLIDDDPVPYYKYSPRTVLENSTYKLYFDRAILTDRTVHYNRPDITLINKHNKTAQIIDIAIPNTHNLQSTIAEKLSKYTELRDEITRMWQLKTVNIIPIVIST

SEQ ID NO: 18433 - protein, 1363 aa, Anisynta dominula
MNKSKSKSKPKRKPNKDIQTKVKTYNLRPRNDRHLKSSTSVAVISDTESDASLFSSVPSPITSHKSFTLYSNSPSSSSNTSIVMEDVAQEANPAGITVPTTNTLNKRNKWSSEMNQFILRTYLIITKMETDNKHTYLQILHSKFLEQFPDMAVSRQRVGDQRRAIMRSKLLPQVTIDNIYQEIREKLQIPSETYIQQGNEHIRCAQPLQRMKWTQEYNEAIMRAYFRVTELETNLTNYRKQLHQEFISKFPQLKHVTEQRIADQRRVIIHNRRINDDRLRIIKQEVANEIQTISEVGKEPVENMQANHSQNNIGNDANFLSRIEPECMTEINNTNIDTSHALDSTIRETFQKAFEFFRDTSPIKRIYIPRQKMSTYFFKVINFINSKILPEALNTNTDFSTFQTIIYCAAWTAAKMNGSKIKLTEQDPNQTSKNIKMKWQIRLEKKVEDLRIKIGRLTQYIHGNRSKNVVTHVNAILNNYKIHTTHEEVNKELNDFLDTLKQKLSVTASRLKRYKECNNRKMQNSQFITNEKQFYRTLKNKRINQTSKSTSYPLAEDLKNFWAKIWEKPVTHNRNACWISEEKENHSQIREMLFENISAEILQNVIKHLQNWKTPGSDFIHNFWYKKFTYIHPFLHEHINRFIKDPSSIPSYITVGTTYLLPKDNSDLADPAKYRPITCLQTIYKIITSCLTQLIYKHVEDNNILTEQQKGCRKFSFGCKEQVIIDSVILKQNQKYKTDLYTMFIDYRKAYDSVPHSWLLEVLHIYNINPSIIFFLQNIMTKWETRLKLSVNNKSIETEAIKVKRGIFQGDALSPLWFCLALNPLSNKLNLTNHGYILKYNSTDTNLLLTQKIIHNHLLYMDDLKLYASSEVGLNQLAEITERFSVDICMHFGMDKCRINSFKGGQHYQHHFGLINGEQITPLNENEVYKYLGYNQSKDIHHEEIKLKLKHEFQHRLNLVLKTQLNSRNLIKAINTYAIPLLTYSFGVISWTKNDLQKLQRTINTYMTKHRKHHPRSCTQRLTLKRVEGGRGLVDIYNLHSKQITTMRRYFHSKMSTSNLHNAIVHNDRRITPLNLYSKTAHKYEKLIDSQEKKDLWKQKSLHGRHFQDLHQQHVDNVASNTWLKIGNIFPETEGFMLAIQDQIIETRNYQKFIIKIPNLSSDLCRKCNRASETIQHITGACVSIVQTDYKYRHDQVASIIHQKLALRYKLIEDKPTPYYKYIPKTVIENTTHKLYFDRAILTDKTVHYNRPDITLIDKINKTAQIIDIAIPNTHNLQSTITEKISKYTELRDEIRRMWHLEKVNIVPIVVSTTGVVPKQLHAALKCINLSPSTYINMQKAVVLNTCRIVRKFLQTDNDNIRM

SEQ ID NO: 18434 - protein, 1364 aa, Urbanus esmeraldus
MKKSPIKYNLRSRNGRGRGLPQVEEGCSSNDGRDSNSLVNSTNARTNTAEISDTDSNVSLFSSLPSASSSHNSSSSSFSPSPFPSSNINRVLEDVAQEANLANNTAPTTNALNKRKKWSNEMNEFILRTYLILTKMETDNNAYLPQLHTKFIEKFPSMIVSRQRVGDQRRAIIRRKLLPQATIDRIYNETQEELQHTTVNYTLHSSQNNLNIIPCQPLKRMKWSQEYNETIFRAYLKITELETNLTNYRTQLHQHFINKFPHLSHLTEQRIADQRRVIINNKQIKDERMRIIRQEVANDLKTADNIKTQENNTFIQNIDTNIIHRIEQPVENLIDTNQNTHETDIQYIRVTFKEAFDFFKNTTPTERIYIPKQKTSKYLFKIINFINSEILPEIINANTDFHTLQTAIYSSAWTAAKLNGSNIKLTTQGVNKNRNKIKMKWQIRLENKIRDLRVKIGRLTQYIKGNRNKKLNIHIESILNSYKIHTIHEDTNKELTEFLDTLKQKLSVAASRLKRYKECTLRKTQNKQFTLNEKQFYRTLKDNNINEANKVDQYPNPEGLKNFWSNIWEHPVTHNKNASWIRAERENNIHTSEMQFQDIQFEIFESVINNLHSWKTPGSDYIHNFWYKKMTYIHPFLHKYINKFIKNPSCMPNYITVGVTYLLPKDYNNLTDPDKYRPITCLQTIYKIITSCLTQVIYKHIEDNNILTEQQKGCRRFSYGCKEQLIIDSVILKQVQKNKSDLYTMFIDYKKAYDSVPHSWLLEILDIYKIHPVVISFLHSTMSNWETRLKLTLNNTTIQTEPIKIKRGIFQGDSLSPLWFCLSLNPLSNKLNSTNIGHKLKSNINKTNSIINKEILHNHLLYMDDLKLYASSEKDLSLLADATEKISIDICMRFGIDKCKISSFKAGQQHQHQYNLENGEQINSLVDNDVYKYLGYNQSKNIHHSEIKLTLANEFKRRLNLILKTHLNSRNLIKAINTYAIPLLTYSFGVISWTKADIHKLQRTININMTKHRKHHPRSCTQRMTLPRVEGGRGFIDIYNLHIKQLTSLRTYFHNKVDTSSLHNAIVHNDRRLTPLNLYSNTLRKHEKPVDTHMKRTQWKNKSLHGRHFRDLEQPHVDNKASNTWLKIGDIFPETEGFMVAIQDQIIETRNYQKHIMKISNMSTDLCRKCNRASETIQHITGACVSIVQTDYKYRHDQVAYIVHQKLALQYKLIDNGPIPYYKYLPKTVLENSTHKLYFDRAILTDKTVHYNRPDITLIDKHNKTAQIIDIAIPNTHNLQSTIAEKLSKYTELRDEITRMWQLKTVNIIPIVLSTTGVIPKQLHMSLKSIQLPANTYINMQKAVILNTCRIVRKFLQTDKDILT

SEQ ID NO: 18435 - protein, 1366 aa, Spathilepia clonius
MQLRSGYKLPQAGTGANRNGESRPELANSGCPTYSGGDTVSQTSAQSSTAADHHHDTESVASVPSTPSTSPFSHSRSHSTTTFSSMRTEDVVQEADPVEHLAPTTASLNTRRKWSKTMNEFILRTYFILTKMETDNSTYLPQLHSKFTEKFPNVIVSRQRIGDQRRAIIRSHLLPQDTIDRIYKEAQEELQHQTENYTQQSSQNNINIVLNQPMKRMRWTQEYNETIIRSYFRITELETNLTNYRAPLHQDFINTFPHLNHLTEQRIADQRRVIINNKLIKDDRLKIIKQEVANDLQITNDTETQKDNRLIDNSLIPKIGIDFNSICTAQQPSEYFSSDNRNIEQINTSIKETFQQAFDFFKNTIPTERIYIPKQKTSKYLFKIISFINSEILPQKINEGTDFCTLQTVIYCSAWTAAKLNGSNLKLTTQVLNQNRNKMKMRWQIRLENKVKDLRVKIGRLTQYIKGNRNRKLSIEVEEIIKKYKIHTIHEDTNKELTDFLDTLKQKLSVAASRLKRYKECTLRKTQNKQFTLNEKQFYRTIDSNISDTIKTVQYPTSEDLKNFWANIWESNGTHDNNASWISTERENHLHTSEMQFQNIPIETFQNVIKKLHSWKTPGSDYIHNFWYKKLTYVHSFLYKYINQFITDPSSMPNYITVGTTYLLPKDYNNLTDPDKYRPITCLQTIYKIITSCLTQIIYKHIEDNNILSEQQKGCRRFSYGCKELLIIDSMILKQVQKHKTDLYTMFIDYKKAYDSVPHSWLLQVLDIYKIHPLVISFLQNTMANWETRLKLTLNSKTIETEPIKIKRGIFQGDALSPLWFCLALNPLSNRLNSTNVGYKLKSYVKNTNSIINKEIRHNHLLYMDDLKLYASSEIDLKQLADITEKFSLDICMRFGIDKCKISSFKAGQQHVHHYNLQNGEQINSLMESDVYKYLGYNQSKNIHHSEIKFSLTKEFKRRLNLILKTQLNSRNLIKAINTYAIPLLTYSFGVISWTKTDLQKLQRTINTSMTKHRKHHPRSCTQRMTLPRVEGGRGLVDIFNLYIKQIINLRTYFQNKMNTSSLHAAIVHNDKKLTPLNLYSKTLQKYQKPVDLQMKRNQWKSKSLHGRHFHDLEQQHVDSKASNTWLRIGDIFPETEGFMLSIQDQIVETKNYQKHIMKIPNLSTDLCRKCNKASETIQHITGACVAIVQTDYKHRHDQVANIIHQKLALLYKLIDNEPVPYYKYIPKTVLENSTHKLYFDRAILTDKTVHYNRPDITLIDKHNKIAQIIDIAVPNTHNLQNTIAEKLSKYTELRDEITRMWQLKTVNIIPLVLSSTGVIPKQLHTSLKSINLSANTYINMQKAVILNTCRIVRKFLQTDKDIHCI

SEQ ID NO: 18436 - protein, 1371 aa, Autochton longipennis
MKKSPIKYKYNLRPRSGRDRGLPEAEEGCSRDDGGDSRGFFKSIKPTNTGEGSDVESNVSLFSSLPSSNSSHISFSSSSSLSPSSVFSSNNNIVLEDVAQEAILAKETAPTTNTQNKRKKWSIEMNQFIIRTYLILTKMETDNSSYLPELHSKFLQNFPNMTVSRQRIGDQRRAIIRGKYLPQATIDRIYKEAQEELQHTLNCTQQSSQIKLNINPQQPPTRMKWTQEYNESIIRAYFRITELETNLTNYRSQLHQVFINKFPHLNHLTEQRIADQRRVIINNKLVKDERLQIIKKEVANDLQITDNIETQVNNTSIHNNSLLPHLNTSNSLNYTVEHPNECHSNTNQNTKQIDIRIKETFNEAFEFFKNTTPTERIYIKYKNLFKIINVINSEILPQKINEDTDFRTFQTMLYCSAWTAAKLNGSNIKLTTQVNQNNNKMKMKWQIRLENRVKDLRVKIGRLTQYIKGNRNKKINIHIEAILKNYQTHTIHEDTNKELTDFLDTLKQKLSVAASRLKRYKDCTLRKLQNKQFSLNEKQFYRTLKDNNISEPNKIFQYPTAVDLKNFWSSIWEDTVTHNTNASWICTERENSSHINEMQFQDIPSETFQNVIKNLHNWKTPGSDYIHNFWYKKFTYTHSFLYKYINQFIKNPGSMPNYITLGTTYLVPKDYNNLTDPDKYRPITCLQTIYKIITSCITQVIHKHVEDNNILTEQQKGCRKFSYGCKEQLIIDSVILKQVQKFKTDLYSMFIDYKKAYDSVPHSWLLQVLDIYKIHPLLISFLQDTMINWETRLKLTLNNKTIETEPIKIKRGIFQGDALSPLWFCLALNPLSNKLNSMNIGYKLKSYIQPTNPVINKEIRHNHLLYMDDLKLYASSQPDLNQLADTTEKFSFDICMRFGINKCKISSFKAGQLYQHNFNLQSGEQINSLMINDVYKYLGYNQSKSIEHNQIKISLTGEFKRRLILILKTQLNSRNLIKAINTYAIPLLTYSFGVISWTKTDLQKLQRTININMTKYRKHHPRSCTQRITLPRAEGGRGFIDIYNLYISQLTNFRTYFQNKIHISSLHNAIVHNDRRLTPLNLNSKTLQKHEKIVDIQMKRIQWKNKSLHGRHFHDLEQPYVDKKASNTWLRIGDIFPETEGFMMAIQDQIIETRNYQKHIMKIPNISTDLCRKCNRASETIQHVTGACVSIVQTDYKHRHDQVAHIIHQKLALQYKLIDNDPLPYYKYLPKTVLENSTHKLYFDRAILTDKTIHYNRPDITLIDKHNKTAQIIDIAIPNTHNIQSTITEKLSKYTELRDEITRMWQLRTIKIIPIVVSTTGVIPIQLHTALKSIHLPANTYISMQKAVILNTCRIVRKFLQTEKDINIYTD

SEQ ID NO: 18437 - protein, 1381 aa, Toxidia parvulus
MSNLNFTHKHIRNNHTKSKTYNLRPRNGRHLKSPHSTSCDSEIDGQYNIEKLTSVAESLDTESNASLFSSVPSPSSSYKSSTLYPNSPSSSSNISIVMEDVAQEAISAAITVPTTNTFNKRKKWSSEMNQFILRTYLIITKMETDNKHTYLQTLHAKFLEQFPDMVVSRQRIGDQRRAIIRSKLLPQVTIEKIYKETREKLKLPSETNTQQQYAHNADNINSTQPPQRMKWTQEHNETIMRAYFKVTDLETNLTNYRKQLHQEFISKFPHLNHITEQRIADQRRVIIHNKRIDDDRLRTLRQEVANEIRKVSDMEAVTVENTLTNNSQNSIDNDENFLSRIEPECMTEVINSDRDTSLTLDRAIRETYQQAFDFFNNTHPTKRMYIPKQKISTHFLKVINFINSKILPEALSTHTDFSTFQTILYCSAWTAAKINGTKLKFPEQEVSQISKNRKLKWQIRLEKKVGDLRIKIGRLTQYINGNRSKNVVIQVNSILKNYKIHTTHEEVNKELNEFLDTLKQKLSVTASRLKRYKECNIRKIQNNQFTTNEKQFYRTLKNKTTSETSKSSSYPLAEDLKKFWANIWEKPVTHNINACWITEEKQSNSHTSEMLFENISTETLQNVIKNLQNWKTPGSDFIHNFWYKKFTYIHPLLHEHINRFIKDPSSIPNYITVGTTYLLPKDTRDLTDPAKYRPITCLQTIYKIITSCITQIIYKHIEENNILTEQQKGCRKFSFGCKEQLIIDSVILKQNQKYKTDLYTMFIDYRKAYDSVPHSWLLEVLNIYKVHPSIIFFLQNIITKWETRLKLTINNKSIETDAIKIKRGIFQGDALSPLWFCMALNPLSNKLNATNLGYALKYNSTNTNLILTSEIIHNHLLYMDDLKLYASSEIELNQLAQITERFSMDICMQFGMDKSRINSFKAGQHYQHQFSLQNGEQITPLNEDEVYKYLGYNQSKNIQHEEIKSKLKHEFKHRLNLVLKSQLNSRNLVKAINTFVIPLLTYSFGIISWTKNDLQKLQRTINTHMTKHRKHHPRSCIQRLTLPRVEGGRGFIDIYNLHSKQITTMRKYFHSKMSTSSLHSAIVYNDRRFTPLNLYNKTWQKCETVIGSQEKKDQWKQKSLHGRHFHDLHQQHVDNVASNTWLKKGDIFPETEGFMLAIQDQIIETRNYQKFIIKIPNLSSDLCRKCNRASETIQHITGACVSIVQTDYKYRHDQVAGIIHKKLALRYKLIDDKQTPYYKYTPKTVLENTTHKLYFDRAILTDKTVHYNRPDITLIDKINKTAQIIDIAIPNTHNLQSTIAEKISKYTELRDEICRMWHLEKVNIVPIVMSTTGVVPKQLHAALKCINLSPNTYINMQKAVILNTCRIVRKFLQTDNDNIRT

SEQ ID NO: 18438 - protein, 1370 aa, Proteides mercurius
MKKSPIKYNLRPRKGRDGDSSQAKEGCSSNGRGSNRLFKSTKPADPAEISDTDSNVSLFSSLPSSSSSHNSSSSSTSLSLSPIPSSNINIMLEDVAQTATLATKTAPTTNISNKRRKWSDEMNEFILRTYLILTKMETDNRTYLPQLHSKFLDKYPDMIVSRQRVGDQRRAIVRTLLPQVTIDKIYKEAQEELQYQTKNDTQQSTQNNLNAMPDQLTRMKWNQEYNETIIRAYFRITELETNLTNYRTQLHQDFINKFPHLNHLSEQRIADQRRAIINNKYITDDRLQIIKQQVANDLQTTNNIETQNDNRLIHNSSSLSNIDNTNFICTTEQPLECLHTTNKNTKELDTSIEKIFQEAFNFFKNTYPTERTYIPKQKTSKYLFYIINFINSEILPQIINEKTDFFVLETGIYCAAWTAAKLNGSNMKLTTQVLSQKRYKTKMKWQIRLENKVKDLRVKIGRLTQYIKGNRSRNLSKEVEAILKNYKIHTIHEDTNKELTEFLDTLKQKLSVASSRLKRYKECTLRKTQNKQFTSNEKQFYRTLKENNTNETINITQYPTSEDLKNFWTNIWEDNITHDKNASWIRTESENNSHTSEMQFQNIPYETFQSVIKNLHNWKTPGSDYIHNFWYKKLTYLHSFLYKYINQFIKDPSSMPKYITVGTTYLLPKDYNNLTNLDKYRPITCLQTIYKIITSCLTQIIYKHIENNNILTEQQKGCRKFSYGCKEQLIIDSVILKHVQKHKTDLHTIFIDYKKAYDSVPHSWLLQVLDIYKVHPLVITFLKNTMASWETRLKLTLNSKTIETEPIKIKRGIFQGDALSPLWFCLALNPLSNKLNSLNVGYKLVSNIKNNNSVINKEIIHNHLLYMDDLKLYASSENDLNQLADITEKFSLDICMQFGIDKCKISSFKAGQQHLHHFDLQNGERINPLMENDVYKYLGFNQSKNIHHTEIKHSLTTEFKCRLNSILKTQLNSRNLIKAINTYAIPLLTYSFGIISWTKTELQKLQRAININMRKHRKHHPRSCTQRMTLPRVEGGRGLVDIFNLYIKQIGNLRTYFHNKMNTSNLHSAIVHNDRRLTPLNLYSKNLKKHEKPVDIQTKRNQWKYKSLHGRHFHDLEQPHVDNKASNTWLRIGDIFPETEGFMVAIQDQIIETRNYQKHIMKIQNMSTDLCRKCNRASETIQHITGACASIVQTDYKHRHDQVAYIIHQKLALQYKLIDNGPIPYYKYLPKTVLENSTHKLYFDRAILTDKTVHYNRPDITLIDKQNKIAQIIDIAIPNTHNLQNTIAEKLSKYTELKEEISRMWQLKSVSIIPIVLSTTGVIPKQLHTSLKSINLSANTYINMQKAVILNTCRIVRKFLQTDNHLTQNR

SEQ ID NO: 18439 - protein, 1287 aa, Telegonus anausis
MKKSPIKYNLRPRSGRERGFTQAEEGRSNDGRDSNVLFNSTNVRTNTDEISDTDSNVSLFSSLPSSSSSHNSLASSFSCSSSLSPSPFPSSNINIVLEDVAQEANLAENTAPTTNALNKRRKWSKEMNEFILRMYLILTKMETDNSTYLSQLHSKFLEKYPSMAVSRQRVGDQRRAIIRSKLLPQETIDRIYNETQEQLQHQTGNYTQQSSQNNLNIIPCQPLKRMKWTQEYNETIVRAYFKITELETNLTNYRTQLHQEFIIKFPHLNHLTEQRIADQRRVIINNKLIKDERLQIIRQEVANDLQRTYNIGTQENNTLIHNTDINNSVIHRVQQPIESHSDTNQNTQEIDICIKKTFKEAFEFFKNTTPTERIYIPKQKTSKYLFKIINFINNVILPEIINANTDFYTLQTAIYCSAWTAAKLNGSNIKLTTQVVNQNRNKMKMKWQIRLENKVKDLRVKIGRLTQYIKGNRNRKLNTHVESILNSYKIHTIHEDTNKELTDFLDTLKQKLSVAASRLKRYKECTLRKTQNKQFTLNEKQFYRTLKDNNINEANKNIQYPTSEVLKHFWTNIWEDTVTHNKNATWIRTEEENNKNTSEMQFDHIQAEIFCNVIKNLHSWKTPGSDYIHNFWYKKITYIHPFLYKYINQFIKDPTSMPNYITAGVTYLLPKDYNNLIDPDKYRPITCLQTIYKIITSCLTQVIYKHIEDNNILTEQQKGCRRFSYGCKEQLIIDSVILKQVQKCKTDLYTMFIDYKKAYDSVPHSWLLQVLDIYKIHPVIISFLENTMANWETRLKLTLNNSTVETGPIRIKRGIFQGDSLSPLWFCLALNPLSNKLNSVNVGYKLKSNSNTTSTIINKEILHNHLLYMDDLKLYASSENDLNELADTTEKISVDICMRFGIDKCKINSFKAGQHHQHQYNLQNGEQIYSLIDNDFYKYLGYNQSKSIHHNEIKLTLTKEFKRRLTLILKTQLNSRNLIKAINTYAIPLLTYSFGVISWTKTEIQKLQRTININMTKYRKHHPRSCTQRMTLPRVEGGRGFVDIYNLHIKQLTNLRTYFQNKSNTSTLHNAIVHNDRRLTPLNLYSKILQKHEKPVDIQMKRNQWKNKSLHGRHFHDLEQPHVDNRASNTWLKIGDIFPETEGFMVAIQDQIIETRNYQKHIMKIPNMSTDLCRKCNRASESIQHITGACVSIVQTDYKHRHDQVAHIIHQKLALQYKLIDNGPIPYYKYLPNKVLENSTHKLYFDRAILTDKTVHYNRPDITLIDKHNKTAQIIDIAIPNTHNLQS

SEQ ID NO: 18440 - protein, 1157 aa, Aeromachus stigmata
MKWTQEHNETIIRSYFRITELETNMTSYRKQLHQDFINKFPHLSHITEQRIADQRRIIINNKRISDESIRIIKQEINNELQIIKHSENQAQNKHTYEYNNQEASELNFSNTIEADSYIEVSNGRCREDNLLKIDIEIRDTYEQAFGYFKNTLPNERTYIPKQKSSKYFMKVVTYINREILPQKINTFTDFNTFQTIIYSSAWTAAKLNGSKLLLTHAEKSQKNFKEHKLKWQIRLEEKMKVLRAKIGQLTQYIKGNRNRKLVAKVNKILDDFKLHTKNEELNKDLTEFLDTLKQKLTVVASRLKRYKKCSLRKTQNYQFTNNEKQFYRSINQSTGDSSSKPKSYPLPEDLKNFWTNIWDDPTTHNSNAQWIHEEKKKNEYINIMPFENISAEIFQIVINKLHNWKAPGSDNIHNFWYKKFTYIHPFLYNYINDFIKDPNSMPSYILVGTTYLLPKDYNSLTDPAKYRPITCLQTIYKIITACLTQVIYKHVEDNNILNEQQKGCRKSSYGCKEQLIIDSVILKQVTKHKKDLYTMFIDYKKAYDSVPHSWLIQILDIYKINPLIINFLKNVTDKWETKLKLNVNKTIIETETIKIKRGIFQGDSLSPLWFCLALNPLSNQLNSTNIGYPMKYTSTDIYTHPVKEIMHSHLLYMDDLKLYASTESSLYHLAKKTEQFSVDIKMQFGIEKCRINSYKSGQSYQHTFNLQNGEQILPLLLNDVYKYLGYNQSKNIKHEETKLTLTQEFKHRLNLVLKSQLNSRNIVKAINTYAIPLFTYSFGVINWTKTELQKLQRTINKHMTKHRKHHPRSCVQRLSLPRSEGGRGLIDILNLHNRQITNMRSYFYNKTKTSNLHCAIVNNDRQMTPLNLYNKKLNKYEKQTDNQTKKQEWKEKSLHGRHLRDLQEEHVDTIGSNIWLKNGNLFPETEGFMLAIQDQIIETKNYQRFIIKIPNSASDLCRKCNRASETIQHITGACAAIAQTDYKHRHDQVANIVHQKLAIKYQLIENKPTLYYQYMANTVLDNKTHRLYFDRAILTDKTVHCNRPDITLIDKINKTAQIIDIAIPNTHNIQRTIAEKLSKYTELKDEITRMWHLKKVYIIPIVISTTGVIPKQLHMSLKLIDLPPHTYINMQKAVILNTTRIVRKFLQTDKDNLVAIQ

SEQ ID NO: 18441 - protein, 1378 aa, Cecropterus bathyllus
MMKKSPIKYNLRPRCGRDRGVPQAEEGCSRNDGEDSNRLFKSIKPTNAAEISDTESNVSLFSSIPSSNSSHNSFSSASSSLLSPSPIPSSNISIVLEDVAQKANLAKHAAPTTNTLNKRRKWSKEMNQFIIRTYLILTKMETDNSSYLPKLHSKFLEKFPNMTVSRQRIGDQRRAIIRSKLLPQATIDRIYKEAQEQLQHHTENDTQQSSQNNLNIMPQQPPKRMKWTQEYNETIIRAYFRITKLETNLTNYRSQLHQDFINKFPHLNHLTEQRIADQRRVIVNNKLVKDERLQMIKQEVAKDLQITNNIENNTLTHTNSLLPHLDTSNSLNCTKEQPKECHTNTNQNTKQIDICIKETFNEAFEFFKNTNPTERMYIPKQKTSKYLFKIINFINSEILPQKINEETDFCTLQTVIYCSAWTTAKLNGSNLKLGTQALNQNRNKMKMKWQIRLENKVKDLRVKIGRLTQYIKGNRNRNLNIHIEAILKNYKIHTIHEDTNKELTDFLDTLKQKLSVAASRLKRYKDCTLRKTQNKQFTLNEKQFYRTLKDNNMSDTNKNFQYPTSDDLKKFWSSIWEDNVTHNTNACWIHTERENNLHINQMQFEDISSETFQNVIKNLHSWKTPGSDYIHNFWYKKFTYIHSFLYKYINQFIKDPGSMPNYITLGTTYLVPKDYNNLTDPDKYRPITCLQTIYKIITSCLTQIIYKHIEDNNILTEQQKGCRKFSYGCKEQLIIDSVILKQVQRYKTDLYTMFIDYKKAYDSVPHSWLLQVLDIYKIHPLLISFLQDTMTNWETRLKLTLNNKTIETEPIKIKRGIFQGDALSPLWFCLALNPLSNKLNSLDIGYKLKSNIKTTNPIINKEILHNHLLYMDDLKLYASSEIDLNQLADTTEKFSFDICMRFGINKCKISSFKAGQHHQHHFNLRNGEQINSLMENDVYKYLGYNQSKNIEHNRIKICLTEEFKRRLTLILKTQLNSRNLIKAINTYAIPLLTYSFGVISWTKTELQKLQRTININMTKYRKHHPRSCTQRMTLPRVEGGRGFIDIYNLYIKQLTNLRTYFQNKINTSNLHNAIVYNDRRLTPLNLNSKTLQKHEETVDIQMKRNQWKNKSLHGRHYHDLEQPHVDNKASNTWLRIGDIFPETEGFMVAIQDQIIETRNYQKHIMKIPNIPTDLCRKCNRASETIQHITGACVSIVQTDYKHRHDQVSHIIHQKLALQYKLINNDPLPYYKYLPKTVLENSTHKLYFDRAILTDKTIHYNRPDITLIDKLNKTAQIIDIAIPNTHNLQSTISEKLSKYTDLKDEITRMWQLRTVNIIPIVVSTTGVIPTQLHTALKSIHLSANTYINIQKAVILNTCRIVRKFLQTDKDINIYSDSHK

SEQ ID NO: 18442 - protein, 1373 aa, Cephise aelius
MKMKKSTKYNLRPRCGTNGGSTQTNEDCSRSDGRDSKATGASVTDSNVSERLSLPSSISSYNSSSSSPHSSPHSSPTPSLSSNNNLLLEDVAQEANLATETAPTTNTHKRRKWSKEMNQFILRTYLLLTKMETDISSYLPQLHLQFLEKFPDMGISRQRIGDQRRAIIRSKLLSQETIDMIYTDAREQLKTITENCTQQSSQNSVNINSNHPVQRMKWTQEYNESIIRAYFRITELETNLTNYRPKLHQDFINKYPHLNHLSEQRIADQRRVIINNKRIKEERLNVIKQEVANELQANNNTCTNNNEPSNCNSFPNLDINTNSLPTVEKPTKYLSEASRNSNLSSPINNVLIEDTFQEAFIFFKNSSPIERIYIPKQKTSKYLFKIINYINSVILPQMINENTDFCTLQTIIYCSAWTAAKLNGSKLKFTQDLNKYRINKKMKWQVRLENKVKDLRVKIGRLTQYIKGNRNKNLTIHVKAILENYKMHTIHEEANRELTDFLDTLKQKLTVAASRLKRYKECTLRKTQNWQFTANERQFYRTFRNNNTNDVNQTIRYPPSEDLKKFWTNIWEDPVKHNENATWIQKEIENNLQINDMQFQDIPIEAFHDVIKNLHNWKTPGSDYIHNFWYKKLTYMQPFLYKYINNFIKDPSSMPNFITVGTTYLLPKDHNNLTDPAKYRPITCLQTIYKIITSCLTQIIYKHIEVNNILTEQQKGCRRFSYGCKEQLIIDSVILKQTQKHKMDLYTMFIDYKKAYDSVPHSWLLKVLDIYKIHPTVISFLQNTMANWQTKLKLTLNNNTVETESIKIKRGIFQGDALSPLWFCLALNPLSNKLNAINTGYILKSNITNTNLTAKNEIRHNHLLYMDDLKLYASSEIGLNQLADTTEKFSSDICMLFGIDKCKISSFKAGQNYQHHYDLQNGEKINSLIESDVYKYLGYNQSNNIHHAEIKLSLTKEFKHRLNLVLKSQLNSRNLTKAINTYCIPMLTYSFGVINWTKTDLLKLQRTINTHLTKHRKHHPRSCMQRMTLPRAEGGRGLIDIYNLHGKQITTLRKYFHNKMNTSTLHNIIVHIDRRLTPLNLYSKSSQNHEKSIDPQTKREKWKQKSLHGRHFHDLHQQHVDIKASNTWLKIGNVFPETEGFMLAIQDQIIETRNYRKHIMKVPNMLSDLCRKCNRASETIQHITGACVAIVQTDYKHRHDQVAHIIHQKLALEYKLIDDTPMPYYKYTPKTVLENSTHKLYFDRAILTDKTVHYNRPDITLINKRNKTAQIIDIAVPNTHNLQNTIAEKLTKYTELRDEITRMWQLKTVNIVPIVLSTTGIIPIQLHKSLKTINLSPNTYITMQKAVVLNTCRIVRKFLQTDQDGLTSITQTS

SEQ ID NO: 18443 - protein, 1373 aa, Epargyreus clarus
MKKSPIKYNLRPRSGRDRGLPQAKEGSSSSSDGRGSNGLFKSIKPTNEVEISDTDSNVSLFSSLPSPSSSHNSSSSSFSPSPTSSSNINIALEDVAQEANLQATKSVPTTNVLNKRRKWSNEMNQFILRTYFILTKMETDNSTYLPQLHSKFLDRFPDMTVSRQRVGDQRRAIIRSKLLPQDTIDRIHKEAQDELQHLTENYTQHSTQNNLNTVPNQQLKRMKWTQEYNETIIRAYFRITELEANLTNYRTQLYEDFINKFPHLNHLSEQRIADQRRVIINNKLIKDERLQIIKQEVANDLNTTHNMETQQDNSFIHNNSLLSDTNIDINHTCTTEPPTELSSNSNMNTGGIDICIKETFQEAFDFFKNTSATERIYIPKQKTSKYLFKIVNFINSEILPHIINDDTDFWTLQTIIYCSAWTAAKLNGSNLKLTTQVMNQCRNKMKMRWQIRLENKVKDLRVKIGRLTQYINGNRNKKLSTQVEAILDNYKIHTIHEDTNKELTEFLDTLKQKLSVASSRLKRYKECTLRKTQNKQFNFNEKQFYRTLKDNNINENSKNVQYPTSDDLKTFWTDIWEDNVTHDKNASWIQAEIEQNLQTKEMQFQNIPSETFQNVIKNLHSWKTPGSDYIHNFWYKKFTYMHPFLYKYINQFVKDPSSMPNYITVGTTYLLPKDYNNLKDPDKYRPITCLQTIYKIITSCLTHIIYKHIEDNNILTEQQKGCRRFSYGCKEQLIIDSVILKQVQKNKSDLYTMFIDYKKAYDSVPHSWLLEVLGIYKIHPLVISFLKNTMSNWETRLKLTLNNQTIETQPIKIKRGIFQGDALSPLWFCLALNPLSNKLNSLNVGYKLISSIKSDNLIINKEIKHNHLLYMDDLKLYASSENDLNQLADITEKFSLDICMRFGIDKCKISSFQAGQQHLHHFSLQNGEQISSLMQNDVYKYLGYNQSKSIHYSEIKLNLTKEFKRRLNVILKTQLNSRNLIKAINTYAIPLLTYSFGVINWTKTDLQKLQRTININMTKHRKHHPRSCTQRMTLPRAEGGRGLVDIFNLHVKQIINLRTYFHNKIDISSLHSAIVHNDRRLTPLNLYSKTLQKHQKPVDVQTKRNQWKYKSLHGRHFHDLEQPHVDSKASNTWLRIGDIFPETEGFMVAIQDQIIETRNYRKHIIKVPNISTDLCRKCNRASETIQHITGACVSIVQTDYKHRHDQVAHIIHQKLALQHKLIDIEPLPYYKYLPKTVLENSTHKLYFDRAILTDKTVHYNRPDITLIDKINKTAQIIDIAIPNTHNLQNTIAEKLSKYTELRDEIIRMWQLKTVNIVPIVLSTTGVIPKQLHISLESLHLSANTYINMQKAVILNTCRIVRKFLQTDKDTHLT

SEQ ID NO: 18444 - protein, 1377 aa, Cecropterus takuta
MKKSTIKYNLRPRSGRDRGLPQAKEGCSRKDGRDSNRLFNSIKPTKTAEVSDTESNVSLFSSIPSLNSSHTSLSSSSLLSPSPILSSSNINNVLEDVAQEATLAKISAPTTNTLRRKWSKEMNQFIIRTYLILTKMETDNSSYLQKLHSKFLENFPHVTVSRQRIGDQRRAIIRNKLLPQATIDRIYKEAQEQLQHHTENFTELSLQNNLNIMPQQPPKRMKWTQEYNETIIRAYFRITELETNLTNYRSQLHQDFVNKFPHLSHLTEQRIADQRRVIINNKLVKDERLQIIKQEVANDLQISNNIETQENNTLTHTDILLPQLDTSNSQNCSIEQPKECHKNTNQSTKQIDICIKETFNEAFDFFKNTNPIERIYIPKQKTSKYLFKIINFINSEILPRKINEETDFDTLQTVIYCSAWTAAKLNGTNLKLTTQVLNQRSSKMKMKWQIRLENKVKDLRVKIGRLTQYIRGNRNRNLNIHIEAILKNYKIHTIHEDTNKELTDFLDTLKQKLSVAASRLKRYKDCTLRKTQNKQFTLNEKQFYRTLKDNNISETNNIFQYPKSEDLKKFWTSIWEDTAAHNTNASWICTERENNSHINEMQFEDIPSETFQNVINKLHSWKTPGSDYIHNFWYKKFTYMHSFLYKYINQFIKYPGSMPNYITLGTTYLVPKDYNNLTDPDKYRPITCLQTIYKIITSCLTQIIYKHIDDNNILTEQQKGCRKFSYGCKEQLIIDSVILKQVQKYKSDLYTMFIDYKKAYDSVPHSWLLQVLDIYKIHPLVISFLQETMTNWETRLKLTLNNKTIETESIKIKRGIFQGDALSPLWFCLALNPLSNKLNSINIGYKLKSNIKTTNPIINKEILHNHLLYMDDLKLYASSELDLNQLADTTETFSLDICMQFGINKCKISSFKAGQPHQHHFNLQSGEQINSLMENDVYKYLGYNQSKNIEHNQIKFSLTEEFKRRLTLILKTQLNSRNLIKAINTYAIPLLTYSFGVISWTKTDLQKLQRTINTNMTKYRKHHPRSCTQRMTLPRAEGGRGLIDIYNLYIKQLTNLRTYFHNKINTSSLHSAIVHNDRRLTPLNLNSKTLQKHEETVNIQMKKNLWKKKALHGRHYRDLEQPYVDNKASNTWLRIGDIFPETEGFMVAIQDQIIETRNYQKHIMKIPNISVDLCRKCNRTSETIQHITGACVSIVQTDYKHRHDQVAHIIHQKLALQYKLIDSDPLPYYKYLPKTVLENTTHKLYFDRAILTDKTIHYNRPDITLIDKHNKTAQIIDIAIPNTHNLQSTITEKISKYTELRDEITRMWQLKTVYIIPIVVSTTGVIPTQLHTALKSIHLSANTYISIQKAVILNTCRIVRKFLQTDKDINIYSDLHR

SEQ ID NO: 18445 - protein, 1374 aa, Epargyreus clarus
MKKSPIKYNLRPRSGRDRGLPQAKEGSSSSDGRGSNRLFKSIEPTNAVEISDTDSNVSLFSSLPSSSSSHNSSSSSSSFLPSPTPSSNINIALEDVAQEANLLATKAAPTTNAPYKRRKWSNEMNQFILRTYFILTRMETDNSTYLPQLHTKFLDRFPEMTVSRQRIGDQRRAIIRSKLLPQETIDRIHKEAQDELQHLTENYTQQSSQNSLNIVPNQQLKRMKWTQEYNETIIRAYLKITELETNLTNYRTQLYEDFINKFPHLNHLSEQLIADQRRVIINNKLIKDERLQVIKQEVANDLNTTHNIQTQQDNSYTHNNNLLSNTNIDINFTCTTEQPTECYSDTNINTNGIDICIKETFQEAFDFFKNTSPTERIYIPKQKTSKYLFKLVNFINSEILPHIINEYTDFDTLQTAIYCSAWTAAKLNGSNLNLKTQVIDQCRSKMKMRWQIRLENKVKDLRVKIGRLTQYIRGNRNRKLSTQVEAILENYKIHTIHEDTNIELTEFLDTLKQKLSVAASRLKRYKECTLRKTQNKQFTLNEKQFYRTLKDNNFSENSKNVQYPTSEDLKNFWTDIWEDNVTHDKNASWIHTEIENNLHRSEMQFQNVPSETFQNVIKNLHSWKTPGSDYIHNFWYKKFTHTHPFLYKYINQFLKDPSSIPNYITVGTTYLLPKDYNNLQDPDKYRPITCLQTIYKIITSCLTQIIYRHIEDNNILTEQQKGCRRFSYGCKEQLIIDSVILKQVQKNKSDLYTMFVDYKKAYDSVPHSWLLEVLNIYKIHPLIISFLKTTMTNWETRLKLTLNNKTIETQPIKIKRGIFQGDALSPLWFCLALNPLSNKLNSLNVGYKLKSSIKSANSIINKEIRHNHLLYMDDLKLYASSENDLNQLADITENFSLDICMRFGIDKCKISSFKTGQQHLHHFNLQNSEQISPLMQNDVYKYLGYNQSKSIHHSEVKLNLTKEFKRRLTVILKTQLNSRNLIKAINTYAIPLLTYSFGVISWTKTDIQKLQRTININMTKHRKHHPRSCTQRMTLSRVEGGRGLVDIFNLHIKQIINLRTYFHNKINTSSLHSAIVHNDRRLTPLNLYSKTLQKHQKPVDVQTKRNQWKYKSLHGRHFHDLEQPHVDSKASNTWLKIGDIFPETEGFMVAIQDQIIETRNYQKHIMKLPNQSTDLCRKCNRASETIQHITGACVSIVQTDYKHRHDQVAHIIHQKLALQYKLIKNEPLPYYKYLPKTVLENSTHKLYFDRAILTDKTVHYNRPDITLIDKLNKTAQIIDIAIPNTHNLQNTIAEKLSKYTEIRDEIIRMWQLKSVNIVPIVLSTTGVIPKQLHISLKSLHLSANTYINMQKAVILNTCRIARKFLQTDKDTHLT

SEQ ID NO: 18446 - protein, 927 aa, Cecropterus evenus
MKMKWQIRLENKVKDLRVKIGRLTQYIRGNRNRNLNIHIEAILRNYKIHTVHEDPNKELIEFLDTLKQKLSVAANRLKRYKDCTLRKIQNKQFNLNEKQFYRTLKNNNVSETNKTFQYPTSEHLKQFWKSIWEDTVTHNKNASWICTERENNSHINEMQFHDIPSETFQNVIKNLHSWKTPGSDYIHNFWYKKLTYIHSFLYKYINQFIKDPGCMPNYITFGTTYLVPKDYNNLTDPEKYRPITCLQTIYKIITSCLTQVIYKHIEDNNILTEQQKGCRKYSYGCKEQLIIDSVILKEVQKYKKDLYTMFIDYKKAYDSVPHSWLLQVLDIYKIHPLVISFLEDTMANWETRLKLTLNNKTIETDPIKIKRGIFQGDALSPLWFCLALNPLSNKLNSINAGYKLKSNITSTDPSLNKEILHNHLLYMDDLKLYASSEYDLNELADTTENFSYDICMQFGIDKCKISSFKAGQHYQHNFNLQSGEQINSLMENNVYKYLGYNQSKNIEHNQIKISLTEEFKRRLTLILKTQLNSRNLIKAINTYTIPLLTYSFGVISWTKTDLQKLQRTININMSKYRKHHPRSCTQRMTLQRVEGGRGFIDIYNLYIKQLINLRTYFQSKINSSSLHNAIVQSDRRLTPLNLNSKTMQKFEKIVDIQMKRNQWQNKSLHGRHFHDLEQPYVDKKASNTWLRIGDIFPETEGFMVAIQDQIIETRNFQKHIMKIPNSTDLCRKCNRASETIQHITGACVSIVQTDYKHRHDQVAHIIHQKLAIQYKLIDNDPLPYYKYLPKIVLENSTHKLYFDRAILTDKTVHYNRPDITLIDKRNKTAQIIDIAIPNTHNLQSTITEKLTKYTELRDEITRMWQLRTVNIIPIVISTTGVIPTQLHTALKSIHLSANTYINMQKAVILNTCRIVRKFLQTDKDINI

SEQ ID NO: 18447 - protein, 1394 aa, Dyscophellus porcius
MQMRLRNRQIPQAGTCEGESRPGPSGSGCPTYSGGGNVSQDTAQSRTIGAGYSSSEGRNPIMRIDIVKPANAADMSDIDSEMSMFSSTSSVSFNNPSSSSSSFSPSSASDLMLEDVAQQANIAKKSVPTTSTLNKRKKWSNEMNQFILRTYLILTNMETDSSTYLPQLHSKFLENFPNMAVSRQRIGDQRRAIIRNKLLSQETIDRIYEDSKKELQTITAAHKEQSTHHKLDINSKHPTQRMKWTQEYNEAIIRAYFTITELETNLTNYRPQLHQDFINRFPHLNHLSEQRIADQRRVIINNKRITDERLMIIKQEVANDLKIVNNTDAPRDTSSQNNNNILLNTDSDQNFLCTIEPACLIDVDNNRNDGSRSINVVIDETFQEAFNFFRNTSPTERIYIPKQKTSKYFFTIIEHINREILPQMINANTDFGTFQTVIYCSAWTAAKLNGSKLNLTTQNVNQNYKKKKKKWQIRLENKVKDLRIKIGRLTQYIKGNRNRNLITSVNAILQNYKIHTTHEEINKELTEFLDTLKQKLKVAASRLKRYTECTLRKAQNKQFITNEKQFYRTLKSNSASDSNKTSSYPSSQDLKNFWTNIWENPVTHNRTASWIHTEEDNNVHTSEMHFQNISAEIFKDVIKNLHNWKTPGSDYIHNFWFKKLTYVHPFLYNFINNFIKEPSSMPKYITVGTTYLLPKDDDNLSDPAKYRPITCLQTIYKIITSCLTHIIYKHIEENNILTEQQKGCRKFSYGCKEQLIIDSVILKQTQRNKTDLYTMFIDYKKAYDSVPHSWLIHVLNIYKIHPSVIYFLQNTMVNWETRLKLILNNETIESDSIKIQRGIFQGDALSPLWFCLALNPLSNTLNSINIGYKLKHNINSDLTINKEIYHNHLLYMDDLKLYASSETDLNKLADITEKFSQDIFMSFGIDKCKISSFKSGQNYQHYYSLQNGEKINPLFENDVYKYLGYNQSNNIHHTEVKLNLTKEFKRRLNLVLKTQLNSRNIIKAINTYSIPLLTYSFGIISWTKGELQNLQRTINTHLTKYRKHHPRSCTQRMTLPREEGGRGVIDIFNLHSKQITTLRTYFHNKTNSSPLHNAIVHNDQRLTPLNLYNKTSQNLEKSIEIQTKRDQWKQKSLHGRHFADLHLPHVDTKASNTWLKIGDLFPETEGFMMAIQDQIIETRNYRKHIMKIPNMSTDLCRKCNRASETIQHITGACVSIVQTDYKHRHDQVAYIIHQKLALQYKLIDDDPTPYYKYTPKSVLENTTHKLYFDRAILTDRTVHYNRPDITLLNKNNKSAQIIDIAIPNTHNLQNTIAEKLSKYTELKDEIIRMWQLKTVNIIPIVLSTTGVVPKQLHTSLQSINVSPNTYITMQKAVILNTCRTVRKFLQADKDHTHK

SEQ ID NO: 18448 - protein, 1388 aa, Euriphellus phraxanor
MRLRNRQIPQAGTHKGESRPEPSGAGCPTYSGGGNASHDTAQSRANSTGYSSKKDRYPIRRVDSMKPAIATDTSGSDSEVSLVPSMGSSFLSFKSSSSSSSFSPSSSSDLVLEDVAQEANLAKKSVPTTSTLNKRKKWTIEMNQFILRTYLILTKMETDTNSYLPQLHFKFLEKFPEMVVSRQRIGDQRRAIIRSKLLPQQTIDRIYRDAKNELQNITQTDKGQFAHHNVYNTARQPIQRMKWTQEYNEAIIRAYFRITELETNLTNYRTQLHQDFINKFPHLNHLSEQRIADQRRFIIHNKRITVDRLMIIKQEVTNDLKIMHNTEVQKDTSLPRSNNLPLNTDVEENFISRIEPDCLINLDNNRDDSTRLINETFQEAFNFFKDTGPTERMFIPKQKTTKYFFKIIEYIDHEILPQMINASTDFGTLQTLIYCSAWTAAKLNGSRLILTMQNPNKKSKQQIKWQIRLENKVKDLRVKIGRLTQYIKGNRNRNLTINVNTILENYKIHTIHEEVNKELSDFLDTLKQKLKVAASRLKRYKECTIRKTQNKQFTTNEKQFYRTLKNNSTSKSNKTSSYPSSQDLKTFWTNIWDNTVTHNRSASWIHTEEENNVLTSEMEFQNIPAYVFKDVIKKLHNWKTPGSDYIHNFWYKKLTYTHSFLYDFINHFIKEPSSMPKYITVGTTYLLPKDYNHLTDPAKYRPITCLQTMYKIITSCLTQIIYKHIEANNILTEQQKGCRKFSYGCKEQLIIDSVILKQSQKNKTDLYTMFIDYKKAYDSVPHSWLLHVLNIYKIHPSVISFIQNTMENWETRLKLILNNKTIETESIKIKRGIFQGDALSPLWFCLALNPLSNKLNSINIGYKLKNIMADSSLNNQIHHNHLLYMDDLKLYASYEMDLHKLADITQKLSLDICMSFGLDKCKISSFKSGQNYQHNYSLQNGEQINSLMENDTYKYLGYIQSKNIHHKEIKLNLTKEFKHRLNVMLKTQLNSRNLIKAINTYAVPMLTYSFGIINWTKGDLQKLQRTINTHMTKYRKHHPRSCTQRMTLSRAEGGRGVIDIFNLHSKQITTLRTYFYNKANSSKLHNAIVINDKRLTPLNLCSRTVQKLEKPIDIQTKRDQWKQKSLHGRHFADLHLSYVDIRASNTWLKIGEVFPETEGFMLAIQDQIIETKNYQKHIIKIPNMSTDLCRKCNKASETIQHITGACVAIVQTDYKHRHDQVAYIVHQKLALQYKLIEGDPTPYYKYTPKTVLENTTHKLYFDRAILTDKTIHYNRPDITLINKYNKSAQIIDIAIPNTHNLQSTIAEKLSKYTELKDEITRMWQLKTVNIVPIVLSTTGVIPKQLHTSLQSIKLSPNTYINMQKAVILNTCRIVRKFLQTDKDHTQFH

SEQ ID NO: 18449 - protein, 1242 aa, Urbanus velinus
MKKSPQTKYNLRPRSGRDRGLPEAKEGCSSNNGKGSKKLFSRIKPTNPADESDTDSNESVFSSLPSSSSSYNSSSSSTSFSSSPVPPSNINIVLEDVAQEANLARNTAPTTTQNKRKKWSNEINQFILRTYLIITKMETENRTYLSQLHSKFLEKFPNMTVSRQRIGDQRRAIIRNKLLPQETIDRIYSEAQKELQHITDNYTQHSLQSPVNITPGQALKRMKWTQEYNEHIIRAYFRITELETNLTNYRTQVHQDFINKFPHLKHITEQRIADQRRVIIKNKLVEYERIQIIKQEVANDLLTSNNIEPQNDTRLIHNNNCLPSNTDSDSNLIYTTEQPLDCFSDTNEIVKRIKETFQVAFDFFENTIPTERIYIPKQKISKYLFKIVNLINSEILPQIENKDTDFCTLQTIIYCLAWTAAKLNGSNIKLETRDHDRIRNKIKMKWQIRLENKVKDLRVKIGRLTQYIKGNRSRKLKIQVEAILNNYKIHTVHEDINKELTDFLDTLKQKLAVAASRLKRYKKCTLRKSQNKTFTSNEKQFYRALKDNNINDTRAQYPASDDLKKFWSNVWEDNVIHNKNASWICTERENNLHISEMQFQNIPPDTFQNVIKNLHNWKTPGSDYIHNFWYKKFTYMHPFLYKYINQFIKDPNSMPNYITIGTTYLLPKDYNNLADPDKYRPITCLQTIYKIITSCLTQIINKHIEDNNILTEQQKGCRRFSYGCKEQLIIDSVILKEAQKHKTDLYTMFIDYKKAYDSVPHSWLLQVLDIYKIHPLLISFLQNIMVNWETRLKLTLNNKTIETESIKIKRGIFQGDALSPLWFCLALNPLSNKLNSMHIGYNLKSNVNTDSIINREITHNHLLYMDDLKLYASSETDLNQLANTAENFSRDICMRFGVDKCKISSFKAGKQHLHHFNLQNGEQISSLMENEFYKYLGYNQSNNIHHSEIKFSLTKEFKSRLNLILKTQLNSRNLTKVINTYAVPLLTYSFGIISWTKTDLQKLQRMINVNMTKHRKHHPRSCTQRMTLPRVEGGRGFVDIFNLHIRQITNLREYFHNKGNTSSLHCAIVHNDQRLTPLNLLSKTMQKHEKPVDIQTKRNHWKNKSLHGRHYLDLEQPHIDNKASNTWLRIGDLFPETEGFMVAIQDQIIETKNYRKHIMKIPNITTDLCRKCSRSSETIQHITGACVSIVQTDYKHRHDQVAYIIHQKLALKYKLIDNGPTPYYKYVPKTVLENSTHKLYFL

SEQ ID NO: 18450 - protein, 1371 aa, Narcosius parisi
MKKTHIKYNLRPRSGRDRGLSQTREGCSNNDGRGSNRVLNSIKPTNTAEFLDTDSNASLFSSLPSSSSSHNSSSSSYPFSPSPTTSSNINIGLEDVAQEANLATKTVPTTNALNKRRKWSNEMNQFILRMYLILTKMETDNGTYLSQLHSKFLNKFPDMTVSRQRIGDQRRAIIRSKLLPQETIDRIYKEAQEELQHLTENYTLQSNSQNNTNVVPDQPLKRMKWTQEYNETIIRAYFRITELGTNLTNYRTQLHQDFINNFPHLNHLTEQRIADQRRVIINNKLIKDERLHIIKQEVANDLQTTNNVETQKTNRLIHNDSLLPNIGSDTYLIGTTEQPIEYLSDTNENTKEIDTRIKETFQEAFDFFKNTSPTERIYIPKQKTSKFLFKIINFINSQILPQIINEDTDFSTFQTVIYCSAWTAAKLNGSNIKLTTQVLNQNCNKIKMKWQIRLENKVKDLRAKIGRLTQYIRGNRNRKLNTQVGEILNNYKIHTIHEDTNKELTEFLDTLKQKLSVAASRLKRYKECTLRKTQNKQFIVNEKQFYRTLKDNNGSETINIVQYPSSEDLKEFWTNIWEDNVTHDKNASWIPTERENNLHTSEMQFQNIPHETFQLVIKKLHSWKTPGSDYIHNFWYKKFTYMHSFLYKYINQFIADPSSMPKYISVGTTYLLPKDYNNLADPDKYRPITCLQTIYKIITSCLTQIIYKHINDNNILTEQQKGCRRFSYGCKEQLIIDSVILKQVQKYKTDLYTMFIDYKKAYDSVPHSWLLQVLDIYKIHPLVISFLQNTMANWETKLKLTLNSKTIETEPIRIKRGIFQGDALSPLWFCLALNPLSNKLNSLNIGYNLINSIKNSNINKEIRHNHLLYMDDLKLYASSENDLNQLADATEKFSLDICMGFGIDKCKISSFKAGQQHLHHFNLQSGEKINPLMENHVYKYLGYNQSKNIHHNEIKLSLTKEFKRRLNLILKTQLNSRNLIKAVNTYAIPLLTYSFGVISWTKTDLQKLQRTININMTKHRKHHPRSCTQRMTLPRVEGGRGFVDIFNLHIKQITNLRTYFHSKMNTSNMHSAIVHNDRRLTPLNLYSKTLQKHQKPVDIQIKRNQWKYKSLHGRHFHDLEQPHVDNKASNTWLRIGDVFPETEGFMVAIQDQVIETRNYQKHIMKTLNTSTDLCRKCNRASETIQHITGACVSIVQTDYKHRHDQVAHIIHQKLALQYKLTDNGPIPYYKYLPKTVLENSTHKLYFDRAILTDKTVHYNRPDITLIDKHNKSAQIIDIAIPNTHNLQNTIAEKLSKYTELRDEIMRMWQLKTVNIIPIVLSTTGVIPKQLHISLKSVNLSPNTYINMQKAVILNTCRIVRKFLQTDKDTHF

SEQ ID NO: 18451 - protein, 1367 aa, Bungalotis erythus
MRLRNRQIPQAGTREGESRPGPSGSGCPTYSGGGSVSHKIAQSRTISAGYSSNDGRDSNRRYDNTKPANTDDVSGTDSEVSLFSSLPSSNSSYNPSSSSTSPSRSSILLLEDVAQEAQLARNLVPATNICNKRKKWSNEMNQFILRTYLILTKMETDIIAYLPQLHSKFLEKFPNMIVSRQRVGDQRRAIIRSKLLPQETIDRIYKDVQKELETTKYTIQSSHNTAHITSSQPIQRMKWTQEYNETIIRIYFRITELETNLTNYRTQLHQEFVNRFPNLDYISEQRIADQRRFIINNKRITDERLKIIKEEVANDLQIINNSDTQKVTSLPNISNSLPNTDDDTNFLARIEPECLTDVDKNRNDSLPSIKVSIKETFQEAFNFFKETNPTGRMYIPKQKTSKFLFEIINYINTEILPQIINTNTDFVTLQTIIYCSAWTASKLNGSNLNLTMENSSYNHCEAKRKWQIRLENKVKDLRVKIGRLTQYIRGNRNKNLTSHVNVILENYKIHTTHEEENKELTDFLDTLKQKLTVVASRLKRYKQCTLRKTQNKQFTRNEKQFYRTLKNDNTSQAFKTTLYPSSKDLKNFWKNIWEDSVTHNSNASWISTEKENNLHTKEMQFHNIPIEIYNEVIKNLHNWKTPGSDNIHNFWFKKLTFIHPFLYTFINNFINNPSSMPKYITAGTTYLLPKDYDNLTDPAKYRPITCLQTIYKIITSCLSQIIYKHIEANNILTEQQKGCRRFSYGCKEQLIVDSVILKQAQKDKVDLYTMFIDYKKAYDSVPHSWLLQVLDIYKIHPLVISFLQNTIGSWETKLKLTINNKTIETEFIKIKRGIFQGDALSPLWFCLALNPLSNQLNSLNSGYKLKYKTISTELIINKEIRHNHLLYMDDLKLYASSETDLNKLAETTEKFSLDIVMQFGIDKCKISSFKAGQNYQHYFTLQNGEQINPLLDNDGYKYLGYNQSKHVHHSEIKLNLTKEFKRRLNLVLKTQLNSRNLIKAINTYCIPMLTYSFGVISWSKGDLLKLQRTINTHMTKFRKHHPRSCSQRMTLPRTEGGRGVIDIFNLHNKQISTLRTYFYNKTNNSTLHNAIVQNDRRLTPLNLCSKNLQKNEKQFDIQTKRDLWKQKSLHGRHFCDLHLPHVDNKASNTWLKIGDVFPETEGFMLGIQDQIIETRNYQKHIIKTLNISTDLCRKCGKAPETIQHITGACVSIVQTDYKHRHDQVAHIIHQKLALKYKLIDNDPTPYYKYTPKTVLENAKYKLYFDRAILTDRTVHYNRPDITLINKHNKSAQIIDIAIPNTHNLQSTIAEKLSKYTELREEITRMWKLKSVNIIPIVLSTTGIIPTQLHKSLKTSTGLTVLILIINK

SEQ ID NO: 18452 - protein, 1392 aa, Pseudonascus paulliniae
MRLRNRDIPQAGTREGESRSGPSGLGCPAYSGGGNVSRNTMQSRTVDVGYSGSDVRNPNRQVDYITPATLSEASTTDSEVSLFSSLPSSISSYNSSSSPSSSPSFSPSSPKVNFQLEDVAQEANLAEQPVPTNNILNKRKKWSKYMNQFILRTYLILTKMETDNSTYLPQLHSKFIEKFPEMIVSRQRIGDQRRAIIRNKLLPQGTIDRIYKDVQEELHNTTRKHTKQSTYNNVNTTLTQPFQRMKWTQEYNEAIIRAYFRITELETNLTNYRTQLHQDFISKFPHLNHISEQRVADQRRVIINNKRITDDRLQIIKQEVANDLQIINNMDTQKDISLSINSNSLPNLNDGENFLSRIEPEGLTDVDSSGIKNVSIKETFQKAFDFFKNTAPTARMYIPKQKTSKYFHKIVNFINSEILPQLISSNTDFYTFQTIIYCSAWTAAKLNGSNLKLTIQNPNQNRNKIKKKWQIRLENKVNDLRVKIGRLTQYIKGNRNKNLTKHVNAIIENYKIHTIHEEINKELTDFLDTLKQKLTVAACRLKRYKECTLRKTQNRQFTTNEKQFYRVLRDNNASQATKTTSYPSSEDLKIFWSNIWEDPVTHNRNASWIHAEEKNNSHINEMQFQNIPAETFQGVIKNLKNWKTPGSDYIHNFWFKKLTFIHPLLYKFINNFIRDPTSMPNYITVGTTYLLPKEYDNLIDPAKYRPITCLQTIYKIITSCLTQVIYKHVEDNNILSEQQKGCRKFSYGCKEQLIIDSVILKQTQKNNTDLYTMFIDYKKAYDSVPHSWLLQVLDTYKIHPLVISFLQNAMANWETRLKLTLNNQTIESESIKIRRGIFQGDALSPLWFCLALNPLSNKLNSLNIGCKLKCNKTHIDSSTNKEIQHNHLLYMDDLKLYASSETDLSKLADTTERFSLDICMRFGIEKCRISSFKAGQNYQHHFSLKDGEQIKPLVENEVYKYLGYNQSKNIHHTEIKQTLTKEFKRRLNLILKSQLNSRNLTKAINIYSIPILTYSFGVISWTKGELLKLQRTINTHMTKHRKHHPRSCTQRMTLPRTEGGRGFIDIFNLHNRQITTLRAYFYNKTSMSTLHNAIVYNDRRLTPLNLYSKTLKKHEKLIDIQTKRDQWKQKSLHGRHFQDLHLPHVDNKASNAWLSIGDVFPETEGFMLAIQDQIIETKNYQKHIIKNPNMTTDLCRKCNKVPETIQHITGACVSIVQTDYKHRHDQVAHIIHQKLALKYELINDGPIPYYKYTPKNVVENATHKIYFDRAILTDKTVHYNRPDITLIDKQRKTALIVDIAVPNTHNLQNTIAEKLSKYIELKDEIIRMWQLKTVNIVPIVISTTGVVPKQLHTSLKSINLSPNTYIHIQKAVILNTCRIVRKFLQTDKDRYD

SEQ ID NO: 18453 - protein, 1393 aa, Notocrypta feisthamelii
MEKQSRKYNLRPLPGGRRGASGANAGCHSMRTVGDGGLSRRVPLEQCDTADQPSSPLSTSASTYSLFSNIPSPPSSLDEYDSSSFASSTSSLSIKVTQQTDLTSHKSNSTLVLEDVAQEATPANVPVPTTSIHNKRKKWSSDMNQFILRTYLTITKMETENTHTYLETLHSKFIENFPNMTVSRQRVGDQRRAIMRNKLVPQEIIDKICEETKDKLVINYNNDTQQNSTCNTLNSIVTGQPAQRMKWSQEYNETIIRSYFKITEMETNMTTYRKHLYEQFVIKFPHLSYLTEQRIADQRRTIINNKRISDERLKIIKAEVAREIEIENNRQKEVNTNNHLCDLQSTSENNINSESGIQPECSLIIQNNSNDITQNCENDIRCAYEEAYEFFNNKPPTERKFIPKQKSSKYFFKVINFINNKILPQFINTNTDFDTFQTVVYCAAWTAAKMNGSKLNFKMQDQHQKHNSTKMRWQIRLEKKIADLRVKIGRLTQYIKGNRNKKVVSQVQSILENFKMHTIHEEINKDLTEFLDTLKQKLTVAASRLRRYNNCSLRKSQNNQFKNNEKQFYRALKDAEINQTNKTTHYPKLEELKNFWVSVWEKHMPHNKNADWVQEEKDNNLNTNEMVFENIPTHIYHDVIKNLHNWKTPGSDYIHNFWYKKFNYIHPFLLSYINSFIKDPSSMPRYITEGTTYLLPKDSSDLTDPSKYRPITCLQTIYKIITACITQTIYKHVEKNNILTEQQKGCRKFSYGCKEQLIIDSVILKHAHKSKTDLYTMFVDYRKAYDSVPHSWLLEVLQIYKIHPVIVLFLQCAMARWETKLKLKLDQKSIETEPIKIKRGIFQGDALSPLWFCLALNPLSNKLNKVNTGYILKYNNDTNSNLSKKLTHNHLLYMDDLKLYASSESDLNNLADITETFSSDICMQFGIDKCAINSYKAGQNFQHNFNLRNGEQITSLNENDFYKYLGFNQSKNVHHEEIKLTLTQEFRHRLNLILKTQLNSGNLIKAINTYAIPMLTYSFGVIRWKKADLQKLQRTINTHMTKYRKHHPRACFQRLIIPRVEGGRGLIDIINLHNKQIKTLRAYFHNKTLTSNLHVAIAHNDRRITPLNLYSKDTQNNEILVDVQKKKDEWQQKTLHGRHFQDLHKQHIDKVASNTWLKIGDIFPETEGFMQAIQDQVIETRNYQKYIIKTPNISTDLCRRCNKASETIQHITGACISIVQSDYKYRHDQVASIIHQKLALMYKLTDDKHIPYYKYTPKIVLENTTHKLYFDRAILTDKTVHYNRPDITLIDKINKSAQIIDIAIPNTHNLQSTIAEKLSKYTELRDEITRMWHLKKVSIIPIVLSTTGVIPKDLHVALKTLNLSPNIYINIQKAVILNTCRIVRKFLQIEKKT

SEQ ID NO: 18454 - protein, 977 aa, Ephestia elutella
MSLPDPALSVPVSSVPTQSALSLDGFERCDLCNQPRFFRGRRGLNVHISKVHKPAAAVPIVDNVVAPAQDQPADVPDGAPLWEMLSRCKKTMPVVKRIPRGARISVARVLKSVIDKVVLLNDKASWEQLLTFSFRVLHVCRESNSSVSLTQLIKDNCNLQGHFMSFNVETRNRSRSYVQTTESRIRRIEGKVSDGDVKGAAQLIFSSDTIAPDVVETFTSLKEKHPQSLPQQHPLPDVSLDTNIALQVTTDDVKEALNSFKTGSASGLDGLSAQHLKDLVCGATGDSGNALIQSLTTLVNFMLSGKVPVEVARVLYGANLCALLKKDGGIRPIAVGCTIRRLVSKIGCRKIAPTLSPYFSPRQLGFGVRGGCEAIVHASRTFLHSDNGEVLLKVDICNAFNSMDRSVFLREVKKRIPSLYPYLWQCYGSPSDLVFNNQLIVSSTGCQQGDPLGPVLFSLGIHSIITELNSPLNAWYLDDGTLGGNVVTVKSDLESLLAQFEEIGLNLNFSKCELFIGDNFTSLERDEIATAFSSLAPGITVVDKDSLRILGAPIFDEAIPNYITDQVEKFNASSDLLFKINAHMAYFVVKSCLFVPKFTYVLRCSLVWKSQNQLGVLDELIRVSLVKILNCHISDEAWEFASLPIRFGGIGVRKASSVALPAFLSSVHASSSLCGNVLGPNMGSAEVCGLSEAREAWRSYGLVDLPLNLCSQRSWDGPLCKMIQQRVIAQCDNVADRSRLLALSERESGYWLQALPSSHIGTLLDNCTFTLAFGLRLGASINQPHMCNCGTMVDSLGHHGLSCVRSAGRIPRHASLNDIIRRTLATVGVPSILEPNGIIRTDGKRPDGLSLVPWYLGKSLVWDATCVDTLAPSHLSSTSVHGGAAACTAESGKKRKYAGLVDSYNFLPFAVETMGPWGPEAKKFLNQVSTRLIEATGDPRAGVFFAQRISLAVQRGNAASILGTLPRCGAFEEIFYL

SEQ ID NO: 18455 - protein, 977 aa, Ephestia elutella
MSLPDPAVSVPVSSVPTQSALSLDGFERCDLCNQPRFFRGRRGLNVHISKVHKPAAAVPIMDNVVAPAQDQPADVPDGAPLWETLSRCKKSMPVIKRIPRGARISVARVLKSVIDKVVLLNDKASWEQLLTFSFRVLHVCRESNSSVSLTQLIKDNCNLQGHFMSFNVETRNRSRSHVQTTESRIRRIESKVSDGDVKGAAQLIFSSDTIAPDVVETFTSLKEKHPQSLPQQHPLPDVSLDTNIALQVTTDDVKEALNSFKTGSASGLDGLSAQHLKDLVCGATGDSGNALVQSLTTLVNFMLSGKVPVEVARVLYGANLCALLKKDGGIRPIAVGCTIRRLVSKIGCRKIAPTLSPYFSPRQLGFGVRGGCEAIVHASRTFLHSDNGEVLLKVDIRNAFNSIDRSVFLREVKKRIPSLYPYLWQCYGSPSDLVFKNQLIVSSTGCQQGDPLGPALFSLGIHSIITELNSPLNAWYLDDGTLGGNVVTVKSDLESLLAQFEEIGLNLNFSKCELFIGDNFTSLERDEIATAFNSLAPGITIVDKDSLRILGAPIFDEAIPNYITDQVEKFNASSDLLFKINAHMAYFVVKSCLFVPKFTYVLRCSLVWKSQNQLGVLDELIRVSLVKILNCHISDEAWEFASLPIRFGGIGVRKASSVALPAFLSSVHASSSLCGNVLGPNMGSAEVCGLSEAREAWRSYGLVDLPLNLCSQRLWDGPLCKMIQQRVIAQCDNVADRSRLLALSERESGYWLQALPSSHIGTLLDNCTFTLACGLRLGANINQPHFCNCGTMVDSLGHHGLSCVRSAGRIPRHASLNEIIRRALATVGVPSILEPNGIIRTDGKRPDGLSLVPWYLGKSLVWDATCVDTLAPSHLSSTSVHGGAAACTAELGKKRKYAGLVDSYNFLPFAVETMGPWGPEAKKFLNQVSTRLIEATGDPRAGVFFAQRISLAVQRGNAASILGTLPRCGAFEEIFYL

SEQ ID NO: 18456 - protein, 1172 aa, Pyrrhopyge pelota
MNQINKVVIENGKYVVILPLAPELDVPICCPGCVDMLGCGVYRGATKVENLGRHIKQHHAGTVISYRCGKCGYEAPSTARYPRKVVTQHTTVCGTNEGPIVRTGRADTARRNEIRNRLHGDNQNQRRRRPRQQRRQQSISRVPGIDTRTSPDNPRSMASSPNSSPEVFLSPVANIETPLVNPRRRRGLRPSPSPEAANIVTQPRVIPPAPSPRVVQRTPPPQQNTVESVRRNTARPVAAIRRAPQHGTEPTQEQQRLVEALTTANTEKQLETIYGEVASFLHRYTKPVPEGTAARSRPKRDRIQEATRIQRIYRQNKKRAVQEILVGVNKRCEIDKAVIEEHFRSLAEDRDGEETWPDVIDQGASDEASNNELLREFERETVWRKLFSRSNTAPGPDGTRYNDLKKADPGAHVLTALFNAVWRTEHAPQTWKLSNTILLYKKGEASNVRNWRPISLGDTIPKLFAAIMADRIRNWSTINQKFSPSQKGFLEFEGCYEHNFVLQEVLREAKDENKEVIVAWLDLTNAFPSVPHSSIHRALELHGLPTKARNIIRALYRDMRTRIRTKDGFTRDIDLRAGVRQGCPLSAYIFNLVIEVLLRALKQVGAGYTICGKSINNLTYADDTALLASTPEDMRRLLSVAESVARAIGLTFNSSKCATLHLNGKEVRATQFMMSGEPMRTLAEGEAYEHLGIPTGYQVRQTPINNLAELVADINLIDESLLAPWQKLDATAVFLLPRIDFIMQGATVEKEYLVQVDKHIKTSAKRWMCLPKRASAEIVHLPPSRGGGGLLPLSDLYDIYKVAHACRMLHAKDGTVRDIAMGKLQETVNRRYKREATKEDIALFLSGDPSVPMRFSKESFWTKVRISSNKLSMKLQMKWHWSIAERTFVLKFQNNNSRTLSIGPNEKGRIVSVLRSRLTFHIAKSLLEKPDQGKVYEVTHANKISNHFLRNGRNTRFCDWRFVHRARVGVLPLNACMRWKRGNDKRCRRCRYITETIPHVLNHCSVHSAARQLRHNNIQDRLVKAAIRCPGTIQVNQTVHGLVGDAAILRPDIVVRDENSRKITIIDVAVPFENRKAHFEQAREEKLRKYQPIADQLSAQGYSVKVEAFIVGALGGWDRRNENVIRLLNISRFYADMMRRFMISDTIKWSRDIYVEHLTGIKQYRLSPSPSS

SEQ ID NO: 18457 - protein, 1073 aa, Pyrrhopyge sadia
MVRTGRADTARRNEIRNRLHGDNQNQRRRRTRQQRRKQSISRVPGIDTRTSPDDPRSMASSPNSSSEVFLSPVASIETPLANTRRRRGLRPSPSPEADNIVTQPRVIPPAPSPRVVQRTPPPQQNSTESVRRNTARPVAAVRRAPQHGTEPTQEQQRLVEALTTANTEKQLETIYGEVTSFLYRYTKPVPEGTAARSRPKRDRIQEATRIQRIYRQNKKRAVQEILVGVNKRCEIDKAVIEEHFRSLTEDRDGEETGPDVFDQGASDEASNNELLREFERGMVWRKLFSRSNTAPGPDGTRYTDLKKADPGAHVLTALFNAVWRTEHAPQMWKLSNTILLYKKGEASNVRNWRPISLGDTIPKLFAAIMADRIRNWSNINQKFSPSQKGFLEFEGCYEHNYVLQEVLREAKDENKEVIVAWLDLTNAFPSVPHSSIHRALELHGLPTKARNIIRALYRDMRTRIRTKDGFTRDIDLRAGVRQGCPLSAYIFNLVIEVLLRALKQVGAGYTICGKSIDNLTYADDTALLASTPENMRRLLNIAESVARAIGLTFNSSKCATLHLNGKEVRTTQFMISGEPMRTLAEGEAYEHLGIPTGYQVRQTPINNLAELVADINLIDESLLAPWQKLDATAVFLLPRIDFIMQGATVEKEYLVQVDKHIKTSAKRWMCLPKRASAEIVHLPPSRGGGGLLPLSDLYDIYKVAHAFRMLHAKDGTVRDIAMGKLQETVNRRYKREATKEDIALFLSGDPSVPKRFSKESFWTKVRISSNKLSTKLQMKWHWSTEERTFVLKFQNNNSRTLSIGPNEKGRIVSVLRSRLTFHIAKSLLEKPDQGKVYDVTHANKISNHFLRNGRNTRFCDWRFVHRARVGVLPLNACMRWKRGNDKRCRRCRYITETIPHVLNHCSVHSAARQLRHNNIQDRLVKAAIRCPGTIQVNQTVHGLAGDAAILRPDIVVRDENSRKITIIDVAVPFENRKAHFEQAREEKLRKYQPIADQLSAQGYSVKVEAFIVGALGGWDRRNENVIRLLNISRFYADMMRRFMISDTIKWSRDIYVEHLTGIRQYRLSPSPSS

SEQ ID NO: 18458 - protein, 1171 aa, Pyrrhopyge sergius
MTQINKVIIENGKYVVILPLAPELDVPICCPGCVDMLGCGVYRGATKVENLGRHIKQHHAGTVISYRCGKCGYEAPSTARYPRKVVTQHTTVCGTNKGPIVRTGRADTARRNEIRNRLHGDNQNQRLRRPRQQRRQQSISRVSGIDTRTSPDDPRSMASSPNSSPEVFLSPVASIETPLVNPRRRRGLRPSPSPEAANIVTQPRVIPPAPSPRVVQRTPPPQQNSTESVRRNTARAVAVRRAPQHGTEPTQEQQRLVEALTAANTEKQLETIYGEVTSFLHRYTKPVPEGTAARSRPKRDRIQEATRIQRIYRQNKKRAVQEILVGVNKRCEIDKAVIEEHFRSLAEDRDGEETWPDVFDQGASDEASNNELLREFERGMVWRKLFSRSNTAPGPDGTRYNDLKKADPGAHVLTALFNAVWRTEHAPQTWKLSNTILLYKKGEASNVRNWRPISLGDTIPKLFAAIMADRIRNWSTINQKFSPSQKGFLEFEGCYEHNYVLQEILREAKDENKEVIVAWLDLTNAFPSVPHSSIHRALELHGLPTKARNIIRALYRDMRTRIRTKDGFTRDIDLRAGVRQGCPLSAYIFNLVIEVLLRALKQVGAGYTICGKSIDNLTYADDTALLASTPEDMRRLLSVAESVARAIGLTFNSSKCATLHLNGKEVRSTQFMMSGEPMRTLAEGEAYEHLGIPTGYQVRQTPINNLAELVADINLIDESLLAPWQKLDATAVFLLPRIDFIMQGATVEKEYLVQVDKHIKTSAKRWMCLPKRASAEIVHLPPSRGGGGLLPLSDLYDIYKVAHAFRMLHAKDGTVRDIAMGKLQETVNRRYKREATKEDIALFLSGDPSVPKRFSKESFWTKLRISSNKLSTKLQMKWHWSIEERTFVLKFQNNNSRTLSIGPNERGRIVSVLRSRLTFHIAKSLLEKPDQGKVYEVTHANRISNHFLRNGRNTRFCDWRFVHRARVGVLPLNACMRWKRGNDKRCRRCRYITETIPHVLNHCSVHSAARQLRHNNIQDRLVKAAIRCPGTIQVNQTVHGLAGDAAILRPDIVVRDENSRKVTIIDVAVPFENRKAQFEQAREEKLRKYQPIADQLSAQGYSVKVEAFIVGALGGWDRRNENVIRLLNISRFYADMMRRFMISDTIKWSRDIYVEHLTGIRQYRPSPSPSS

SEQ ID NO: 18459 - protein, 1169 aa, Pyrrhopyge telassa
MNQINKVIIENGKYVVILPLASELDVPICCPGCVDMLGCGVYRGATKVENLGRHIKQHHAGTVISYRCGKCGYEAPSTARYPRKVVTQHTTVCGTNEGPMVRTGRADSARRNEIRNRLHGDNQNQRRRRPQQQQSISRVPGIDTRTSPDDPRSMASSPNSSPEVFLSPVASIETPLANPRRRRGLRPSPSPEADNIVTQPRVIPPAPSPRVVQRTPPPQQNSTESVRRNTARPVAAVRRAPQHGTEPTQEQQRLVEALTTANTEKQLETIYGEVTSFLHRYTKPVPEGTAARSRPKRDRIQEATRIQRIYRQNKKRAVQEILVGVNKRCEIDKPVIEEHFRSLAEDRDGEETGPDVFDQGASDEASNNELLREFERGMVWRKLFSRSNTAPGPDGTRYTDLKKADPGAHVLTALFNAVWRTEHAPQTWKLSNTILLYKKGEASNVRNWRPISLGDTIPKLFAAIMADRIRNWSTINQKFSPSQKGFLEFEGCYEHNYVLQEVLREAKDENKEVIVAWLDLTNAFPSVPHSSIHRALELHGLPTKARNIIRALYRDMRTRIRTKDGFTRDIDLRAGVRQGCPLSAYIFNLVIEVLLRALKQVGAGYTICGKSIDNLTYADDTALLASTPEDMRRLLNIAESVARAIGLTFNSSKCATLHLNGKEVRATQFMISGEPMRTLAEGEAYEHLGIPTGYQVRQTPINNLAELVADINLIDESLLAPWQKLDATAVFLLPRIDFIMQGATVEKEYLVQVDKHIKTSAKRWMCLPKRASAEIVHLPPSRGGGGLLPLSDLYDIYKVAHAFRMLHAKDGTVRDIAMGKLQETVNRRYKREATKEDIALFLSGDPSVPKRFSKESFWTKVRISSNKLSTKLQMKWHWSTEERTFVLKFQNNNSRTLSIGPNEKGRIVSVLRSRLTFHIAKSLLEKPDQGKVYDVTHANKISNHFLRNGRNTRFCDWRFVHRARVGVLPLNACMRWKRGNDKRCRRCRYITETIPHVLNHCSVHSAARQLRHNNIQDRLVKAAIRCPGTIQVNQTVHGLAGDAATLRPDIVVRDENSRKITIIDVAVPFENRKAHFEQAREEKLRKYQLIADQLSAQGYSVKVEAFIVGALGGWDRRNENVIRLLNISRFYADMMRRFMISDTIKWSRDIYVEHLTGIRQYRLSPSPSS

SEQ ID NO: 18460 - protein, 1172 aa, Pyrrhopyge aziza
MNQINKVIIENGKYVVILPLAPELDVPICCPGCVDMLGCGVYRGATKVENLGRHIKQHHAGTVISYRCGKCGYEAPSTARYPRKVVTQHTTVCGTSEGPIVRTGRADTARRNEIRNRLHGDNQNQRRRLPRQQQRQQSISRVPGIDTRTSPDDPRSMASSPNSSPEVFLSPVASIETPLANPRRRRGSRPSPSPEADTIVTQPRVIPPAPSPRVVRRTPPPQQNSTESVRRNTARPVAAVRRAPQHGTEPTQEQQRLVEALATANTEKQLETIYGEVTSFLHRYTKPVPEGTAARSRPKRDRIQEATRIQRIYRQNKKRAVQEILVGVNKRCEIDKAVIEEHFRSLAEDRDGEETWPDVFDQGASDEASNNELLREFERGMVWRKLFSRSNTAPGPDGTRYTDLKKADPGAHVLTALFNAVWRTEHAPQTWKLSNTILLYKKGEASNVRNWRPISLGDTIRKLFAAIVADRIRNWSTINQKFSPSQKGFLEFEGCYEHNYVLQEVLREAKDENKEVIVAWLDLTNAFPSVPHSSIHRALELHGLPTKARNVIRALYQDMRTKIRTKDGFTRDIDLRAGVRQGCPLSAYIFNLVIEVLLRALKQVGAGYTICGKSIDNLTYADDTALLASTPEDMRRLLNVAESVARAIGLTFNSSKCATLHLNGKEVRATQFMISGEPMRTLAEGEAYEHLGIPTGYQVRQTPINNLAELVADINLIDESLLAPWQKLDATAVFLLPRIDFIMQGATVEKEYLVQVDKHIKTSAKRWMCLPKRASAEIVHLPPSRGGGGLLPLSDLYDIYKVAHAFRMLHAKDGTVRDIAMGKLQETANKRYKREATKEDIALFLSGDPSVPKRFSKESFWTRVRISSNKLSTKLQMKWHWSTEKRTFVLKCQNNNSRTLSIGQNEKGRIVSVLRSRLTFHIAKSLLEKPDQGKVYEVTHANKISNHFLRNGRNTRFCDWRFVHRARVGVLPLNACMRWKRGNDKRCRRCRYITETIPHVLNHCSVHSAARQLRHNNIQDRLVRAAIRCPGTIQVNQTVHGLAGDAAILRPDIVVRDENSRKITIIDVAVPFENRKAHFEQAREEKLRKYQPIADQLSAQGYSVKVEAFIVGALGGWDRRNENVIRLLNISRFYADMMRRFMISDTIKWPRDIYVEHLSGIRQYRLSPSPSS

SEQ ID NO: 18461 - protein, 1172 aa, Pyrrhopyge hadassa
MNQINRVIIENGKYVVILPLAPELDVPICCPGCVDMLGCGVYRGATKVENLGRHIKQHHAGTVISYRCGKCGYEAPSTARYPRKVVTQHTTVCGTNKGPIVRTGRADIARRNEIRNRLHGDNQNQRLRRPRQQRRQQSISRVPGIDTRTSPDDPRSMASSPNSSPEVFLSPVASIETPLVNPRRRRGLRPSPSPEAANIVTQPRVIPPAPSPRIVQRTPPPQQNSAESVRRNTARPVAAVRRAPQHGTEPTQEQQRLVEALTTANTEKQLETIYGEVTSFLHRYTKPVPEGTAARSRPKRDRIQEATRIQRIYRQNKKRAVQEILVGVNKRCEIDKAVIEEHFRSLAEDRDGEETWPDVFDQGASDEASNNELLREFERGMVWRKLFSRSNTAPGPDGTRYNDLKKADPGAHVLTALFNAVWRTEHAPQTWKLSNTILLYKKGEASNVRNWRPISLGDTIPKLFAAIMADRIRNWSTINQKFSSSQKGFLEFEGCYEHNYVLQEVLREAKDENKEVIVAWLDLTNAFPSVPHSSIHRALELHGLPTKARNIIRALYRDMRTRIRTKDGFTRDIDLRAGVRQGCPLSAYIFNLVIEVLLRALKQVGAGYTICGKSIDNLTYADDTALLASTPEDMRRLLSVAESVARAIGLTFNSSKCATLHLNGKEVRATQFMMSGEPMRTLAEGEAYEHLGIPTGYQVRQTPINNLAELVADINLIDESLLAPWQKLDATAVFLLPRIDFIMQGATVEKEYLVQVDKHIKTSAKRWMCLPKRASAEIVHLPPSRGGGGLLPLSDLYDIYKVAHAFRMLHAKDGTVRDIAMGKLQETVNRRYKREATKEDIALFLSGDPSVPKRFSKESFWTKLRISSNKLSTKLQMKWHWSIEERTFVLKFQNNKSRTLSIGPNERGRIVSVLRSRLTFHIAKSLLEKPDQGKVYEVTHANKISNHFLRNGRNTRFCDWRFVHRARVGVLPLNACMRWKRGNDKRCRRCRYITETIPHVLNHCSVHSAARQLRHNNIQDRLVKAAIRCPGTIQVNQTVHGLAGDAAILRPDIVVRDENSRKVTIIDVAVPFENRKAHFEQAREEKLRKYQPIADQLSAQGYSVKVEAFIVGALGGWDRRNENVIRLLNISRFYADMMRRFMISDTIKWSRDIYVEHLTGIRQYRLSPSPSS

SEQ ID NO: 18462 - protein, 1153 aa, Protesilaus protesilaus
MEEGTRVYTENGGFVILLPYPLDLAVHCPDAACQGANIGRYNGTTKVENFNRHVKANHPHAAITYRCAVCGFEAPHTARYPRKVVMQHTTTCGDNGPVLRTGRADTARRIEIRRLLNDNRQEQQQQRTVPENASTPRPSTPAPAERGADISNSSPENFFSPAANLDTLITRPRVRLRHLRLTSSPESDDNEYQARPIAASTQRSEARTSPRTLPTPQSAPPNTECASKARAGEPTPEQQRLTQALQATASTKDIDALLEQVAAYLNRFSKPTVERTTIRPRTRGDRVKEATRIQRIYRTNKKRAVQEILGGANKYCQINKGIIEAHFRALAEQRDGENVWPNVLEQNALNELSNEELLCQFERDLVWRKLLSRSNTAPGPDGTTYADLKKADPGAHVLTALFNAVWRTEHIPDSWKVSNTILLYKKGEPNDVCNWRPISLGDTCPKLFAAVLADRLKKWAKINNKFSPSQKGFLEFEGCYEHNFLLQEVLRDAKDRKREVLVAWLDLANAFPSVPHSSIFRALELQGVPVKVRNIVKALHVNTRTRIRTNEGFTDDIPLLAGVRQGCPLSVYLFNLVMEVLLRALKLTGMGYMIGGELVNNLTYADDTALIASTPEQLAHLLSTAETAAKAIGLNFNASKCASLHLRGREVADTRLSINGAPMRVLGAGDAYDHLGIPTGYQVRQTPVNTLAELVSDVKTIDESLLAPWQKIDATAVFILPRIDFIMQGATIEREYLKELDNNIKSRAKRWLNLPKRASAEIVHLPPTQGGGGLTPTNDLYDIYKVAHAYRLLHAKDNTVSNIAMNKLIDTVKKRYRREATMDEIALYLSGDESVPQRYAQESFWTKVRVSSIKLKEKLGLNWAWSQDGQSFTLKLNGNNNSTISIGPSEKGQIVPSLRNGLAQRFKTSLLAKPDQGKVYEVTSQNNVSNHFLRTGRNTRFCDWRFIHRARTGVLPLNACMRWKRDNDKRCRRCGHQTETIPHVLNHCGTHAAARQLRHNNIQNRLVKAATRCPGTIRVNRTVDGIIGDDAHLRPDIVVTDENSRKITIIDVAVPFENRKVDFERAREEKLCKYQAIATQLAARGYKVKVEAFIVGALGGWDRRNEVVIRQLNISRFYAAMMRRFMISDTIKWSRDIYAEHTSGARQYRSPGH

SEQ ID NO: 18463 - protein, 1121 aa, Heterotis niloticus
MVKDPGMETTTSGAGAVRGVRGVQEDKKLQVCCCGWQRITTARGLRVHQGRKKCLREGAQGGRIDQYFLRSQANKSNEVQRPVENHSSQDINRTSGAEEEGAGMRDGGVDGVRRSKEKSCELKPRVRWPKAGEKVVWQTINADLVGVLEGMKGSAQVKLEKLGDVIYQYGMDRFGIEQIRREQCQQGGKSRRQKEIDKLVRERRQLKKQWKKATEEERQGIEVLQEEVKSRLVTLRRAEYLRRKRRKKERARAGFYRDPFKFVKGLFSQERKGKLEVSRQELERYLECTYSSAGEVGERGLPVDMPPLGNITAEVDVSPPKWSEVQEVVRRAKASSAPGLNGVPYRVYKSAPDVLRFLWRLFRIVWKKQVIPKAWRRAGGLFLPKEKVSREIGQFRPICLLNVEGKIFFSVVTQRLSDYLLKNKLIDTSIQKAGVPGFSGCLEHTSVIWHQIQEAKQERRNLHVVFLDLANAFGSVPHSLIWGAFDFFRVPSQITGLVKEYFRDIRMCFTTAGYTTAWQRLGMGIMAGCTISPLAFTMALELVIRASGWVVGGERRPDGLRLPPIRAYMDDMTLVTTTAACARRLLGKLDENLKWAGLRIKPAKSRSISLVKGRIEKVSFLVEGEIPSVLEKPVKSLGRWYTRELTDVGQVEQLKESVADGLQRIENSGLPGKLKLWCLQFGLFPRVMWPLTMYEISVTKVEKLERLISSYIRKWLGVPLCLSNVALYGQGVLQLPLSSLTEEYKCAKVRLELQLSGSKDDVVRGLVPRIGTGRKWVARQAVKEAKADLRQLELVGKVQQGREGLGYRIGDPMWSKAGPIERRRLVIGQVRRQEERNRCVRAVSQGKQGQWVNWDGVERRRLSWRELWKMDAYQIRFLLGAVYDVLPSPQNLKQWGGEDSACTLCSEVGTLKHILVGCKISLALGRFTWRHNQVLQCLAATIEDWRRQVCLEQEVEGTVVQFVREGGRSRYRGRKELGVVGGARDWEMQVDLGGRLVVPQEIVNTSLRPDMVLWSASQRVVYFIELTVPWEGSVDDAHERKKLRYSELAAEVGGRGWNAKVRPIEVGCRGFIARSTLDLLRELGIRGRKLQRAVKELSQAAEQGSLWNKRTSADGSGAAKR

SEQ ID NO: 18464 - protein, 1125 aa, Heterotis niloticus
MVKDPGMETTTSGAGAVRGVRGLQEDKKLQVCCCGWQRITTARGLRVHQGRKKCLREGAQGGRIDQYFLRSQSNKSNEVQRPVENHSSQDINRTSGAEEEGAGMRDGGVDGVRRSKEKSCELKPRVRWPRAGEKVVWQTINADLVGVLEGMKGSAQVKLEKMGDVIYQYGMDRFGIEQIRREQCQQGGKSRRQKEIDKLVRERRQLKKQWKKATEEERQGIEVLQEEVKSRLVTLRRAEYLRRKRRKKERARAGFYRDPFKFVKGLFSQERKGKLEVSRQELERYLECTYSSTGEVGERGLPVDMPPLGNITAEVDVSPPKWSEVQEVVRRAKASSAPGLNGVPYRVYKSAPDVLRFLWRLFRIVWKKQVIPKAWRRAGGLFLPKEKVSREIGQFRPICLLNVEGKIFFSVVTQRLSDYLLKNKLIDTSIQKAGVPGFSGCLEHTSVIWHQIQEAKQERRNLHVVFLDLANAFGSVPHSLIWGAFDFFRVPSQITGLVKEYFRDIRMCFTTAGYTTAWQRLGMGIMAGCTISPLAFTMALELVIRASGWVVGGERRPDGLRLPPIRAYMDDMTLVTTTAACARRLLGKLDENLKWAGLRIKPAKSRSISLVKGKIEKVSFLVEGEEIPSVLEKPVKSLGRWYTRELTDVGQVEQLKESVVDGLQRIENSGLPGKLKLWCLQFGLFPRVMWPLTMYEVSVTKVEKLERLISSYIRKWLGVPRCLSNVALYGQGVLQLPLSSLTEEYKCAKVRLELQLSGSKDDVVRGLVPRIGTGRKWVARQAVKEAKADLRQLELVGKVQQGREGLGYRMGDPMWSKAGPIERRRLVLGQVRRQEERNRCVRAVSQGKQGQWVNWDGVERRRLSWRELWKMDAYQIRFLLGAVYDVLPSPQNLKQWGGEDSACTLCSEVGTLKHILVGCKISLALGRFTWRHNQVLKCLATTIEDWRRQVCLEQVEGTVVQFVREGGRSRYRGRKELGVVGGARDWEMQVDLGGRLVVPQEIVNTSLRPDMVLWSASQRVVYFIELTVPWEGSVDDAHERKKLRYSELAAEVGGRGWNAKVRPIEVGCRGFIARSTLDLLRELGIRGRKLQRAVKELSQGVAAEQGSLWIWNKRTSADGSGAAKR

SEQ ID NO: 18465 - protein, 1057 aa, Heterotis niloticus
MVKDNGMETTMSGAGAVRGVRGLQEDKKLQVCCCGWQRITTARGLRVHQGRKKCLREGAQGGRIDQYFLRSQANKSNEVQRPVENHSSQDINRTSGAEEEGAGMRDGGVDGVRRSKEKSCELKPRVRWPRAGEKVVWQTINADLVGVLEGMKGSAQVKLEKMGDVIYQYGMDRFGIEQIRREQCQQGGKSRRQKEIDKLVRERRQLKKQWKKATEEERQGIEVLQEEVKSRLVTLRRAEYLRRKRRKKERARAGFYRDPFRFVKGLFSQERKGKLEVSRQELERYLECTYSSAGEVGERGLPVDMPPLGNITAEVDVSPPKWSEVQEVVRRAKASSAPGLNGVPYRVYKSAPDVLRFLWRLFRIMWKKQVIPKAWRRAGGLFLPKEKVSREIEQFRPICLLNVEGKIFFSVVTQRLSDYLLKNKLIDTSIQKAGVPGFSGCLEHTSVIWHQIQEAKQERRNLHVVFLDLANAFGSVPHSFIWGAFDFFSVPSQITGLVKEYFRDIRMCFTTAGYTTAWQRLGMGIMAGCTISPLAFTMALELVIRASGWVVGGERRPDGLRLPPIRAYMDDMMLVTTTAACARRLLGKLDENLKWAGLRIKPAKSRSISLVKGKIEKVSFLVEGEEIPSVLEKPVKSLGRWYTRELTDVGQVEQLKESVADGLQRIENSGLPGKLKLWCLQFGLFPRVMWPLTMYEISVTKVEKLERLISSYIRKWLGVPRCLSNVALYGQGVLQLPLSSLTEEYKCAKVRLELQLSGSKDDVVRGLVPRIGTGRKWVARQAVKEAKADLRQLELVGKVQQGREGLGYRIGDPMWSKAGPIERRRLVIGQVRRQEERNRCVRAVSQGKQGQWVNWDGVERRRLSWRELWKMDAYQIRFLLGAVYDVLPSPQNLKQWGGEDSACTLCSEVGTLKHILVGCKISLALGRFTWRHNQVLKCLAATIEDWRRQVCLEQEVEGTVVQFVREGGRSRYRGRKELGVVGGARDWEMQVDLGGRLVVPQEIVNTSLRPDMVLWSASQRVVYFIELTVPWEGSVDDAHEKKKLRYSELAAEVGGRG

SEQ ID NO: 18466 - protein, 1124 aa, Heterotis niloticus
MVKDPGMETTTSGAGAVKGVRGLQEDKKLQVCCCGWQRITTARGLRVHQGRKKCLREGAQGGRIDQYFLRSQANKSNEVQRPVENHSSQDINRTSGAEEEGAGMRDGGVDGVRRSKEKSCELKPRVRWPKAGEKVVWQTINADLVGVLEGMKGSAQVKLEKLGDVIYQYGMDRFGIEQIRREQCQQGGKSRRQKEIDKLVRERRQLKKQWKKATEEERQGIEVLQEEVKSRLVTLRRAEYLRRKRRKKERARAGFYRDPFKFVKGLFSQERKGKLEVSRQELERYLECTYSSAGEVGERGLPVDMPPLGNITAEVDVSPPKWSEVQEVVRRAKASSAPGLNGVPYRVYKSAPDVLRFLWRLFRIVWKKQVIPKAWRRAGGLFLPKEKVSREIGQFRPICLLNVEGKIFFSVVTQRLSDYLLKNKLIDTSIQKAGVPGFSGCLEHTSVIWHQIQEAKQERRNLHVVFLDLANAFGSVPHSLIWGAFDFFRVPSQITGLVKEYFRDIRMCFTTAGYTTAWQRLGMGIMAGCTISPLAFTMALELVIRASGWVVGGERRPDGLRLPPIRAYMDDMTLVTTTAACARQLLGKLDENLKWAGLRIKPAKSRSISLVKGKIEKVSFLVEGEEIPSVLEKPVKSLGRWYTRELTDVGQVEQLKESVADGLQRIENSGLPGKLKLWCLQFGLFPRVMWPLTMYEISVTKVEKLERLISSYIRKWLGVPRCLSNVALYGQGVLQLPLSSLTEEYKCAKVRLELQLSGSKDDVVRGLVPRIGTGRKWVARQAVKEAKADLRQLELVGKVQQGREGLGYRIGDPMWSKAGPIERRRLVIGQVRRQEERNRCVRAVSQGKQGQWVNWDGVERRRLSWRELWKMDAYQIRFLLGAVYDVLPSPQNLKQWGGEDSACTLCSEVGTLKHILVGCKISLALGRFTWRHNQVLKCLAATIEDWRRQVCLEQEVEGTVVQFVREGGRSRYRGRKELGVVGGARDWEMQVDLGGRLVVSQEIVNTSLRPDMVLWSASQRVVYFIELTVPWEGSVDDARERKKLRYSELAAEVGGRGWNAKVRPIEVGCRGFIARSTLDLLRELGIRGRKLQRAVKELSQAAEQGSLWIWNKRTSADGSGAAKR

SEQ ID NO: 18467 - protein, 1124 aa, Heterotis niloticus
MVKDPGMETTTSGAGAVRGVRGLQEDKKLQVCCCGWQRITTARGLRVHQGRKKCLREGAQGGRIDQYFLRSQANKSNEVQRPVENHSSQDINRTSGAEEEGAGMRDGGVDGVRRSKEKSCELKPRVRWPKAGEKVVWQTINADLVGVLEGMKGSAQVKLEKLGDVIYQYGMDRFGIEQIRREQCQQGGKSRRLKEIDKLVRERRQLKKQWKKATEEERQGIEVLQEEVKSRLVTLRRAEYLRRKRRKKERARAGFYRDPFKFVKGLFSQERKGKLEVSRQELERYLECTYSSAGEVGERGLPVDMPPLGNITAEVDVSPPKWSEVQEVVRRAKASSAPGLNGVPYRVYKSAPDVLRFLWRLFRIVWKKQVIPKAWRRAGGLFLPKEKVSREMGQFRPICLLNVEGKIFFSVVTQRLADYLLKNKLIDTSIQKAGVPGFSGCLEHTSVIWHQIQEAKQERRNLHVVFLDLANAFGSVPHSLIWGAFDFFRVPSQITGLVKEYFRDIRMCFTTAGYTTAWQRLGMGIMAGCTISPLAFTMALELVIRASSWVVGGERRPDGLRLPPIRAYMDDMTLVTTTAACARRLLGKLDENLKWAGLRIKPAKSRSISLVKGKIEKVSFLVEGEEIPSVLEKPVKSLGRWYTRELTDVGQVEQLKESVADGLQRIENSGLPGKLKLWCLQFGLFPRVMWPLTMYEISVTKVEKLERLISSYIRKWLGVPRCLSNVALYGQGVLQLPLSSLTEEYKCAKVRLELQLSGSKDDVVRGLVPRIGTGRKWVARQAVKEAKADLRQLELVGKVQQGREGLGYRIGDPMWSKAGPIERRRLVIGQVRRQEERNRCVRAVSQGKQGQWVNWDGVERRRLSWRELWKMDAYQIRFLLGAVYDVLPSPQNLKQWGGEDSACTLCSEVGTLKHILVGCKISLALGRFTWRHNQVLKCLAATIEDWRRQVCLEQEVEGTVVQFVREGGRSRYRGRKELGVVGGARDWEMQVDLGGRLVVPQEIVNTSLRPDMVLWSASQRVVYFKELTVPWEGSVDDAHERKKLRYSELAAEVGGRGWNAKVRPIEVGCRGFIARSTLDLLRELGIRGRKLQRAVKELSQAAEQGSLWIWNKRTGADGSGAAKR

SEQ ID NO: 18468 - protein, 1124 aa, Heterotis niloticus
MVKDPGMETTTSGAGAVRGVRGVQEDKKLQVCCCGWQRITTARGLRVHQGRKKCLREGAQGGRIDQYFLRSQANKSNEVQRPVENHSSQDINRTSGAEEEGAGMRDGGVDGVRRSKEKSCELKPRVRWPKAGEKVVWQTINADLVGVLEGMKGSAQVKLEKLGDVIYQYGMDRFGIEQIRREQCQQGGKSRRQKEIDKLVRERRQLKKQWKKATEEERQGIEVLQEEVKSRLVTLRRAEYLRRKRRKKERARAGFYRDPFKFVKGLFSQERKGKLEVSRQELERYLECTYSSAGEVGERGLPVDMPPLGNITAEVDVSPPKWSEVQEVVRRAKASSAPGLNGVPYRVYKSAPDVLRFLWRLFRIVWKKQVIPKAWRRAGGLFLPKEKVSREIGQFRPICLLNVEGKIFFSVVTQRLSDYLLKNKLIDTSIQKAGVPGFSGCLEHTSVIWHQIQEAKQERRNLHVVFLDLANAFGSVPHSLIWGAFDFFRVPSQITGLVKEYFRDIRMCFTTAGYTTAWQRLGMGIMAGCTISPLAFTMALELVIRASGWVVGGERRPDGLRLPPIRAYMDDMTLVTTTAACARRLLGKLDENLKWAGLRIKPAKSRSISLVKGKIEKVSFLVESEEIPSVLEKPVKSLGRWYTRELTDVGQVEQLKESVADGLQRIENSGLPGKLKLWCLQFGLFPRVMWPLTMYEISVTKVEKLERLISSYIRKWLGVPRCLSNVALYGQGALQLPLSSLTEEYKCAKVRLELQLSGSKDDVVRGLVPRIGTGRKWVARQAVKEAKADLRQLELVGKVQQGREGLGYRIGDPMWSKAGPIERRRLVIGQVRRQEERNRCVRAVSQGKQGQWVNWDGVERRRLSWRELWKMDAYQIRFLLGAVYDVLPSPQNLKQWGGEDSACTLCSEVGTLRHILVGCKISLALGRFTWRHNQVLQCLAATIEDWRRQVCLEQEVEGTVVQFVREGGRSRYRGRKELGVVGGARDWEMQVDLGGRLVVPQEIVNTSLRPDMVLWSASQRVVYFIELTVPWEGSVDDAHERKKLRYSELAAEVGGRGWNAKVRPIEVGCRGFIARSTLDLLRELGIRGRKLQRAVKELSQAAEQGSLWIWNKRTSADGSGAAKR

SEQ ID NO: 18469 - protein, 1045 aa, Heterotis niloticus
MVKDPGMETTTSGAGAVRGVRGVQEDKKLQVCCCGWQRITTARGLRVHQGRKKCLREGAQGGRIDQYFLRSQANKSNEVQRPVENHSSQDINRTSGAEEEGAGMRDGGVDGVRRSKEKSCELKPRVRWPKAGEKVVWQTINADLVGVLEGMKGSAQVKLEKLGDVIYQYGMDRFGIEQIRREQCQQGGKSRRQKEIDKLVRERRQLKKQWKKATEEERQGIEVLQEEVKSRLVTLRRAEYLRRKRRKKERARAGFYRDPFKFVNGLFSQERKGKLEVSRQELERYLECTYSSAGEVGERGLPVDMPPLGNITAEVDVSPPKWSEVQEVVRRAKASSAPGLNGVPYRVYKSAPDVLRFLWRLFRIVWKKQVIPKAWRRAGGLFLPKEKVSREIGQFRPICLLNVEGKIFFSVVTQRLSDYLLKNKLIDTSIQKAGVPGFSGCLEHTSVIWHQIQEAKQERRNLHVVFLDLANAFGSVPHSLIWGAFDFFRVPSQITGLVKEYFRDIRMCFTTAGYTTAWQRLGMGIMAGCTISPLAFTMALELVIRASGWVVGGERRPDGLRLPPIRAYMDDMTLVTTTAACARRLLGKLDKNLKWAGLRIKPAKSRSISLVKGKIEKVSFLVEGEEIPSVLEKPVKSLGRWYTRELTDVGQVEQLKESVADGLQRIENSGLPGKLKLWCLQFGLFPRVMWPLTMYEISVTKVEKLERLISSYIRKWLGVPRCLSNVALYGQGVLQLPLSSLTEEYKCAKVRLELQLSGSKDDVVRGLVPRIGTGRKWVARQAVKEAKADLRQLELVGKVQQGREGLGYRIGDPMWSKAGPIERRRLVIGQVRRQEERNRCVRAVSQGKQGQWVNWDGVERRRLSWRELWKMDAYQIRFLLGAVYDVLPSPQNLKQWGGEDSACTLCSEVGTLKHILVGCKISLALGRFTWRHNQVLQCLAATIEDWRRQVCLEQEVEGTVVQFVREGGRSRYRGRKELGVVGGARDWEMQVDLGGRLVVPQEIVNTSLRPDMVLWSASQRVVYFIELTVPWEGSVDDAHERKKLR

SEQ ID NO: 18470 - protein, 1141 aa, Heterotis niloticus
MLECIDSSPCIISEADDMVKDPGMETTTSGAGAVRGVRGVQEDKKLQVCCCGWQRITTARGLRVHQGRKKCLREGAQGGRIDQYFLRSQANKSNEVQRPVENHSSQDINRTSGAEEEGAGMRDGGVDGVRRSKEKSCELKPRVRWPKAGEKVVWQTINADLVGVLEGMKGSAQVKLEKLGDVIYQYGMDRFGIEQIRREQCQQGGKTRRQKEIDKLVRERRQLKKQWKKATEEERQGIEVLQEEVKSRLVTLRRAEYLRRKRRKKERARAGFYRDPFKFVKGLFSQERKGKLEVSRQELERYLECTYSSAGEVGERGLPVDMPPLGNITAEVDVSPPKWSEVQEVVRRAKASSAPGLNGVPYRVYKSAPDVLRFLWRLFRIVWKKQVIPKAWRRAGGLFLPKEKVSREIGQFRPICLLNVEGKIFFSVVTQRLSDYLLKNKLIDTSIQKAGVPGFSGCLEHTSVIWHQIQEAKQERRNLHVVFLDLANAFGSVPHSLIWGAFDFFRVPSQITGLVKEYFRDIRMCFTTAGYTTAWQRLGMGIMAGCTISPLAFTMALELVIRASGWVVGGERRPDGLRLPPIRAYMDDMTLVTTTAACARRLLGKLDENLKWAGLRIKPAKSRSISLVKGKIEKVSFLVEGEEIPSVLEKPVKSLGRWYTRELTDVGQVEQLKESVADGLQRIENSGLPGKLKLWCLQFGLFPRVMWPLTMYEISVTKVEKLERLISSYIRKWLGVPRCLSNVALYGQGVLQLPLSSLTEEYKCAKVRLELQLSGSKDDVVRGLVPRIGTGRKWVARQAVKEAKADLRQLELVGKVQQGREGLGYRIGDPMWSKAGPIERRRLVIGQVRRQEERNRCVRAVSQGKQGQWVNWDGVERRRLSWRELWKMDAYQIRFLLGAVYDVLPSPQNLKQWGGEDSACTLCSEVGTLKHILVGCKISLALGRFTWRHNQVLQCLAATIEDWRRQVCLEQEVEGTVVQFVREGGRSRYRGRKELGVVGGARDWEMQVDLGGRLVVPQEIVNTSLRPDMVLWSASQRVVYFIELTVPWEGSVDDAHERKKLRYSELAAEVGGRGWNAKVRPIEVGCRGFIARSTLDLLRELGIRGRKLQRAVKELSQAAEQGSLWIWNKRTSADGSGAAKR

SEQ ID NO: 18471 - protein, 1094 aa, Heterotis niloticus
MVKDPGMEATTSGAGAVRGVRGLQEDKKLQVCCCGWQRITTARGLRVHQGRKKCLREGAQGGRIDQYFLRRQSNKSNEVQRPVENHSSQDINRTSGAEEEGPGMGDGGVDGVRRSKEKSCELKPRVRWPRAGEKVVWQTINADLVGVLEGMKGSAQVKLEKMGDVIYQYGMDRFGIEQIRREQCQQGGKSRRQKEIDKLVRERRQLKKQWKKAMEEERQGIEVLQEEVKSRLVTLRRAEYLRRKRRKKERARAGFYRDPFRFVKGLFSQERKGKLEVSRQELERYLECTYSSAGEVGERGLPVDMPPLGNITAEVDVSPPKWSEVQEVVRRAKASSAPGLNGVPYRVYKSAPDVLRFLWRLFRIVWKKQVIPKAWRRAGGLFLPKEKVSREIGQFRPICLLNVEGKIFFSVVTQRLSDYLLKNKLIDTSIQKAGVPGFSGCLEHTSVIWHQIQEAKQERRNLHVVFLDLANAFGSVPHSLIWGAFDFFRVPSQITGLVKEYFRDIRMCFTTAGYTTAWQRLGMGIMAGCTISPLAFTMALELVIRASGWVVGGERRPDGLRLPPIRAYMDDMTLVTTTAACARRLLGKLDENLRWAGLRIKPAKSRSISLVKEKIEKVSFLVEGEEIPSVLEKPVKSLGRWYTRELTDVGQVEQLKESVVDGLQRIENSGLSGKLKLWCLQFSLFPRVMWPLTMYEVSVTKVEKLERLISSYIRKWLGVPRCLSNVSLYGQGVLQLPLSSLTEEYKCAKVRLELQLSGSKDDVVRGLVPRIGTGRKWVARQAVKEAKADLRQLELVGKVQQGREGLGYRIGDPMWSKAGPIERRRLVQGQVRRQEERNRCVRAVSQGKQGQWVNWDGVERKRLSWRELWKMDAYQIRFLLGAVYDVLPSPQNLKQWGGEDSACTLCSEVGTLKHILVGCKISLALCRFTWRHNQVLKCLAATIEDWRRQVCLEQEGEGTVVQFVREGGRSRYRGRKELGVVRGARNWEMQVDLGGRLVVPQEIVNTSLRPDMVLWSASQRVVYFIELTVPWEGSVDDAHERKKLRYSELAAEVGGRGWNAKVRPIEVGCRGFIARLLLICCANSGFGGGSCNGR

SEQ ID NO: 18472 - protein, 954 aa, Heterotis niloticus
MDRFGIEQIRREQCQQGGKSRRQKEIDKLVRERRQLKKQWKKATEEERQGIEVLQEEVKSRLVTLRRAEYLRRKRRKKERSRAGFYRDPFRFVKGLFSQERKGKLEVSRQELERYLECTYSSAGEVGERGLPVDMPPLGSITAEVDVSPPKWSEVQEVVRRAKASSAPGLNGVPYRVYKSAPDVLRFLWRLFMIVWKKQVIPKAWRRAGGLFLPKEKVSREIGQFRPICLLNVEGKIFFSVVTQRLSDYLLKNKLIDTSIQKAGVPGFSGCLEHTSVIWHQIQEAKQERRNLHVVFLDLANAFGSVPHSLTWGAFDFFRVPSQITGLVKEYFRDIRMCFTTAGYTTAWQRLGMGIMAGCTISPLAFTMALELVIRASGWVVGGERRPDGLRLPPIRAYMDDMTLVTTTATCARRLLGKLDENLKWAGLRIKPAKSRSISLVKGKIEKVSFLVEGEEIPSVLEKPVKSLGRWYTRELTDVGQVEQLKESVVDGLQRIENSGLLGKLKLWCLQFGLFPRVMWPLTMYEVSVTKVEKLERLISSYIRKWLGVPRCLSNVALYGQGVLQLPLSSLTEEYKCAKVRLELQLSGSKDDVVRGLVPRIGTGRKWVARQAVKEAKADLRQLELVGKVQQGREGLGYRIGDPMWSKAGPIERRRLVLGQVRRQEERNRCVRAVSQGKQGQWVNWDGVERRRLSWRELWKMDAYQIRFLLGAVYDVLPSPQKLKQWGGEDSACTLCSEVGMLKHILVGCKISLALGRFTWRHNQVLKCLAATIEDWRRQVCLEQEVEGTVVQFVREGGRSRHRGRKELGVVRGARDWEMQVDLGGRLVVPQEIVNTSLRPDMVLWSASQRVVYFIELTVPWEGSVDDAHERKKLRYSELAAEVGGRGWNTKVRPIEVGCRRFIARSTLDLLRELGIRGRKLQRAVKELSQAAEQGSLWIWNKRTSADGSGAAKR

SEQ ID NO: 18473 - protein, 974 aa, Heterotis niloticus
MKGSAQVKLEKMGDVIYQYGMDRFGIEQIRREQCQQGGKSRRQKEIDKLVRERRQLKKQWKKATEEERQGIEVLQEEVKSRLVTLRRAEYLRRKRRKKERARAGFYRDPFRFVKGLFSQERKGKLEVSRQELERYLECTYSSAGEVGERGLPVDMPPLGNITAEVDVSPPKWSEVQEVVRRAKASSAPGLNGVPYQVYKSAPDVLRFLWRLFRIVWKKQVIPKAWRRAGGLFLPKEKVSREIGQFRPICLLNVEGKIFFSVVTQRLSDYLLKNKLIDTSIQKAGVPGFSGGLENTSVIWHQIQEAKQERRNLHVVFLDLANAFGSVPHSLIWGAFDFFRVPSQITGLVKEYFRDIRMCFTTAGYTTAWQRLGMGIMAGCTISPLAFTMALELVIRASGWVVGGERRPDGLRLPPIRAYMDDMTLVTTTAACARRLLGKLDENLKWAGLRIKPAKSRSISLVKGKIEKVSFLVEGEEIPSVLEKPVKSLGRWYTREFTDVGQVEQLKESVVDGLQRIENSGLPGKLKLWCLQFGLFPRVMWPLTMYEVSVTKVEKLERLISSYIRKWLGVPRCLSNVALYGQGVLQLPLSSLTEKYKCAKVRLELQLSGSKDDVVRGLVPRIGTGRKWVARQAVKEAKADLRQLELVGKVQQGREGLGYRIGDPMWSKAGPIERRRLVLEQVRRQEERNRCVRAVSQGKQGQWVNWDGVERRRLSWRELWKMDAYQIRFLLGAVYDVLPSPQNLKQWGGEDSACTLCSEVGTLKHILVGCKISLALGRFTWRHNQVLKCLAATIEDWRRQVCLEQEVEGTVVQFVREGGRSRYRGRKELGVVRGARDWEMQVDLGGRLVVPQEIVNTSLRPDMVLWSASQRVVYFIELTVPWEGSVDDAHERKKLRYSELAAEVGGRGWNAKVRPIEVGCCGFIARSTLDLLRELGIRGRKLQRAVKELSQAAEQGSLWIWNKRTSADGSGAAKR

SEQ ID NO: 18474 - protein, 1122 aa, Heterotis niloticus
MVKDPGMETTTSGAGAVRGVRGLQEDKKLQVCCCGWQRITTARGFRVHQGRKKCLREGAQGGRIDQYFLRSQSNKSNEVQRPVENHSSQDINRTSGAEEEGAGMRDGGVDGVRRSKEKSCELKPRVRWPRAGEKVVWQTINADLVGVLEGMKGSAQVKLEKMGDVIYQYGMDRFGIEQIRREQCQQGGKSRRQKEIDKLARERRQLKKQWKKATEEERQGIEVLQEEVKSRLVTRRRAEYLRRKRRKKERARAGFYRDPFKFVKGLFSQERKGKLEVSRQELEGYLECTYSSAGEVGERGLPVDMPPLGNITAEVDVSPPKWSEVQEVVRRAKASSAPGLNGVPYRVYKSAPDVLRFLWRLFRIVWKKQVIPKAWRRAGGLFLPKEKVSREIGQFRPICLLNVKGKIFFSVVTQRLSDYLLKNKLIDTSIQKAGVPGFSGCLEHTSVIWHQIQEAKQERRNLHVVFLDLANAFGSVPHSLIWGAFDFFRVPSQITGLVKEYFRDIRMCFTTAGYTTAWQRLGMGIMAGCTISPLAFTMALELVIRASGWVVGGERRPDGLRLPPIRAYMDDMTLVTTTAACARRLLGKLDENLKWAGLRIKPAKSRSISLVKGKIEKVSFLVEGEEIPSVLEKPVKSLGRWYTRELTDVGQVEQLKESVVDGLQRIENSGLPGKLKLWCLQFGLFPRVMWLLTMYEVSVTKVEKLERLISSYIRKWLGVPRCLSNVALYGQGVLQLPLSSLTEEYKCAKVRLELQLSGSKDDVVRGLVPRIGTGRKWVARQAVKEAKADLRQLELVGKVQQGREGLGYRIGDPMWSKAGPIERRRLVLGQVRRQEERNRCVRAVSQGKQGQWVNWDGVERRRLSWRELWKMDAYQIRFLLGAVYDVLPSPQNLKQWGGEDSACTLCSEVGTLKHILVGCKISLALGRFTWRHNQVLKCLAATIEDWRRQVCLEQEVEGTVVQFVREGGRSRYRGRKELGVVGGARDWEMQVDLGGRLVVPQEIVNTSLRPDMVLWSASQRVVYFIELTVPWEGSVDDAHERKKLRYSELAAEVGGRGWNAKVRPIEVGCRGFIARSTLDLLRELRIRGRKLQRAVKELAAEQGSLWIWNKRTSADGSGAAKR

SEQ ID NO: 18475 - protein, 964 aa, Heterotis niloticus
MGKFTIALTLACKGRTCPCPTCFPKEVTVAFPKSHLAMLVRERRHLKKQWKKATEEERHGIEVLQEEVKSRLVTLRRAEYLRRKRRKKERARAGFYRDPFKFVKGLFSQERKGKLEVSRQELERYLECTYSSAGEVGERGLPVDMPPLGNITAEVDVSPPKWSEVQEVVRRAKASSAPGLNGVPYRVYKSAPDVLRFLWRLFRIVWKKQVIPKAWRRAGGLFLPKEKVSREIGQFRPICLLNVEGKIFFSVVTQRLSDYLLKNKLIDTSIQKAGVPGFSGCLEHTSVIWHQIQEAKQERRNLHVVFLDLANAFGSVPHSLIWGAFDFFRVPSQITGLVKEYFRDIRMCFTTAGYTTAWQRLGMGIMAGCTISPLAFTMALELVIRASGWVVGGERRPDGLRLPPIRAYMDDMTLVTTTAACARRLLGKLDENLKWAGLRIKPAKSRSISLVKGKIEKVSFLVEGEEIPSVLEKPVKSLGRWYTRELTDVGQVEKLKESVVDGLQRIENSGLPGKLKLWCLQFGLFPRVMWPLTMYEVSVTKVEKLERLISSYIRKWLGVPRCLSNVALYGQGVLQLPLSSLTEEYKCAKVRLELQLSGSKDDVVRGLVPRIGTGRKWVARQAVKEAKADLRQLELVGKVQQGREGLGYRIGDPMWSKAGLIERRRLVLGQVRRQEERNRCVRAVSQGKQGQWVNWDGVERRRLSWRELWKMGAYQIRFLLGAVYDVLPSPQNLKQWGGEDSACTLCSEVGTLKHILVGCKISLALGRFTWRHNQVLKCLAATIEDWRRQVCLEQEVEGTVVQFVREGGRSRCRGRKELGVVGGARDWEMQVNLGGRLVVPQEIVNTSLRPDMVLWSASQRVVYFIELTVPWEGSVDDAHERKKLRYSELAAEVGGRGWNAKVRLIEVGCRGFIARSTLDLLRELGIRGRKLQRAVKELSQAAEQGSLWIWNKRTSADGSGAAKR

SEQ ID NO: 18476 - protein, 820 aa, Heterotis niloticus
MPPLGNITAEVDVSPPKWSEVQEVVRRAKASSAPGLNGVPYRVYKSAPDVLRFLWRLFRIVWKKQVIPKAWCRAGGLFLPKEKVSREIGQFRPICLLNVEGKIFFSVVTQRLSDYLLKNKLIDTSIQKAGVPGFSGCLEHTSVIWHQIQEAKQERRNLHVVFLDLANAFGSVPHSLIWGAFDFFRVPSQITGLVKEYFRDIRMCFTTAGYTTAWQRLGMGIMAGCTISPLAFTMALELVIRASGWVVGGERRPDGLRLPPIRAYMDDMTLVTTTAACARRLLGKLDENLKWAGLRIKPAKSRSISLVKGKIEKVSFLVEGEEIPSVLEKPVKSLGRWYTRELTDVGQVEQLKESVADGLQRIENSGLLGKLKLWCLQFGLFPRVMWPLTMYEISVTKVEKLERLISSYIRKWLGVPRCLSNVALYGQGVLQLPLSSLTEEYKCAKVRLELQLSGSKDDVVRGLVPRIGTGRKWVARQAVKEAKADLRQLELVGKVQQGREGLGYRIGDPMWSKAGPIERRRLVIGQVRQQEERNRCVRAVSQGKQGQWVNWDGVERRRLSWRELWKMDAYQIRFLLGAVYDVLPSPQNLKQWGGEDSACTLCSEVGTLKHILVGCKISLALGRFTWRHNQVLKCLAATIEDWRRQVCLEQEVEGTVVQFVREGGRSRYRGRKELGVVGGARDWEMQVDLGGRLVVPQEIVNTSLRPDMVLWSASQRVVYFIELTVPWEGSVDDAHERKKLRYSELAAEVGGRGWNAKVRPIEVGCRGFIARSTLDLLRELGIRGRKLQRAVKELSQAAEQGSLWIWNKRTSADGSGAAKR

SEQ ID NO: 18477 - protein, 1124 aa, Heterotis niloticus
MVKDPGMETTTSGAGAVRGVRGLQEDKKLQVCCCGWQRITTARGLRVHQGRKKCLREGAQGGRIDQYFLRSQSNKSNEVQRPVENHSSQDINRTAGAEEEGAGMRDGGVDGVRRSKEKSCELKPRVRWPRAGEKVVWQTINADLVGVLEGMKGSAQVKLEKMGDVIYQYGMDRFGIEQIRREQCQQGGKSRRQKEIDKLVRERRQLKKQWKKATEEERQGIEVLQEEVKSRLVTLRRAEYLRRKRRKKERARAGFYRDPFKFVKGLFSQERKGKLEVSRQELERYLECTYSSAGEVGERGLPVDMPPLGNITAEVDVSPPKWSEVQEVVRRAKASSAPGLNGVPYRVYKSAPDVLRFLWRLFRIVWKKQVIPKAWRRAGGLFLPKEKVSREIGQFRPICLLNVEGKIFFSVVTQRLSDYLLKNKLIDTSIQKAGVPGFSGCLEHTSVIWHQIQEAKQERRNLHVVFLDLANAFGSVPHSLIWGTFDFFRVPSQITGLVKEYFRDIRMCFTTAGYTTAWQRLGMGIMAGCTISPLAFTMALELVIRASGWVVGGERRPDGLRLPPIRAYMDDMTLVTTTAACARRLLGKLDENLKWAGLRIKPAKSRSISLVKGKIEKVSFLVEGEEIPSVLEKLVKSLGRWYTRELTDVGQVEQLKESVVDGLQRIENSGLPGKLKLWCLQFGLFPRVMWPLTMYEVSVTKVEKLERLISSYIRKWLGVPRCLSNVALYGQGVLQLPLSSLTEEYKCAKVRLELQLSGSKDDVVRGLVPRIGTGRKWVARQVVKEAKVDLRQLELVGKVQQGREGLGYRIGDPMWSKAGPIERRRLVLGQVRRQEERNRCVRVVSQGKQGQWVNWDGVERRRLSWRELWKMDAYQIRFLLGAVYDVLPSPQNLKQWGGEDSACTLCSEVGTLKHILVGCKISLALGRFTWRHNQVLKCLAATVEDWRRQVCLEQEVEGTMVQFVREGGRSRYRGRKELGVVGGARDWEMQVDLGGRLVVPQEIVNTSLRPDMVLWSASQRVVYFIELTVPWEGSVDDAHERKKLRYSELAAEVGGRGWNAKVRPIEVGCRGFIARSTLDLLRELGIRGRKLQRAVKELSQAAEQGSLWIWNKRTSADGSGAAKR

SEQ ID NO: 18478 - protein, 975 aa, Heterotis niloticus
MASFHPPQMVRFSHCVIYQYGMDRFGIEQIRREQCQQGGKSRRQKEIDKLVRERRQLKKQWKKATEEERQGIEVLQEEVKSRLVTLRRAEYLRRKRRKKERARAGFYRDPFKFVKGLFSQERKGKLEVSRQELERYLECTYSSAGEVGERGLPVDMPPLGNITAEVDVSPPKWSEVQEVVRRAKASSAPGLNGVPYQVYKSAPDVLRFLWRLFRIVWKKQVIPKAWRRAGGLFLPKEKVSREIGQFRPICLLNVEGKIFFSVVTQRLSDYLLKNKLIDTSIQKAGVPGFSGCLEHTSVIWHQIQEAKQERRNLHVVFLDLANAFGSVPHSLIWGAFDFFRVPSQITGLVKEYFRDIRMCFTTAGYTTAWQRLGMGIMAGCTISPLAFTMALELVIRASGWVVGGERRPDGLRLPPIRAYMDDMTLVTTTAACARRLLGKLDENLKWAGLRIKPAKSRSISLVKGKIEKVSFLVEGEEIPSVLEKPVKSLGRWYTRELTDVGQVEQLKESVADGLQRIENSGLPGKLKLWCLQFGLFPRVMWPLTMYEISVTKVEKLERLISSYIRKWLGVPRCLSNVALYGQGVLQLPLSSLTEEYKCAKVRLELQLSGSKDDVVRGLVPRIGTGRKWVARQAVKEAKADLRQLELVGKVQQGREGLGYRIGDPMWSKAGPIERRRLVIGQVRRQEERNRCVRAVSQGKQGQWVNWDGVERRRLSWRELWKMDAYQIRFLLGAVYDVLPSPQNLKQWGGEDSACTLCSEVGTLKHILVGCKISLALGRFTWRHNQVLQCLAATIEDWRRQVCLEQEVEGTGVQFVREGGRSRYRGRKELGVVGGARDWEMQVDLGGRLVVPQEIVNTSLRPDMVLWSASQRVVYFIELTVPWEGSVDDAHERKKLRYSELAAEVGGRGWNAKVRPIEVGCRGFIARSTLDLLRELGIRGRKLQRAVKELSQAAEQGSLWIWNKRTSADGSGAAKR

SEQ ID NO: 18479 - protein, 974 aa, Heterotis niloticus
MKGSAQVKLEKMGDVIYQYGMDRFGIEQIRREQCQQGGKSRRQKEIDKLVRERRQLKKQWKKATEEERQGIEVLQEEVKSRLVTLRRAEYLRRKRRKKERARAGFYRDPFRFVKGLFSQERKGKLEVSRQELERYLECTYSSAGEVGERGLPVDMPPLGNITAEVDVSPPKWSEVQEVVRRAKASSAPGLNGVPYRVYKSAPDVLRFLWRLFRIVWKKQVIPKAWRRAGGLFLPKEKVSREIGQFRPICLLNVEGKIFFSVVTQRLSDYLLKNKLIDTSIQKAGVPGFSGCLEHTSVIWHQIQEAKQERRNLHVVFLDLANAFGSVPHSLIWGAFDFFRVPSQITGLVKEYFQDIRMCFTTAGYTTAWQRLGMGIMAGCTISPLAFTMALELVIRASGWVVGGERRPDGLRLPPIRAYMDDMTLVTTTAACARRLLGKLDENLKWAGLRIKPAKSRSISLVKGKIEKVSFLVEGEEIPSVLEKPVKSLGRWYTRELTDVGQVEQLKESVVDGLQRIENSGLPGKLKLWCLQFGLFPRVMWPLTMYEVSVTKVEKLERLISSYIRKWLGVPRCLSNVALYGQGVLQLPLSSLTEEYKCAKVRLELQLSGSKDDVVRGLVPRIGTGRKWVARQAVKEAKADLRQLELVGKVQQGREGLGYRIGDPMWSKAGPIERRRLVLGQVRRQEERNRCVRAVSQGKQGQWVNWDGVERRRLSWRELWKMDAYQIRFLLGAVYDVLPSPQNLKQWGGEDSACTLCSEVGTLKHILVGCKISLALGRFTWRHNQVLRCLAATIEDWRRQVCLEQEVEGTVVQFVREGGRSRYRGRKELGVVRGARDWEMQVDLGGRLVVPQEIVNTSLRPDMVLWSASQRVVYFIELTVPWEGSVDDAHERKKLRYSELAAEVGGRGWNAKVRPIEVGCHGFIARSTLDLLRELGIRGRKLQRAVKELSQAAEQGSLWIWNKRTSADGSGAAKR

SEQ ID NO: 18480 - protein, 1123 aa, Heterotis niloticus
MVKDPGMETTTSGAGAVRGVRGLQEDKKLQVCCCGWQRITTARGLRVHQGRKKCLREGAQGGRIDQYFLRSQSNKSNEVQRPVENHSSQDINRTSGAEEEGAGMRDGGVDGVRRSKEKSCELKPRVRWPRAGEKVVWQTINADLVGVLEGMKGSAQVKLEKMGDVIYQYGMDRFGIEQIRREQCQQGGKSRRQKEIDKLVRERRQLKKQWKKATEEERQGIEVLQEEVKSRLVTLRRAEYLRRKRRKKERARAGFYRDPFKFVKGLFSQERKGKLEVSRQELERYLECTYSSTGEVGERGLPVDMPPLGNITAEVDVSPPKWSEVQEVVRRAKASSAPGLNGVPYRVYKSAPDVLRFLWRLFRIVWKKQVIPKAWRRAGGLFLPKEKVSREIGQFRPICLLNVEGKIFFSVVTQRLSDYLLKNKLIDTSIQKAGVPGFSGCLEHTSVIWHQIQEAKQERRNLHVVFLDLANAFGSVPHSLIWGAFDFFRVPSQITGLVKEYFRDIRMCFTTAGYTTAWQRLGMGIMAGCTISPLAFTMALELVIRASGWVVGGERRPDGLRLPPIRAYMDDMTLVTTTAACARRLLGKLDENLKWAGLRIKPAKSRSISLVKGKIEKVSFLVEGEEIPSVLEKPVKSLGRWYTRELTDVGQVEQLKESVVDGLQRIENSGLPGKLKLWCLQFGLFPRVMWPLTMYEVSVTKVEKLERLISSYIRKWLGVPRCLSNVALYGQGVLQLPLSSLTEEYKCAKVRLELQLSGSKDDVVRGLVPRIGTGRKWVARQAVKEAKADLRQLELVGKVQQGREGLGYRMGDPMWSKAGPIERRRLVLGQVRRQEERNRCVRAVSQGKQGQWVNWDGVERRRLSWRELWKMDAYQIRFLLGAVYDVLPSPQNLKQWGGEDSACTLCSEVGTLKHILVGCKISLALGRFTWRHNQVLKCLAATIEDWRRQVCLEQVEGTVVQFVREGGRSRYRGRKELGVVGGARDWEMQVDLGGRLVVPQEIVNTSLRPDMVLWSASQRVVYFIELTVPWEGSVDDAHERKKLRYSELAAEVGGRGWNAKVRPIEVGCRGFIARSTLDLLRELGIRGRKLQRAVKELSQAAEQGSLWIWNKRTSADGSGAAKR

SEQ ID NO: 18481 - protein, 1021 aa, Heterotis niloticus
MGDGGVDGVRRSKEKSCELKPRVRWPRAGEKVVWQTINADLVGVLEGMKGSAQVKLEKMGDVIYQYGVDRFGIEQIRREQCQQGGKSRRQKEIDKLVRERRQLKKQWKKATEEERQGIEVLQEEVKSRLVTLRRAEYLRRKRRKKERARAGFYRDPFKFVKGLFSQERKGKLEVSRQELERYLECTYSSAGEVGERGLPVDMPPLGNITAEVDVSPPKWSEVQEVVRRAKASSAPGLNGVPYRVYKSAPDVLRFLWRLFRIVWKKQVIPKAWRRAGGLFLPKEKVSREIGQFRPICLLNVEGKIFFSVVTQRLSDYLLKNKLIDTSIQKAGVPGFSGCLEHTSVIWHQIQEAKQERRNLHVVFLDLANAFGSVPHSLIWGAFDFFRVPSQITGLVKEYFRDIRMCFTTAGYTTAWQRLGMGIMAGCTISPLAFTMALELVIRASGWVVGGERRPDGLRLPPIRAYMDDMTLVTTTAACARRLLGKLDENLKWAGLRIKPAKSRSISLVKGKIEKVSFLVEGEEIPSVLEKPVKSLGRWYTRELTDVGQVEQLKESVADGLQRIENSGLPGKLKLWCLQFGLFPRVMWPLTMYEISVTKVEKLERLISSYIRKWLGVPRCLSNVALYGQGVLQLPLSSLTEEYKCAKVRLELQLSGSKDDVVRGLVPRIGTGRKWVARQAVKEAKADLRQLELVGKVQQGREGLGYRIGDPMWSKAGPIERRRLVLGQVRRQEERNRCVRAVSQGKQGQWVNWDGVERRRLSWRELWKMDAYQIRFLLGAVYDVLPSPQNLKQWGGEDSACTLCSEVGTLKHILVGCKISLALGRFTWRHNQVLKCLAATIEDWRRQVCLEQEVEGTVVQFVREGGRSRYRGRKELGVVGGARDWEMQVDLGGRLVVPQEIVNTSLRPDMVLWSASQRVVYFIELTVPWEGSVDDAHERKKLRYSELAAEVGGRGWNAKVRPIEVGCRGFIARSTLDLLRELGIRGRKLQRAVKELSQAAEQGSLWIWNKRTSADGSGAAKR

SEQ ID NO: 18482 - protein, 1124 aa, Heterotis niloticus
MVKDPGMETTTSGAGAVRGVRGLQEDKKLQVCCCGWQRITTARGLRVHQGRKKCLREGAQGGRIDQYFLRSQANKSNEVQRPVENHSSQDINRTSGAEEEGAGMRDGGVDGVRRSKEKSCELKPRVRWPKAGEKVVWQTINADLVGVLEGMKGSAQVKLEKLGDVIYQYGMDRFGIEQIRREQCQQGGKSRRQKEIDKLVRERRQLKKQWKKATEEERQGIEVLQEEVKSRLVTLRRAEYLRRKRRKKERARAGFYRDPFKFVKGLFSQERKGKLEVSRQELERYLECTYSSAGEVGERGLPVDMPPLGNITAEVDVSPPKWSEVQEVVRRAKASSAPGLNGVPYRVYKSAPDVLRFLWRLFRIVWKKQVIPKAWRRAGGLFLPKEKVSREIGQFRPICLLNVEGKIFFSVVTQRLSDYLLKNKLIDTSIQKAGVPGFSGCLEHTSVIWHQIQEAKQERRNLHVVFLDLANAFGSVPHSLIWGAFDFFRVPSQITGLVKEYFRDIRMCFTTAGYTTAWQRLGMGIMAGCTISPLAFTMALELVIRASGWVVGGERRPDGLRLPPIRAYMDDMTLVTTTAACARRLLGKLDENLKWAGLRIKPAKSRSISLVKGKIEKVSFLVEGEEIPSVLEKPVKSLGRWYTRELTDVGQVEQLKESVADGLQRIENSGLPGKLKLWCLQFGLFPRVMWPLTMYEISVTKVEKLERLISSYIRKWLGVPRCLSNVALYGQGVLQLPLSSLTEEYKCAKVRLELQLSGSKDDVVRGLVPRIGTGRKWVVRQAVKEAKADLRQLELVGTVQQGREGLGYRIGDPMWSKAGPIERRRLVIGQVRRQEERNRCVRAVSQGKQGQWVNWDGVERRRLSWRELWKMDAYQIRFLLGAVYDVLPSPQNLKQWGGEDSACTLCSEVGTLKHILVGCKISLALGRFTWRHNQVLKCLAATIEDWRRQVCLEQEVEGTMVQFVREGGRSRYRGRKELGVVGVARDWEMQVDLGGRLVVPQEIVNTSLRPDMVLWSASQRVVYFIELTVPWEGSVDDAHERKKLRYSELAAEVGGRGWNAKVRPIEVGCRGFIARSTLDLLRELGIRGRKLQRAVTELSQAAEQGSLWIWNKRTGADGSGAAKR

SEQ ID NO: 18483 - protein, 974 aa, Heterotis niloticus
MKGSAQVKLEKMGDVIYQYGMDRFGIEQIRREQCQQGGKSRRQKEIDKLVRERRQLKKQWKKATEEERQGIEVLQEEVKSRLVTLRRAEYLRRKRRKKERARAGFYRDPFRFVKGLFSQEKKGKLEVSRQELERYLECTYSSAGEVGERGLPVDMPPLGNITAEVDVSPPKWSEVQEVVRRAKASSAPGLNGVPYRVYKSAPDVLRFLWRLFRIVWKKQVIPKAWRRAGGLFLPKEKVSREIGQFRPICLLNVEGKIFFSVVTQRLSDYLLKNKLIDTSIQKAGVPGFSGCLEHTSVIWHQIQEAKQERRNLHVVFLDLANAFGSVPHSLVWGAFDFFRVPSQIAGLVKEYFRDIRMCFTTAGYTTAWQRLGMGIMAGCTISPLAFTMVLELVIRASGWVVGGERRPDGLRLPPVRAYMDDMTLVTTTAACARRLLGKLDENLKWAGLRIKPAKSRSISLVKGKIEKVSFLVEGEEIPSVLEKPVKSLGRWYTRELTDVGQVEQLKESVVDRLQRIENSGLPGKLKLWCLQFGLFPRVMWPLTMYEVSVTKVEKLERLISSYIRKWLGVPRCLSNVALYGQGVLQLPLSSLTEEYKCVKVRVELQLSGSKDDVVRGLVPRIGTGRKWVARQAVKEAKADLRQLELVGKVQQGREGLGYRIGDPMWSKAGPIERRRLVLGQVHRQEERHRCVRAVSQGKQGQWVNWDGVERRRLSWRELWKMDAYQIRFLLGAVYDVLPSPQNLKQWGGEDSACTLCSEVGTLKHILVGCKISLALGRFTWRHNQVLKCLAATIEDWRRQVCLEQEVECTVVQFVREGGRSRYRGRKELGVVRGARDWEMQVDLGGRLVVPQEIVNTSLRPDMVLWSASQRVVYFIELTVPWEGSVDDAHERKKLRYSELAAEVGGRGWNAKVRPIEVGCRGFIARSTLDLLRELGIRGRKLQRAVKELSQAAEQGSLWIWNKRTSADGSGAAKR

SEQ ID NO: 18484 - protein, 821 aa, Heterotis niloticus
MPPLGNITAEVDVSPPKWSEVQEVVRRAKASSAPGLNGVPYRVYKSAPDVLRFLWRLFRIVWKKQVIPKAWRRAGGLFLPKEKVSREIGQFRPICLLNVEGKIFFSVVTQRLSDYLLKNKLIDTSIQKAGVPGFSGCLEHTSVIWHQIQEAKQERRNLHVVFLDLANAFGSVPHSLIWGAFDFFRVPSQITGLVKEYFRDIRMCFTTAGYATAWQRLGMGIMAGCTISPLAFTMALELVIRASGWVVGGERRSDGLRLPPIRAYMDDMTLVTTTAACARRLLGKLDENLKWAGLRIKPAKSRSISLVKGKIEKVSFLVEGEEIPSVLEKPVKSLGRWYTRELTDVGQVEQLKESVVDGLQRIENSGLPGKLKLWCLQFGLFPRVMWPLTMYEVSVTKVEKLERLISSYIRKWLGVPRCLSNVALYGQGVLQLPLSSLTEEYKCAKVRLELQLSGSKDDVVRGLVPRIGTGRKWVARQAVKEAKADLRQLELVGKVQQGREGLGYRIGDPMWSKAGPIERRRLGLGQVRRQEERNRCVRAVSQGKQGQWVNWDGVERRRLSWRELWKMDAYQIRFLLGAVYDVLPSPQNLKQRGGGEDSACTLCSEVGTLKHILVGCKISLALGRFTWRHNQVLKCLAATIEDWRRQVCLEQEVEGTVVQFVREGGRNRYRGRKELGVVRGARDWEMQVDLGGRLVVPQEIVNTSLRPDMVLWSASQRVVYFIELTVPWEGSVDDAHERKKLRYSELAAEVGGRGWNAKVRPIEVGCRGFIARSTLDLLRELGIRGQKLQRAVKELSQAAEQGSLWIWNKRTSADGSGAAKR

SEQ ID NO: 18485 - protein, 915 aa, Heterotis niloticus
MATATEEERQGIEVLQEEVKSRLVTLRSAEYLRRKRRKKERARAGFYRDPFKFVKGLFSQERKGKLEVSRQELERYLECTYSSAGEVGERGLPVDMPPLGNITAEVDVSPPKWSEVQEVVRRAKASSAPGLNGVPYRVYKSALDVLRFLWRLFRIVWKKQVIPKAWRRAGGLFLPKEKVSREIGQFRPICLLNVEGKIFFSVVTQRLSDYLLKNKLIDTSIQKAGVPGFSGCLEHTSVIWHQIQEAKQERRNLHVVFLDLANAFGSVPHSLIWGAFDFFRVPSQITGLVKEYFRDIRMCFTTAGYTTAWQRLGMGIMAGCTISPLAFTMALELVIRASGWVVGGERWPDGLCLPPIRAYMDDMTLVTTTAACARRLLGKLDENLKWAGLRIKPAMSRSISLVKGKIEKVSFLVEGEEIPSVLEKPVKSLGRWYTRELTDVGQVEQLKESVVDGLQRIENSGLPGKLKLWCLQFGLFPRVMWPLTMYEVSVTKVEKLERLISSYIRKWLGVPRCLSNVALYGQGVLQLPLSSLTDEYKCAKVRLELQLSGSKDDVVRGLVPRIGTGRKWVARQVVKEAKTDLRQLELVGKVQQGREGLGYRIGDPMWSKAGPIERRRLVLGQVRRQEERNRCVRAVSQGKQGQWVNWDGVERRRLSWRELWKMDAYQIRLLLGAVYDVLPSPQNLKQWGGEDSACTLCSEVGTLKHILVGCKISLALGRFTWRHNQVLKCLAATIEDWRRQVCLEQEVEGTVVQFVREGGRSRYRGRKELGVVGGARDWEMQVDLGGRLVVPQEIVNTSLRPDMVLWSASQRVVYFIELTVPWEGSVDDAHERKKLRYSELAAEVGGRGWNAKVRPIEVGCRGFIARSTLDLLRELGIRGRKLQWAVKELSQAAEQGSLWIWNKRTSADGSGAAKR

SEQ ID NO: 18486 - protein, 1124 aa, Heterotis niloticus
MVKDPGMETTTSGAGAVRGVRGLQEDKKLQVCCCGWQRITTARGLRVHQGRKKCLREGAQGGRIDQYFLRSQANKSNEVQRPVENHSSQDINRTSGAEEEGAGMRDGGVDGVRRSKEKSCELKPRVRWPKAGEKVVWQTINADLVGVLEGMKGSAQVKLEKLGDVIYQYGMDRFGIEQIRREQCQQGGKSRRQKEIDKLVRERRQLKKQWKKATEEERQGIEVLQEEVKSRLVTLRRAEYLRRKRRKKERARAGFYRDPFKFVKGLFSQERKGKLEVSRQELERYLECTYSSAGEVGERGLPVDMPPLGNITAEVDVSPPKWSEVQEVVRRAKASSAPGLNGVPYRVYKSAPDVLRFLWRLFRIVWKKQVIPKAWRRAGGLFLPKEKVSREIGQFRPICLLNVEGKIFFSVVTQRLSDYLLKNKLIDTSIQKAGVPGFSGCLEHTSVIWHQIQEAKQERRNLHVVFLDLANAFGSVPHSLIWGAFDFFRVPSQITGLVKEYFRDIRMCFTTAGYTTAWQRLGMGIMAGCTISPLAFTMALELVIRASGWVVGGERRPDGLRLPPIRAYMDDMTLVTTTAACARRLLGKLDENLKWAGLRIKPAKSRSISLVKGKIEKVSFLVEGEEIPSVLEKPVKSLGRWYTRELTDVGQVEQLKESVADGLQRIENSGLPGKLKLWCLQFGLFPRVMWPLTMYEISVTKVEKLERLISSYIRKWLGVPRCLSNVALYGQGVLQLPLSSLTEEYKCAKVRLELQLSGSKDDVVRGLVPRIGTGRKWVARQAVKEAKADLRQLELVGKVQQGREGLGYRIGDPMWSKAGPIERRRLVIGQVRRQEERNRCVRAVSQGKQGQWVNWDGVERRRLSWRELWKMDAYQIRFLLGAVYDVLPSPQNLKQWGGEDSACTLCSEVGTLKHILVGCKISLALGRFTWWHNQVLKCLAATIEDWRRQVCLEQEVEGTVVQFVREGGRSRYRGRKELGVVGGARDWEMQVDLGGRLVVPQEIVNTSLRPDMVLWSASQRVVYFIELTVPWEGSVDDAHERKKLRYSELAAEVGGRGWNAKVRPIEVGCRGFIARSTLDLLRELGIQGRKLQRAVKELSQAAEQGSLWIWNKRTSADGSGAAKR

SEQ ID NO: 18487 - protein, 1124 aa, Heterotis niloticus
MVKDPGMETTTSGAGAVRGVRGLQEDKKLQVCCCGWQRITTAWGLRVHQGRKKCLREGAQGGRIDQYFLRSQANKSNEVQRPVENHSSQDINRTSGAEEEGAGMRDGGVDGVRRSKEKSCELKPRVRWPKAGEKVVWQTINADLVGVLEGMKGSAQVKLEKLGDVIYQYGMDRFGIEQIRREQCQQGGKSRRQKEIDKLVRERRQLKKQWKKATEEERQGIEVLQEEVKSRLVTLRRAEYLRRKRRKKERARAGFYRDPFKFVKGLFSQERKGKLEVSRQELERYLECTYSSAGEVGERGLPVDMPPLGNITAEVDVSPPKWSEVQEVVRRAKASSAPGLNGVPYRVYKSAPDVLRFLWRLFRIVWKKQVIPKAWRRAGGLFLPKEKVSREMGQFRPICLLNVEGKIFFSVVTQRLADYLLKNKLIDTSIQKAGVPGFSGCLEHTSVIWHQIQEAKQERRNLHVVFLDLANAFGSVPHSLIWGAFDFFRVPSQITGLVKEYFRDIRMCFTTAGYTTAWQRLGMGIMAGCTISPLAFTMALELVIRASSWVVGGERRPDGLRLPPIRAYMDDMTLVTTTAACARRLLGKLDENLKWAGLRIKPAKSRSISLVKGKIEKVSFLVEGEEIPSVLEKPVKSLGRWYTRELTDVGQVEQLKESVADGLQRIENSGLPGKLKLWCLQFGLFPRVMWPLTMYEISVTKVEKLERLISSYIRKWLGVPRCLSNVALYGQGVLQLPLSSLTEEYKCAKVRLELQLSGSKDDVVRGLVPRIGTGRKWVARQAVKEAKADLRQLELVGKVQQGREGLGYRIGDPMWSKAGPIERRRLVIGQVRRQEERNRCVRAVSQGKQGQWVNWDGVERRRLSWRELWKMDAYQIRFLLGAVYDVLPSPQNLKQLGGEDSACTLCSEVGTLKHILVGCKISLALGRFTWRHNQVLKCLAATIEDWRRQVCLEQEVEGTVVQFVREGGRSRYRGRKELGVVGGARDWEMQVDLGGRLVVPQEIVNTSLRPDMVLWSASQRVVYFIELTVPWEGSVDDAHERKKLRYSELAAEVGGRGWNAKVRPIEVGCRGFIARSTLDLLRELGIRGRKLQRAVKELSQAAEQGSLWIWNKRTSADGSGAAKR

SEQ ID NO: 18488 - protein, 1021 aa, Heterotis niloticus
MRDGGVDGVRRSKEKSCELKPRVRWPKAGEKVVWQTVNADLVGVLEGMKGSAQVKLEKLGDVIYQYGMDRFGIEQIRREQCQQGGKSRRQKEIDKLVRERRQLKKQWKKAMEEERQGIEVLQEEVKSRLVTLRRAEYLRRKRRKKERARAGFYRDPFKFVKGLFSQERKGKLEVSRQELERYLECTYSSAGEVGERGLPVDMPPLGNITAEVDVSPPKWSEVQEVVRRAKASSSPGLNGVPYRVYKSAPDVLRFLWRLFRIVWKKQVIPKAWRRAGGVFLPKEKVSREIGQFRPICLLNVEGKIFFSVVTQRLSDYLLKNKLIDTSIQKAGVPGFLGCLEHTSVIWHQIQEAKQERRNLHVVFLDLANAFGSVPHSLIWGAFDFFRVPSQITGLVKEYFRDIRMCFTTAGYTTAWQRLGMGIMAGCTISPLAFTMALELLIRASGWVVGGERRPDGLRLPPIRAYMDDMTLVTTTAACARRLLGKLDENLKWAGLRIKPAKSRSISLVKGKIEKVSFLVEGEEIPSVLEKPVKSLGRWYTRELTDVGQVEQLKESVADGLQRIENSGLPGKLKLWCLQFGLFPRVMWPLTMYEISVTKVEKLERLISSYIRKWLGVPRRLSNVALYGQGVLQLPLSSLTEEYKCAKVRLELQLSGSKDDVVRGLVPRIGTGRKWVARQAVKEAKADLRQLELVGKVQQGREGLGYRIGDPMWSKAGPIERRRLVIGQVRRQEERNRCVRAVSQGKQGQWVNWDGVERRRLSWRELWKMDAYQIRFLLGAVYDVLPSPQNLKQWGGEDSACTLCSEVGTLKHILVGCKISLALGRFTWRHNQVLKCLAATIEDWRRQVCLEQEVEGTVVQFVREGGRSRYRGRKELGVVGVARDWEMQVDLGGRLVVPQEIVNTSLRPDMVLWSASQRVVYFIELTVPWEGSVDDAYERKKLRYSELAAEVGGRGWNAKVRPIEVGCRGFIARSTLDLLRELGIRGRKLQRAVKELSQAAEQGSLWIWNKRTSADGSGAAKR

SEQ ID NO: 18489 - protein, 1124 aa, Heterotis niloticus
MVKDPGMETTTSGAGAVRGVRGLQEDKKLQVCCCGWQRITTARGLRVHQGRKKCLREGAQGGRIDQYFLRSQANKSNEVQRPVENHSSQDINRTSGAEEEGAGMRDGGVDGVRRSKEKSCELKPRVRWPKAGEKVVWQTINADLVGVLEGMKGSAQVKLEKLGDVIYQYGMDRFGIEQIRREQCQQGGKSRRQKEIDKLVRERRQLKKQWKKATEEERQGIEVLQEEVKSRLVTLRRAEYLRRKRRKKERARAGFYRDPFKFVKGLFSQERKGKLEVSRQELERYLECTYSSAGEVGERGLPVDMPPLGNITAEVDVSPPKWSEVQEVVRRAKASSAPGLNGVPYRVYKSAPDVLRFLWRLFRIVWKKQVIPKAWRRAGGLFLPKEKVSREIGQFRPICLLNVEGKIFFSVVTQRLSDYLLKNKLIDTSIQKAGVPGFSGCLEHTSVIWHQIQEAKQERRNLHVVFLDLANAFGSVPHSLIWGAFDFFRVPSQITGLVKEYFRDIRMCFTTAGYTTAWQRLGMGIMAGCTISPLAFTMALELVIRASGWVVGGERRPDGLRLPPIRAYMDDMTLVTTTAACARRLLGKLDENLKWAGLRIKPAKSRSISLVKGKIEKVSFLVEGEEIPSVLEKPVKSLGRWYTRELTDVGQVEQLKESVVDGLQRIENSGLPGKLKLWCLQFGLFPRVMWPLTMYEISVTKVEKLERLISSYIRKWLGVPRCLSNVALYGQGVLQLPLSSLTEEYKCAKVRLELQLSGSKDDVVRGLVPRIGTGRKWVARQAVKEAKADLRQLELVGKVQQGREGLGYRIGDPMWSKAGPIERRRLVLGQVRRQEERNRCVRAVSQGKQGQWVNWDGVERRRLSWRELWKMDAYQIRFLLGAVYDVLPSPQNLKQWGGEDSACTLCSEVGTLKHILVGCKISLALGRFTWRHNQVLKCLAATIEDWRRQVCLEQEVEGTVVQFVREGGRSRYRGRKELGVVGGARDWEMQVDLGGRLVVPQEIVNTSLRPDMVLWSASQRVVYFIELTVPWEGSVDDAHERKKLRYSELAAEVGGRGWNAKVRPIEVGCRGFIARSTLDLLRELGIRGRKLQRAVKELSQAAEQGSLWIWNKRTSADGSGAAKR

SEQ ID NO: 18490 - protein, 974 aa, Heterotis niloticus
MKGSAQAKLEKLGDVIYQYGMDRFGIEQIRREQCQQGGKSRRQKEIDKLVRERRQLKKQWKKATEEERQGIEVLQEEVKSRLVTLRRAEYLRRKRRKKERARAGFYRDPFKFVKGLFSQERKGKLEVSRQELERYLECTYSSAGEVGERGLPVDMPPLGNITAEVDVSPPKWSEVQEVVRRAKASSAPGLNGVPYRVYKSAPDVLRFLWRLFRIVWKKQVIPKAWRRAGGLFLPKEKVSREIGQFRPICLLNVEGKIFFSVVTQRLSDYLLKNKLIDTSIQKAGVPGFSGCLEHTSVIWHQIQEAKQERRNLHVVFLDLANAFGSVPHSLIWGAFDFFRVPSQITGLVKEYFRDIRMCFTTAGYTTAWQRLGMGIMAGCTISPLAFTMALELVIRASGWVVGGERRPDGLRLPPIRAYMDDMTLVTTTAACARRLLGKLDENLKWAGLRIKPAKSRSISLVKGKIEKVSFLVEGEEIPSVLEKPVKSLGRWYTRELTDVGQVEQLKESVADGLQRIENSGLPGKLKLWCLQFGLFPRVMWPLTMYEISVTKVEKLERLISSYIRKWLGVPRCLSNVALYGQGVLQLPLSSLTEEYKCAKVRLELQLSGSKDDVVRGLVPRIGTGRKWVARQAVKEAKADLRQLELVGKVQQGREGLGYRIGDPMWSKAGPIERRRLVIGQVRRQEERNRCVRAVSQGKQGQWVNWDGVERRRLSWRELWKMDAYQIRFLLGAVYDVLPSPQNLKQWGGEDSACTLCSEVGTLKHILVGCKISLALGRFTWRHNQVLQCLAATIEDWRRQVCLEQEVEGTGIQFVREGGRSRYRGRKELGVVWGARDWEMQVDLGGRLVVPQEIVNTSLRPDMVLWSASQRVVYFIELTVPWEGSVDDAHERKKLRYSELAAEVGGRGWNAKVRPIEVGCRGFIARSTLDLLRELGIRGRKLQRAVKELSQAAEQGSLWIWNKRTSADGSGAAKR

SEQ ID NO: 18491 - protein, 1127 aa, Penaeus indicus
MIITILITKITITMIVIIMLIIIIIIVIIMMMIIIIIILIMIIIMIIIIMMIIIIMIIVIIKLIVITIRRVIMISTIIMTMMMMMMMIIIIIIIIIIIIIIIIIIIIIRKDCGMLRSENVEETPEVLDNGNENTEEVDRPQPAETTDQNSNEIDQSNTVNDEDEFNEENQRMLMNIIEKLKTETINPPMNLRNLDRNKVRCKAKEINKVLQHIPSANITETNRLLLAAANEVAEALGVHPKAHPKAKEPWWKRRIEDQIQQLRKDISHLEDLSKEKVRRKKESISERLERKYHVKNKGTKVVIEELKQRVQAKAAKVKRYENRINQYRQNRMFQSNRKRLFEELEGNISNETVVPDAEESRTFWNNIWGKSTKHNTEAEWLQDLKDEYTNKPKQADIVINKKMLDNQMRKMPNWKAPGPDGLQGFWLKNFTSLRERICQQLNECLGEREVPKWMTKGRTVLIMKDKEKGRDVKNFRPITCLPLMWKLLTGVLSEEMYKHLEENELLPDEQKGCRKRSRGTKDQLLIDKMIIRNCKRRGTGLGMAWIDYKKAFDMVPHSWLVECMELFGVASNMKHLISRSMKEWKTELTSASETLGEVNIRRGIFQGDSLSPLLFVLALIPLTLLLNKMKEGYELGKNDIKINHLLFMDDLKLYGKNEKQLDSLVQTVNEFSDDIKMEFGISKCAVLIMKKGKITQSEGVRLPNQEEIKSLDDGDSYKYLGVLESDDIMSEEMKKNIKNEYLRRIKKILKSKLNGGNIITAINSRAVAVVRYSAGIVKWTKEEMRKMDRKTRKLLTINRCLHPQADVDRLYIKRSKGGRGLIGVEDCIAIEVQSLSKYLEKSTETMLIAVVKEQVLKEQRPNADNIMKEKYERYKAKELHGKFIRDTEDGRHRLTWDWLKKGIIKKETEGLIMAAQDQALRTNAIKKYIDKADISPKCRLCGDRDETISHIITECSALAQKQYKYWRHDKVAQIIHWVFCGRVGVKRADKWYDHEPEGVIETERYKILWDFKVQTDHQLEHNRPDLVFYDKQQQSCQIIDVACPFDTRVENKMKEKVDRYQDLKREIKRIWKCKQVDIIPVVVGALGTIHRDMPEWMKKLEMYELIGKFQQACILGTARILRKVLDT

SEQ ID NO: 18492 - protein, 1058 aa, Penaeus indicus
MWKIWNENGGDPIGEQRLADQVRQIQKKSWLSDAEIEEIRKDCGMLRSENVEETPEVLDNGNENTEEVDRPQPAETTDQNSNEIDQSNTVNDEDEFNEENQRMLMNIIEKLKTETINPPMNLRNLDRNKVRCKAKEINKVLQHIPSANITETNRLLLAAANEVAEALGVHPKAHPKAKEPWWKRRIEDQIQQLRKDISHLEDLSKEKVRRKKESISERLERKYHVKNKGTKVVIEELRQRVQAKAAKVKRYENRINQYRQNRMFQSNRKRLFEELEGNISNETVVPDAEESRTFWNNIWGKSTKHNTEAEWLQDLKDEYTNKPKQADIVINKKMLDNQMRKMPNWKAPGPDGLQGFWLKNFTSLRERICQQLNECLGEREVPKWMTKGRTVLIMKDKEKGRDVKNFRPITCLPLMWKLLTGVLSEEMYKHLEENELLPDEQKGCRKRSRGTKDQLLIDKMIIRNCKRRGTGLGMAWIDYKKAFDMVPHSWLVECMELFGVASNMKHLISRSMKEWKTELTSASETLGEVNIRRGIFQGDSLSPLLFVLALIPLTLLLNKMKEGYELGKNDIKINHLLFMDDLKLYGKNEKQLDSLVQTVNEFSDDIKMEFGISKCAVLIMKKGKITQSEGVRLPNQEEIKSLDDGDSYKYLGVLESDDIMSEEMKKNIKNEYLRRIKKILKSKLNGGNIITAINSRAVAVVRYSAGIVKWTKEEMRKMDRKTRKLLTINRCLHPQADVDRLYVKRSKGGRGLIGVEDCIAIEVQSLSKYLEKSTETMLIAVVKEQVLKEQRPNADNIMKEKYERYKAKELHGKFIRDTEDGRHRLTWDWLKKGIMKKETEGLIMAAQDQALRTNAIKKYIDKADISPKCRLCGDRDETISHIITECSALAQKQYKYWRHDKVAQIIHWAFCGRVGVKRADKWYDHEPEGVIETERYKILWDFKVQTDHQLEHNRPDLVFYDKQQQSCQIIDVACPFDTRVENKMKEKVDRYQDLKREIKRIWKCKQVDIIPVVIGALGTIHRDMPEWMKKLEMYELIGKFQQACILGTARILRKVLDT

SEQ ID NO: 18493 - protein, 951 aa, Trichogramma evanescens
MARREAEMTVGNVRYINKALAEEFTSRSLEAIKGQRKVAGYKAEVARFVALIKAPALAPPTTTPTPASTPTPSVVEPGGFTGRLVEYLTSLPPLPASAGFQGERLSGLLHRAATAPKEEIFQDLSLYLKAVLPAKQFHQRVRRDFNIQASAGRISNKKKRRRDYAITQRHWKSSRTRCARAILDDTCDAIQQPLRQRMEEYWSTVFTQPPVNTSPSVLHFQAPLLDLWAPITPNEIRAARPSLSVSPGPDGLTSRQLRAIPLVIMVRILHLILLCERLPRDFTLARTIFIPKKTGAQDPGEFRPITVTSSLTRLFHRILAIRADSLLNFDDSQRAFRSGIDGCRDNTMLLDAILRSRYERFKSASIATLDLAKAFDSVEHSAIMKCGAAAGLPPPMIRYLQRFYEDGTTTLTGDQWTSLPIRPTRGVKQGDPLSPVLFNIVIYHLLRSLPTECGIPFCGRTIRAMAFADDLILLAQTPAGLQKLLDHTASFLAECGLRVNSSKCHSLTIRGLGQAKKTVVSAQQHYCVNGQQIRALTSEDTWTYLGIVFSAQGRRKFDSASKISLLLERLAKAPLKPQQRLYALKCYALPRTYHAMSLGNTTISDLNRVDIMTRTFVRQWLALPNDTPTAYFHAPVAEGGLGIPSTRWMAPSLRLSRLRGWLSQPESGTANDITSGTSVDFSSVFVRREIAICEKRLTDGRTILQNTDIIGRRWARLLHSSIEGRALKDSCYTIGQHSWVSDGTALLSSKDYIACHRVRIGALPTRSRLTRGRHGDRQCRAGCRAQETNNHVLQICPRAHAARIKRHDAVANFISRSLTRQGFEVRSKPRISTSIGVRKPDLVATMGDLAVVLDVQIAGDQVDLDYVRHEKIRKYSTLPEVSRYITQETGATNIRHLPVIHSWRGVWGRRSSLDLLALGTVNRRDLTIISTRTLIGGSIAHRDFANATSVT

SEQ ID NO: 18494 - protein, 754 aa, Trichogramma brassicae
MEEYWSTVFTQPPVNTSPSVLHFQAPLLDLWAPITPNEIRAARPSLSVSPGPDGLTSRQLRAIPLVIMVRILHLILLCERLPRDFTLARTIFIPKKTGAQDPGEFRPITVTSSLTRLFHRILAIRADSLLNFDDSQRAFRSGIDGCRDNTMLLDAILRSRYERFKSASIATLDLAKAFDSVEHSAIMKCGAAAGLPPPMIRYLQRFYEDGTTTLTGDQWTSLPIRPTRGVKQGDPLSPVLFNIVIYHLLRSLPTECGIPFCGRTIRAMAFADDLILLAQTPAGLQKLLDHTASFLAECGLRVNSSKCHSLTIRGLGQAKKTVVSAQQHYCVNGQQIRALTSEDTWTYLGIVFSAQGRRKFDSASKISLLLERLAKAPLKPQQRLYALKCYALPRTYHAMSLGNTTISDLNRVDIMTRAFVRQWLALPIDTPTAYFHAPVAEGGLGIPSTRWMAPSLRLSRLRGWLSQPESGTANDITSGTSVDFSSVFVKREIAICEKRLTDGRTILQNTDIIGKRWARLLHSSIEGRALKDSCYTIGQHSWVSDGTALLSSKDYIACHRVRIGALPTRSRLTRGRHGDRQCRAGCRAQETNNHVLQICPRAHAARIKRHDAVANFISRSLTRQGFEVRSKPRISTSIGVRKPDLVATMGDLAVVLDVQIAGDQVDLDYVRHEKIRKYSTLPEVSRYITQETGATNIRHLPVIHSWRGVWGRRSSLDLLALGTVNRRDLTIISTRTLIGGSIAHRDFANATSVT

SEQ ID NO: 18495 - protein, 1007 aa, Clytia hemisphaerica
MILEEYARTIITPLEERKNIQKPSKKKGKSLEKSIGKVNEALEGIPLLTDVADVTNLDHLVYASAVVAIERAQLQKECLPKKRIKTNKKTDWTFKMQKRIDDIRADISRVSQMVDPNPSPKMKKNSNSMKNKYNIQNDEQRITTLEKLKQRLLALNNRLSRYQKRQKQFQQNRDFTEKPSKLYDQLRGNRITISDPPEKEAIKEFWKPLYGNRKEYNKNALWLDEYKGSTNHIIQAEYTDIEPKEIAESSSKFANWKSPGIDNIQNYWWNKLKVFHNKTAQIMNSIVKNPETCPQWLTTGRTTLVPKKVETRNPSNYRPITCLPIVYKILTSIITSRMLHHIQANSIIPVEQKGNASNTYGTIDQLMINKLIMVNAKNKLKNISTAWIDYKKAYDSVPHDWIIDTLKIHKFDKTITSFFESTMTNWQTSLTLNHDTGLISTNKFSINTGIYQGDCPSGTLFILSLLPLSWLLKESKLGYRFNKETTISHLLFMDDLKLYAANDQQLNNQIKLVKTFSDDIQMNFGIEKCNKVTIKRGKITKSDNIVLDNGEILKTLDQNKQYKYLGFNEHQLTDKYTKSALKNEYFKRLKMLLKSELNSLNTISAINSYAVPALSYGFPVLDWTITELENIDRETRKVLQSFHVMHNQSDVTRLYLPRKEGGRGLINIVDHFKNCIINFSSYLLTSNEPYLTLLSNWQLTRGAKSIHAMAQSYSQEISLEIQQLSILSKSQRKSKIKIKRIETRTEILKAKNLHGQYFQLLDEPHVDKTLTTDWIRSSTLKRATEATICAIQEQAVTTRYIQRRIFHQQVEETCRICNREKETIHHIISGCTVLAPTKYLQRHNNLCKYIHELLMRENDLKQERTPWYEHQPHPVEENESTKILWDFSIQTDHQIDHNKPDIVVLNKQTKEALIIDIAIPSDYNIPRKRIEKIRNYTDLAVELKTLWNLNKVKIVPIIIGATGVIHKGLSDDVGNLGLTQNKFNISEAQKITLLGTAHVVRSFFTLA

SEQ ID NO: 18496 - protein, 1123 aa, Clytia hemisphaerica
MRIHRRWEELYPNLRITEQRICDQQRQIVKKSESNENLRGNWLTQLEINQIRLEIQQLVTNENLNQDEAPNNEAEEENNPQLPNNVPEERADQPRNEPEILNDNENHEHEQEEIRRMILEEYARTIITPLEERKNIQKPSKKKGKSLEKSIGKVNEALEGIPLLTDVADVTNLDHLVYASAVVAIERAQLQKECLPKKRIKTNKKTDWTFKMQKRIDDIRADISRVSQMVDPNPSPKMKKNSNSMKNKYNIQNDEQRITTLEKLKQRLLALNNRLSRYQKRQKQFQQNRDFTEKPSKLYDQLRGNRITISDPPEKEAIKEFWKPLYGNRKEYNKNALWLDEYKGSTNHIIQAEYTDIEPKEIAESSSKFANWKSPGIDNIQNYWWNKLKVFHNKTAQIMNSIVKNPETCPQWLTTGRTTLVPKKVETRNPSNYRPITCLPIVYKILTSIITSRMLHHIQANSIIPVEQKGNASNTYGTIDQLMINKLIMVNAKNKLKNISTAWIDYKKAYDSVPHDWIIDTLKIHKFDKTITSFFESTMTNWQTSLTLNHDTGLISTNKFSINTGIYQGDCPSGTLFILSLLPLSWLLKESKLGYRFNKETTISHLLFMDDLKLYAANDQQLNNQIKLVKTFSDDIQMNFGIEKCNKVTIKRGKITKSDNIVLDNGEILKTLDQNKQYKYLGFNEHQLTDKYTKSALKNEYFKRLKMLLKSELNSLNTISAINSYAVPALSYGFPVLDWTITKLENIDRETRKVLQSFHVMHNQSDVTRLYLPRKEGGRGLINIVDHFKNCIINFSSYLLTSNEPYLTLLSNWQLTRGAKSIHAMAQSYSQEISLEIQQLSILSKSQRKSKIKIKRIETRTEILKAKNLHGQYFQLLDEPHVDKTLTTDWIRSSTLKRATEATVCAIQEQAVTTRYIQRRIFHQQVEETCRICNREKETIHYIISGCTVLAPTKYLQRHNNLCKYIHELLMRENDLKQERTPWYEHQPHPVEENESTKILWDFSIQTDHQIDHNKPDIVVLNKQTKEALIIDIAIPSDYNIPRKRIEKIRNYTDLAVELKTLWNLNKVKIVPIIIGATGVIHKGLSDDVGNLGLTENKFNISEAQKITLLGTAHVVRSFFTLA

SEQ ID NO: 18497 - protein, 1012 aa, Trichogramma brassicae
MFACRFPGCGLPWETTRGRGVHERAAHPDWTDRENLRAKRRVGPGQWQDDERRLLARREAELLHEAELNDNITSVKRNINVLLKPYTDRTLEALKSQRKRDEHKQLVMQMLQQLNLARLEPDVGEEDGNTSQLVLDAPILNSDLLSQEHLEYFSSLEPVGSNTYDLSRLNSITLKIKREQQALNRVELMDSLTLFLNDILPPKSKRNPEKQQATKNFISNKQRRRAEYARVQGLWKKDPSACVDRILTDQLGQDVPVPKEVMEPYWRAIMTQQVNSSLVLGANVDTQPVDVWKPITTSEIKIALPPARSAPGPDGLLVCQLKEIPLEVIARVLNVFMLLEDTPSHLKRSRTVLIPKEKGTNNPSKYRPITVSSVLLRTFHKILANRLKEVPLDPRQRAFTDTDGTTDNICLLDTALKYHHSRFKSLYLAMLDMQKAFDSVAQEALFKILTAKNISPRFITYYRQACQGSATRIQHGDWESEDIYPTCGVKQGDPLSPFVFNCVIDEMLKRSPTDIGVNLGGLRVDVMAFADDLNLLASTKSGLQQLIDYVVGFLGQCGLTPNTGKCSSLAIRGLSKEKKTAVDTSCRFKVGARTIASLKRTDTWRYLGVSFNGNGRVKLQSKESLTSLLGKITKAPLKPQQRLWALKVKITPKIMFPLVLGDARIGYLRSLDRVVRHAVRGWLHLPHDCPVAYFHAAVMDGGLGIPSFRWSAMLNRRGRLEHLRTSEYLTGDTVKQHLDRAISKTENFLKDDNNNTIMTRAMLCKYWAQQLYARFDGVGLRESGKVRGQHNWLSDGTRFLSGHDFIQSVRARINALPTKSRTTRGRAQERACRAGCGKVETLNHVVQQCFRSHNARISRHNALSKYVAKNLRKQGYLVEEEPRFQTTEGLRKPDICATKDETTLVLDMQVRGDTTDLDRANREKCQYYENNEDLKREIKKKYGSTATRTLAITLNWRGVWSKKSAEAALEDQVIRRSDLKILSSRTVIGTLYAWNVFNERTDRRTQDRVGVG

SEQ ID NO: 18498 - protein, 996 aa, Listronotus oregonensis
MFQEIHQKYNGVAMDARPAIPRCKLNRESKATVTTTNNALIEIFEQSEGLEDLCHKVYCAAVVVSNIQCSPQRATNSRKPLNQPPWEKKLKTKITCFRKEIGVLESYLNPQELSKKVEQKAKTYAKKAKIKLTEPQHGQVLRKHIEYLKQKIAVLGSRLRRYHKRTLRLKQNRLFSNNQRLFYRSLEVGNEQNEELPTEAQMTEFWSSIWSQEAQHNNQAPWISREQENARNKTQMPRVTVTKKDIIETVKRLKNWTAPGIDGIHNYWWKAFTATHEPLAQHIQEAIRNPEKVPLYFTLGITHMLPKKGNLSQPKNYRPITCLPSAYKILTSIIKFKINAHIHHNGILAWEQNGCKKKARGCRELLIIDNVITKQARRRLKNLSMAWIDYQKAFDSVPHSWLLEILRIYKIDDGVIGLLQHLMTTWRTALSIKAATKSYKTKEISIKIGIFQGDSLSPAWFCLALNPLSSLLNRSKYGYALDDQTKLTHLFYMDDLKLYARGPSQLEGELELVRSFSADIKMKFGLEKCSIVHVKRGKMVEEGNVALADGRDIQSLGPEETYRYLGIQQSFEIRQKHNKEAAEREFMRRVNKVLRTELNAKNKITAINAWAIPSLTYTSGILTWSSTDLQRLDRGVRTSFTKRGMLHPNSAVERLYLPRKEGGRGLTNLEAANQKVIKELRKYFHSSNLPFHQRIVVLDKEYTAINLANLEEPEIGATQLEIMRTRWRGKALHGRFHNSMHQPEVEKTISNTYLTAGYLFPETEGALFAIQDQVIPTRNYTKFIMKKQIETTKCRVCGQAEETVQHLSGGCSPMAPTRYLGKHNNMGKVVHQQIGLKWGIIQNFTSYYKYSPQAVIENDRAKVYWDMPIMTDRPVEHNRPDVIVWDKQERTATILDFAVPLDHNMVQTYQAKINNYRDLATEIKRIWDLREEMRILPLIISTNGLVLNSTWLNSIYIYIYIYIYIYIYIYIYIYIYIYIYIYIYIYIYIYIYIYYI

SEQ ID NO: 18499 - protein, 784 aa, Coccinella septempunctata
MTEFWSNIWSQEVQHNSQAYWINTEKESFENRTQMPDVSITRGDIDETVKRLRNWTAPGVDGICNYWWKAMSTAHNQLALHIQEIIQNPEKAPKYFTMGITYMLPKKGDLTQPQNYRPITCLPSVYKILTSVIGFKISTHIRNNRILAWEQNGCKKKARGCKELLVIDNVVTKQARRRLKNISMCWIDYQKAYDSVPHSWLVEILRIYKISPDIIHLWEHLMGTWRTTLSVKGTKSYRTKEISIKRGIFQGDNWSTEWFCLALNPLSNILNRSNYGYRIDDYAKLTHLFYVDDLKLYARGTAQLQGELELVRNFSADIKMKFGLEKCSVVHVKRGKMAEEGDMELINGTSIRSLGLENTYKYLGIQQSFEIRQKRSMEVAEEEFKKRINKVLKTELNAKNKITAINMWAIPVLTYTSGILTWSATELRRLDQWVRVSFTRHGILHPNSAIERLYLPRSEGGRGLSSLEAATEKEIKSLRNYFLSSNLPVHKRVVLWDKKYTALNLASPAEPETDVDPLGNMRERWRSKVLHGRFHASINQPEVDKTRSHTYLVAGYLYASTEAALHAIQDKVVTTRNYSKYIMKQQVENTKCRICNQVEETVQHLSGGCTPLASTKYLGRHNNMGKVVHQLLGLRWGLIGNFTPQYKYTPVAVAENEQAKIFWDFPFVTDRPLKHNRPDLVLWMKREGMAVIVDFSVPLDHNIAQAYDSKIVKYTELARELKTLWKLERQVRILPLVISGNGLVHVNTTKHLAELQLPDNTLQWMQKAVVLGTVAIIRQIVFPQ

SEQ ID NO: 18500 - protein, 1095 aa, Coccinella septempunctata
MNIFLMNAYFRVTEGETKKTRYRDRLEQQWKEKYPTLKFTTQHLAAQINNIKQRKLISPDELEIMKSNFSPNSFSRRSTAIRRSLGVRNNSPQQRMAQVEADSPEMIEIRAMFQELDFKYRGTSMDARPGIPRLKLCKETKNIVAATNTALTREFEQTESLEDLCHKVYCAAYMICIIHSKGQPLTPHMNTSKPPWEKRIEHKITALRKEIGVLENYLTDNSPSKKTQRKAKAYARKAKIKAVDVMGKQALTKHVEVLKQKIAALGSRLRRYHKRTLRHRQNHLFCSNQKLFYRHLENNDRKIKQPPTEDQMTDFWSNMWSQEVQHNPQAGWINEEKMNNQNKRQMHRITITRADITETVKRLKNWTAPGIDGIHNYWWKAFTTAHNRLAYHMQEAVSSPEKIPSYFTMGITHMLHKKGDETKPENYRPITCLPSVYKILTSVIGFKISSHIRSNEILAWEQGGCKRKARGSKELLVIDNVVTKQARKKLKNISMGWIDYQKAFDSVPHSWLLEILCIYKVDSQIIHLFQYLMNTWRTTLSVKGTTNSYQTKEICIRRGIFQGDGWSPEWFCLALNPLSNILNRSNYGYKLDDQAKLTHLFYIDDLKLFAGGAAQLEGEFELVRSFSADIKMKFGLDKCSVVHVRRGKMSEEGNLTLQDDAEIRALGLEETYKYLGVQQSYEIRQQQSKEVSEKEFTRRISKILRTQLNAKNKITAINAWAVPVFAYTSGILNWSATDIRRLDRWVRASFTRHGMLHPNSAVERLYLPRAEGGRGLTSLEAANEKEVRSLKHYFLSSNLPLHRRMMVWDRNYTALNLSGPEEPLPDSCNLESLRTKWRGKELHGRFHASMHQPEVDKIKSNAYLTAGYLFPETEGALFAVQDQVIPTRNYAKFIMKQQVDNTKCRVCNEAEETVQHLSGGCSVLAPTRYLGRHNNMGRVVHQMLALKWEISENFVPHHIYTPQAVVENSRAKLYWDFPFTTDRPVEHNRPDMVLWSKQEQLAIIIDFAVPLDHNMAQTYETKIKNYADLSRELKIQWQLKKTEILPLIVSSNGLVHVNTAKHLAELQLPDDTITWMQKAVVLGTVAIIRQVVFPQ

SEQ ID NO: 18501 - protein, 889 aa, Coccinella septempunctata
MRKEIGVLQNYLTYSMPTKKTQRKVKSYARKAKISMADPQHRQALLEHSESLKQKIASLGGRLRRYHQRTLRYRQNRLFAANQKLFYRSLDGSDGKINQPPTEDQMTQFWSNIWSQEVQHNTEARWIREEKANHQDKTQMRRVTITKTDITNTVKRLKNWTSPGIDGIHNYWWKALTNAHKKLAQYIQEVITNPEKIPEYFTKGITHMLYKKGDETQPGNYRPITCLPSAYKILTSIIGYKISSHIRSNKILAWEQGGCKRKARGCKELLVIDNVVTRQARKKLKNISMGWIDYQKAFDSVPHSWLLEILLLYKVDDHVIQLFRHLMSTWRTTLSVRGAANCYRTEEIRIRRGIFQGDGWSPEWFCLALNPLSNILNRSNYGYKVNEQTTLTHLFYIDDLKLFARGTAQLQGELELVKSFSGDIEMTFGLDKCSIVHVKRGKITDEGNLALQDNTEIRTLGVENTYKYLGVQQSYEIRQKESKEISKNEFTRRVNKILRTQLNAKNKITAINAWAVPVFTYTSGILSWSATDVKGLDRWVRTSFTRHGMLHPNSAIERLHLPRAEGGRGLTNLEAANRNEIRTLKQYFLASNLPVHQCLRACDKNYTALNLSEPLEPEEESAQLDTLRAKWRSKELHGRFHASMNHPEVDKTKSNIYLTAGYLFPETEGAMLAIQDQVIPTRNYSKFIMKQQVENTKCRICNVCEETVQHLSSGCSLLAPTRYLGRHNNMGKVAHQMLTLKWGISDKFVPHHKYTPVGLAENNLAKIYWDFPFLADRPLEHNRPDMVLWCKQERRAVIIDFAVPLDYNMAQTYTTKINNYIELSRELKILWGLKKIEIYPLIISSNGLVHVNTVKHLAELQLPNDTLTWMQKAVVLGTVAIIRQVVFPR

SEQ ID NO: 18502 - protein, 950 aa, Paramacrobiotus metropolitanus
MVKDQLCQFCGQLFTKGGGFANHVKACSKKVPDRQAPAAASSDPSQHPLQLFLSGTHYSLPKRVPKTVRHTCAQRLAELLRKCVRDNSSAAWIDLLLFGSRALSLPAAKSLRKESLSTVIRKNLADLSCHHHPPRQRSSRVATHKGELNEERLTALATSLLQDNNVRRAVGVVMGEDALAPLNTDTLEALRGKHPPEPEDSDYPPPPEHSLKPPLVTPAEVFKAVFSFPSGSAGGCSDLRPQHLKDMMCGPGGEESELCSALTDFVNHVLQNDVPEDIRPFFFGANLIPLAKKDGGIRPIAVGETFRRLVSKVVSHSCTERMKELCKNVQFGFGTKGGAEAIMHGVRAYIETPHPGPRVIVKLDFKNAFNLLRRDTLLQAVRQHFPAYYDYFWQSYRYSSHLVCGEETLTSARGVQQGDPSGPFGYSLATLPLFDDLDCELLLAFLDDVTMADTVEKVMAAIKQIEERAAKMGLELNFSKCEFFPIVTCDADESVIRATLLSTWPDMIQLSPENFTLLGAPMTFPACARFLNGKTAELKNFVQRLKKLPAHYSLFLLKNCLSVPKVLYGLRSSRGFEHPDLLKEYDSCLRVGVEQLVNVKISEAQWTQISLPVRRGGLGTRRIETLAVCAYLASVYSVLPMVSKFYQPSEECLTKTAVESWIQQTHCEIPPECVRKFQYAWDTPVIERDISTLMSSTEGNERARAVLLSALNRDSGAWLNALPAPCLGTFLKDEDVRIGVGLRFGLPVVVAHNCNACGKQVESNGHHGLSCNKTTKGRWARHKEMNSIAKNCCESAGFPCEMEPNGLSSTTAQRPDGMTLIPVRQGKPIVWDVTSWCTVADSHATGSSKKCGSVAQLAENAKRGKYSFLEYGYLFYPLVMETLGVFGPALSEFLHFMGRKIRDLTGEARSTAFLKQRFSLAVVKGNATAVLSTLPFNPREDREFGCFFNV

SEQ ID NO: 18503 - protein, 777 aa, Paramacrobiotus metropolitanus
MGEDALAPMNADTLESLRSKHPPEPQDSDYPPPPEQSHKPSLATPAEVLKAVLSFPSGSAGGCSDLRPQHLKDLLCGPGAEEGELCSALTDFVNHVLHNEVPEDIRPFFFGANLIPLAKKDGGIRPIAVGETLRRLVSKVVSQRCSDKMKELCNKVQFGFGIKGGAEAIIHGVRAYLETPHSGARVIVKLDFKNAFNLLRRDELLRAVREHFPAYYGYFWQSYRFSSHLVCGEELLSSARGVQQGDPSGPFGYSLATLPLFTDLDCELFLAFLDDVTLAGTVEKVMAAIKRIEERAAKLGLELNFSKCEFFPVVTSDEDESLIRTSLLSSWPDMIQLNADNFTLLGAPMTSSACAGFLASRTELLKKFVHRLEKLPAHYSLFLLKNCLSIPKVLYGLRTSRCYEHPQFLKEYDDTLRLGVERLVNVKISELQWTQMSLPVRRGGLGTRRTETLAVCAYLASVYSVQPIVSEFYQSTEECLTRAAMESWLQHTQCEIPADFIRKFQYAWDAPMIERDIAMLMLCTEGKERDRAVLLSALDRDSGVWLNALPAPCLGTFLRDDEVRIGVALRFGLPVVVAHNCIACGAQVETNGHHGLSCNKSTKGRWARHKEMNSIAKNCCESAGFPCQLEPTGLSSKDGKRPDGMTLIPIRQGKPLVWDVTSWCTVADSHVTGSSKKSGHVAQLAENSKRRTYSFLGSGYFFYPLAIETLGVFSPALSELLHFMGCKIRDLTGEARSTAFLKQRFSLAVVKGNATAVLSTLPFNPREDRDFGCFFNV

SEQ ID NO: 18504 - protein, 950 aa, Paramacrobiotus metropolitanus
MPGDQPKEPCHICGKPFTKGAGLSNHVKACAKKAPTSSWFHVLSTRPTTASILFGREACRPKRVPKSVPRLCAQSLTEVLRTCIRENTSASWADLLLFGSRALCLPATKTLRKESLSSIIRKNLSDLSRHQHPPRQHAPPRTQQGELSSERMSALATSMLQDNNIRRAIGLVMGDDSVAPVNAETLKELRNKHPCEPADSLYPPPPDQSNVPPSVAPAEVLQAVMSFPSGSTGGFSDLRPQHLKDLLGGPQAEESELCCALADFVNHVLQRGVPEDIRPFFFGARLISLAKKDGGIRPIAVGETFRRLVSKIVTQRCSDKMKELCGTVQYGCGTKGGAEAIIHGVRSYLEATHDGEGVLVKLDFKNAFNLLRRDALLEAVRQHFPNYYGYFWQSYRYASHLVCGEEVLSSARGVQQGDPSGPFGYSLTSLPLFDGLDCDLFLGFLDDVTLAGTMEKVIAAIKHIEEKGKKMGPELNFNKCEFYLINSTADAGKPLLEIWPTMIQLNPENLYLLGAPLKPAGCAKFLMEKKDHLSKFVQRLTKLPAPYSLFFLKNCLSIPKVLYGLRTARCYEFPELLKDYDQQLRNGVEQLTNVSITEAQWMQMALPVRRGGLGTRRIESLAICAFLASVHAVHPLVSRFYAPAGDHMTQSAVQNWLQMTHCSLPEDCVRKFQYVWDVPMIDRDVSKLMLSTVGDERARAVLLAAFSRDCGAWLKSPPLNALPAPCLGTFLRDEEVRVGVALRFGLPVVTAHNCVACGKLVETNGHHGLSCNKSTKGRWARHREMNSIAKNCCESAGFPCQLEPTGLSPSAAIRPDGMTLIPVRQGKSVVWDVTSWCTVADSHVHGSSKKAGSVAHLAENEKRRKYSPLESRHLFYPLVVETFGVFGLALSEFVHFMGRKTRELTGEARSTAFMKQRFSLAVIKGNATAVLSTLPFNPRADRDFGCFFNV

SEQ ID NO: 18505 - protein, 906 aa, Paramacrobiotus metropolitanus
MAKDQRCQYCQNLFAKGAGFANHVKACSKKVHARQPSLVPQSDSDQHPLRFLLSGTHYTLPKRVPKTVRRSCAQALTQLLRKCVRDNSSASWIDLLLFGSRALSLPATKSLRKESLPSIIQRNLTDLSRHHHPPRTRPSGDTTRKRELNEERLTALATSLLQNNNVRRAVGVVMGEDALAPMNADTLEALRDKHPPEPEDSDYPPPPEQLQKPPFVTPAEVLQAVLSFPSGSAGGCSDLRPQHLKDMLCGPGAVESELCSALTDFVNHVLHNDIPEDIRPFFFGANLIPLAKKDGGIRPIAVGETFRRLVSKMVSQRCTDKMKELCNRVQFGFGTKGGAEAIIHGMRAYLETPHTEARVIVKLYFKNAFNMLRRDALLRAVREHFPAYYSFFWQSYRFSSHLVCGEEALLSARGVQQGELGDPSGPLGYSLATLPLFPDLDCELYFAFLDDVTLAGTVEKVMSAIKRIQEKAAKLGLELNFRKCEFFPVVTSDAEEAHIRRSLLSCWPEMLQLSAENFSLLGARMTSSACAGFLAGKTKQLQNFVQRLKKLPAHYSLFLLKNCLSILKVLYGLRTSRSYEHAQLLKEYDEMLRLGVEQLVNVKISEAQWTQISLPVRRGGLGTRRIETLAVCAYLASVYSVQHIVSELYQPTEECLTKTAQETWVQLTEGEIPAEFLRKFQFAWDSPVIDRDISILMSSTEGNDRARAVLLAALNKDSRAWLNALPAPCLGTFLRDDDVRIGVALRFGLPVVVAHNCIACGTQVETNGHHGLSCNKSTKGRWARHKEMNSIAKNCCESAGFPCQLEPTGLSSTDGKRPDGMTLIPVRQGRPLVWDVTSWCTVADSHVAASSKNPEVCPNWQKIPSAGRILFLNTVTSFIPWLLRHWEFLALPSVKCCISWAARFGT

SEQ ID NO: 18506 - protein, 1395 aa, Trichonephila clavipes
MEQLHKIDTPHPREVVKTLHNSIRNKINDQPLPLVLDPNNTPNGTPPKACEQCGAKVRSKKGLRYHMLQMHGVPLRQGKGTASRGPERGYKDNRQETSTPSPTEIVSPLPQVTAQVCATTTDAPGVALLGSTLRCTFPLPYRVKCPITGCRHSFCSNVWSSSSYSAKRHTTLYHRLPISTVEYWCSVCNRKINDKPAGHGCLRSTGPVQRNNQIYEWACDECGDSFTTKNGLFNHQNAHKQKIAERMVPLSLPDGPRERRAAMDRRMAPVSTGEPGDMPLAPPPDDDTSTPSQRVVDPAISEREPTRGRIDIQKPTILSFLEPLDTLLEIDEISGSKDHLEAIVKGITETVQDHFHLSPPTDTKGPDKIKRKGIDLSNHQQVQQCYRWNRRKCIRALTQIESPRCPASKDNTYAFFKQIWETTQPLLERSPPEPPSRPPVIETLTREFVEACLTAAENSAPGPDSISYRHWREVDPACSIITRVFNACIKMADIPSAWKMSNTILIHKRGDVKSLENWRPISLSSTLYKLFAKCLTKKLGTWCETHEVLSPAQKGFTPHDGVLEHNLLVTQHIHTARRLRKDRLVAWLDISNAFGSVPRQAIMDALVAAGADQDFITLIANIYENTTTQVLTDEGPTPPISLKSGVKQGCPLSGILFNMAIDHVLRSIQDQRENRVILAFADDLVLLAESPEELQEMLQATADELSLLHLRLNPTKCATLHMKMGKSLHAAPTKFVLYNTELPALVDGEFYKYLGKPVGFHIQKTFGTVNEATRLLRNISTSNLAQWQKIHALKTFFYPSLSFAMRTAKLDKTCWKKVDVAARAEFKNLLSLPSNASNHYLYGGRKLGCCGIPSAAEDSDFYLIDSAFKLLTSNDEEVVTQALGQLRRTVQYRLGRTPTDGDLGSYMSGSMEGRFAGTTNQLANSWTNARSASRRQGILWSFSDGLPTINFGDDKLTPLKRRGIMRALHGHFQLEENTKLLQAPSQGKAMDCVALSPASSHFITDGQFTRFADWRFVHKARLNLVPLNGNKPWLPKEQRACRRWGKWDETLPHVLNHCTSYSAAWQLRHNAILARIRTAVAYKGTVITENQAVGPGRLRPDLVAVVNGNLYIIDVTIPFENRKPSFQEAKQRKVEKYHHLISHFNNLGFQNVKVVPIVVGSLGAWDPENDAFLKLVATKKYLKTLRKLCVSDCIRWSRDIYVQHLTGVRQYSTENFVPHPNPMATTEISNQPIEGDYSEGSNATPQSSHQDPQEVHMPEVVTLNSTALAPTAQQKPEDVRDNNETSPQKSGTVTPPVNHDHNVNRTANATASASQDTDNKATESETIVAVERNSSPAIHKENSQTLSGMEERIVNTHNTPPLGENQKQRTCNYHLLLLISCYSISYLFCPSPAIE

SEQ ID NO: 18507 - protein, 2041 aa, Trichonephila clavipes
MSAESPIAHRTRGAGSYEDAALNGICKICSTRLLSMEDLWVHLRDEHTNDHVKRAKAMEAFPISFQLDRLADCLPIDTLRSTPTLHRPPAPCSPHGSPQVMESTRIDAQTDYCAIQIEASHTDPPPKDLPSQALDSSSEVLNGTMAPRNDTDLNVAMHMDSPPSLSQQPTEVLTVDGLVSPIPLDLNVTLSKSVSIQIDDEGEPMPPCTMVLHGDLHNLSMPRILEVPSPSGEGAHIRIEQTLPVTMTKPFAPTGKPKSKSHVDPPGTPRNSPSQPPPREQSSPSVLDIILQDDVVIDIEPELIELTKEWGGKITGSPNKAAFPPPSYARVAANGANGPATCAKETAANTNKTAANMNKTAANMNKTAANGSRTTGRAILRRCDICQKRCYTEKGLRSHRASCLKKMKSPDRREQDAGIFNHDDVAASESKKDNVMKRERQVVRNTYCRHCDKKIFLTSTLEDHYRRKHSRSLSPQGKPLSKVKPEPLKKTGSNGPMAVQPSTSKWAQGLEPILHLLKSIPHGSMDDIAKIPPPARSIAANQVRTGGNPPLPNVLVPVATEDTLPSPDPVPAHTAKTERRNEKKFICDFCERRFATAGALEDHARCVHEVVPEMTFAFEDDGEPADFTPKSAARTHQRQLTVNYSCKRCSASTPTSFLSKERLDKHMAQCHAQPSESAEPSARPTTSSEKAIWCPHCARYIHPRQTLVQHIRAVHNESFTAKERGLAHTKVVRFAADDVVDAAACSDVPAYHVLCPDGLRPDAATRDQPAQMADGQQAGPSRDPDPPQPTGHGVTPIANAQPINTDALCCEVCRKVAKTHKALKYHQLRMHGMTVLKPHALRSNNKPEEKPVNDDQQESVPPPPSPDALPLITSQAVTTAAAAPGAALLGETLRFTFPLPRVVACPIHNCGHTFCTKSWYTTTNSAKKHLRMYHRLFNRTTQYWCSVCDRNITTKPFSHPCLKATGMMLKKVGQNAWPCEECGESFTTKIGLNNHAKVHKLNEVADRMVQLDIPEGPQTRKARRQGRLRPLSEGDPGDMSLAPRHDDPPLPDSVQENTIENENQTEGRISVKMPSILTSFVEPLDTLLSVDEISDSRSHFEAIVAGITVAMQEHFHLTQDKDHEPKKTGSKQKSIDLQNPQQVQRTYKWNRRKCIRAITQKDSARCPVSREDTHQFFTRIWESTRTPIEQQRPDPPSRPPICEAFTTIFVESCLKSAENSAPGPDRLTYRHWREVDPYCKVITKIFNICLKMSDIPSAWKTSSTVLIHKKDDPTKLENWRPISLSSTLYKLFTKCLTRKLGDWCQLLEVLSPAQKGFTPHDGVLEHNFLVQEHLHSARRLRRDRYIAWLDISNAFGSVPRQVIIDSFIATGADQDFVTLVSNIYEGSATQVLTDEGPTPPIALRSGVKQGCPLSGILFNIAIDPVLRSVQEHKGHRAILAFADDLVLLAETADELQEMIQLTSDELSLLCLQLNPAKCATIHLAGTNTPIEAAPTQFHLNGTAIRTLADGEYYSYLGKPVGFYLQKTFGSVNEALLLLQKIATSNLAPWQKIDALKAFFFPSLSFAMRTAQIDKTTWHKVDSAAKKELKNLLSLPSNAPNHYLYGGRKLGCCGVPSAAADSDFYLVDSAFKLLTSEDEEVALQALGQLNRTVKHRIDRNPTDGDLGSYMSGSMEGSFAVSTNQLSNVWTLARNASRRQMVTWSFQEGSPSITFGGDCLTASKRRKVMKAFHENLQTNETSLLIGAPSQGKAMDCVIMSPASSHFLTDGMYTRFADWRFIHKARLGLVPLNGYKKWNDNIQKMCRKCGQREETLPHVINHCKSYSAAWQKRHNAILARIRKAVAFKGTVLSENQVIGSDGLRPDLVAVIDNIVYIIDVTVPFENRRTAFQLAKQRKIDKYTSLIPYFARHGFNRVQIVPIIVGSLGAWDPETDIFLKKVATNSYLRLLRKLCVSDCIRWSRDIYIQHLTGVQQYPTDAVNVHPDPEATEEKEYDTNVNSSDGNSTNQNVNNEISPNPSGQSANCPDNGSLPTIGGGPETMDL

SEQ ID NO: 18508 - protein, 1071 aa, Plutomurus gul
MDFTHCATCALPFDDNDVNEISIECESCFKWYHIICVRLDTLSKEDLDQLSWKCDECQPHNAGIKGFPIDNALKDSDSRPLRYDKDTPVIPSKPRNRKRNSNPRSQPDTPCPECGFMCRGKIGIAAHIRTRHPGLNRAQIVDKINSATAEASQDILIDPKNKQFQNKHTSKEIELINQKLDALNLRSSVFMDSKPMVEEFNLYVHDLVQILQEANNCLPGPKNPAKKYYEARKSKLFLSTERKYSKDSNPQRQSKRDKQKRKNKYLYDMTQYQYYNERRKCVRNILSSESNSCTIKIDSLHESFSKRWSTPNDNCLPNYPKIYEDTQTLLDNTFDLKISKEEIRLEINAISVDSSPGSDQILTRTMKITQCEAVLANLCTIMLKWNLVPEHFLEGRTVLIYKSGSETDSSNWRPVSICSIIRRIIERLLDKKLNNYITLCNHQRGFVSSPGTLLNTEILSRCLEKAKETKTDLNVLFLDVSKAFDCIGHAHLHRTLQSLELPTPLRDLIVSLSRNNFTRLETQQGKSKPIILNRGLFQGLPLSPTLFNLCIDFMIRTLSEKEISDSYGFSLNENEEKTSVLAFADDCSLIGTSTEDTIELFYIANHCLHQIGLSLNEEKCIAIHLSEGVLSEEEININSILNIKSITADETVRYLGVLFKDEIIFDEKKVIACFHKDLEKLVSSPLLNPHQKLNILNDFIWPRLTYKFQNAPLKDINSGFLNEVDKIIRSSIKEIVCLPADTPNTMLYSSRKYKGLQLVKTNWEAWIQKYGAYNLILSSGCKILDPFKDDYENGKVKCLKALNINSISEVTHCIGKDNSKETQSLRNFLRERSFTEWTKLRQKGQGVILFKECEYANSWIATKKGLSSSEWTTAIKMTANVVAVRAVPGRSLENNQCRHCHIETETLAHVLGKCPKGELLRINRHNRIRSKIAQALRNTKVWTVNEELHCLMENGSTGRIDILIYKTDSREGFILDPTIRMETDTEQPNKVNDEKIGIYTPAIPFFKEKYNLRSLVVMGLLIGARGTIPGLFMKFIKDFKLPKMLIDDIVISVLRDSIIILHNHLYSNNQY

SEQ ID NO: 18509 - protein, 1299 aa, Amphibalanus amphitrite
MLRLKHPPAPEDEDMPPPPCTTDTPPLTVTEGQVKQSILAMPTGSAGGMDGIRPLHLRQLTSTEAGEAGSRLLTSLTALANLVLAGRIPLCARDVLYCASLCALRKKDGGLRPIAVGSVYRRLPARIAARFAADLLGPELRPVQLGVGTPLGCEAAVHAVRGFISSSSDQETRVLVKVDVKNAFNSARRDVLLRCVKETCPEIYAMVYQSYSAPTPLLMAGHRVRSSTGVQQGDPLGPILFALAVNSCARSLKSPLNIWYLDDATIGGPVADVVTDLGLITRTLPDLGLQLSPTKCEVSVLGNLGSEQHESVIQEVKRTLPEISEASVARLKLLGSPLHDDGLPDAVAMVAEAISKLCERVRLLDRHTGLFFLAHYVSAPRLTYLLRSSPLYRVSSDLHEIDEEVRSTLSDVTNVNISGPAWDQASLPLRHGGLGVRSVESLSLPCYLASLRAASSLVASISPPNTRNEASLAFQSALDEFKKLIRSDDVPEGDQASNQRPWDDLVCGMARDALLESANQVDRARLLAASTPHTAAWLQAIPAASLGLHLDAETVRVAVALRLGAPVCEPHSCTQCCHPVDRYGRHGLSCKKSVGRLPRHANLNDVVKRALSSAGVPSVLEPQGLDRGDGKRPDGLTLFPYQRGKSLTWDATCVDTFAESAVVNAALQPGSPAVAAESRKRDKYMAIAEKHIFVPLAVETTGILGPAASAFLSELGRRITEATGDRREVTWLRQRVSLAIIRGNAAAVLATASSVQERHVSMRPRMSSGQPRNPGERNRRQQPHEEEKQRPVDQHLVPVVQATDSNETDKDPHESPSPRRLSDASRREGDSPHLSVAKRPRSVERAPSCPDRADKENTKRLQVASVGSRRIYGASADAGGSRFAASPQMRPTPWPRKSGEGGKNPQLHCSKAQTASRGLQLIPAIRPLDSDEDGKDPLYIGLPNCGNSCYQNATLQSLLGLRPFLSEMVSLISGQDESGQGRTMRAVAKLMVLRQKALSKSVANHLNDLRNVFADIDPAFQGSEMQDANEFLLRLLDTTKEEIDARRTTDNPVRDNFQYQTVESYMCTNCHETVQKRQEDISWFVSVPRRQGTEAPTLQDALRLSMQPDRRELLCQHCRHDECRVTTKISQLPRTLILQLNRYAFLGEDSKKICAYVGIPKFLSLNEHVADDVTRPPEWKCTKPPLYTLSDFEESEAPSSGPSPSSTARGPSSVPAGTAGLPETATDDRCRAAAAVSAGRACGAGRRLHERRPVSLFSGPGRRLYLPAGERRQPLRQRHALRTLRVGRIQRRQGPMVPL

SEQ ID NO: 18510 - protein, 974 aa, Neanura muscorum
MESSEIPSDSQSQAPVNCNECGKPCKNARGLHIHIAKKHRNNAPLIETESSLPNSPSPSFLDYFHQIRATSRPTKRVPQSVRIPVAQEAARILSKCASSNTPKDWHDLLLFAPVVLDTQSANPARTDAKMGSLSSRIGSLSSKIRTNLAAWRSHSFRTSNPPLTPHHVQPNNPKNKKKNSEYSIASHVQALVAEGNIRGAVKCLSSPEQFSAFTPQTLSALKAKHPTPAYPPTIPQPSTTRCLLVEPSDVAKAISNFPAGSGGGPDGLKPQHLKDLTTKATGQAGTDLLNSLTDVINLILAGKVPQEVTPFLFGAKLIALDKKGGGIRPIAIGCTIRRLAAKLASRSTLAELGPLLRPNQMGFGTPGGAEAVVHATRQFVTHRKPGLLLKLDFSNAFNSVDRSKVLNAAITEAPSLGPITLQGYSTPSHLFFGADIVTSAQGLQQGDPMAPVLFCLVVQPLVTSLLSPLNSWYLDDGTLGGPGQVVYEDLTRVIQSAPELGLELNPAKCELLVTGSEDNQWVEAVKSLLPEIRILDRNNCSLLGAPITTESLPNALRNKLEEIRRLVQRLPSLSSHTALFLLKNCLAIPKLIYTLRCAPTHKCPQFLEDFDSVIRSGLEAILNVDLNDDTWLQASLPVARGGLGIRKATDLAVPAFVSSITGTTDLVNELLRSADSAPDPVTAEAFELWSTLSEGAPIPTSNLQKVWEAPILDIKSRIFLAKAQTPHQKARIMASTTKESGAWLNALPSPPLGTMLDDESLRIAAALRLGAPICQPHTCRCGREVDNYGTHGLSCLRNDGRLPRHAAINDIIRRTCSSINVPTTLEPLGLFRTDGKRPDGLTLIPWAHGKCMVWDVTCVDTLAKSYLSSKTTNPGVAAATAESKKRIKYAATPKQYIFLPFAVETLGTFGKSAIQLVNELGKRLHSISGEPRSTAFLIQRISLAIQRGNAASVLATIPRYDRFSEINYLSPLFI

SEQ ID NO: 18511 - protein, 1022 aa, Lasioglossum albipes
MINNSVDGPSGSIDPTIGDNGGPGVSGESLYPCRAPGCSRTFDKLRGRSVHEQRTHKNWYDQSALEGMTVRRAPWCEEERTLMARQEARLTLNGERFINQALLQLLKNRSLEAIKGQRKYQSYKDLVQKFIIELSESSIADTNPHDQPSEESSSVQEEEQNSLIRAILDLGSEMKPLDGSEYSSQHLRDIWEHIEAWPIDGISQELEIYLLEIFPKAIRGKKGKAACENAQMKITRRRARRIEYAQTQRAWNRNPCNCLRAILKDMTTEHTPPQEEMVPFWTTVFTKGSESTPGIGRKEETVASLWSCITPPEVMKAMPEITTAPGPDGVTARQLRAVPLGILTRIINLFLLCGRLPNHLMESRTILIPKKDQASAPGDFRPITVSSVLARTFHKILATRLVNGIKIDDRQKAFLPVDGCAENIFHLDLILRYHRQYFKPLYIASVDLAKAFDSVTHHTIRDTLITKGAPARLVQYITNVYQRSTTRLGCNGWESDALHPTCGVKQGDPLSPVIFNLVIDRLLQLIPAEVGVDIGGRRYNTFAFADDLVFVASTQEGLQQTIDLANAYLSQCGLKINANKSFTIAVRNVPHVKKSVVDGRVRFSCLGHDLPALKREDEWRYLGVQFTPEGRLASDRAEVLLKLAIDKLTKAPLKPQQRMFALRVMVLPSLYHLLVLGNITLSKLRKLDALVRGAVRKWLALPKDVINSYIHANVKDGGLSIPSLRWFIPLKRRDRLLNLGKGNEQRYPYLSQEIDRATKRLTDGRVSITDATKLNERWANLLHKSWDGMALKQSGRVPQQHRWVTEGSRFLSGRDYINAIKLRINAMPSKSRTTRGRRSDRLCRAGCQEVETLNHILQRCHRTHSARVERHNAVAAYVKRALEKTNEKVLEEPHFRTSEGLRKPDILGKCKQAVIVLDAQVVGEQVDLDEAHQKKIRYYRELEGQIREQHRATTVTFSSITLSCRGVWSPESAKHLTDLKILRKKELKVISTRVLIGSLSEFWMFNRMTSRRVPRDVRSGIG

SEQ ID NO: 18512 - protein, 1006 aa, Triops cancriformis
MATSKTPGTPALGHVCGVCLWSGKTSVGLTQHLRLKHPAVYNEIKAKNAPTLSKARWSKEEIEELARREAEVLQEGDKKLTRFINITLSKLFPSRTLESIKGQRKPLEYKALVERYLDQLSEIPLMEDGKEERGLNQSISIKNWLQFLLSLPKAPSNLPEDQLDSIILERLDGSEDLKNLDEFLSKILFKPTAGKQVAANPHKSAPPKNRREERDRIFSRTQRLYKRDRTTCLKSILDGNMKSSKVLEDLYGFWKEMFEKESPPDSDPPDYLDIEEPTGIWKHITFYEMSKSYPKNNTAPGIDGFSVKDLKKIPPRILNKILNLLLLCEDIPSCLKQHKTVLIPKKDLPKTPGDFRPITMSSVLVRMLNKILADRLSSLVPIDPRQKAFLPVDGCAENVFTLDFILSHARRKVKSLDIAVLDIAKAFDSVSHHAIFRALEEAKCPAGFINFIENSYFSCTTTIYTAGSPVGNPVHMKRGVKQGDPLSPIIFNLVINGAIRRLPDEFGFEVSPKIFLNCLAYADDLILVATTRIGLKRLIIIVGEYLQRRGLKLSAEKSIGLSITACGKEGLTYVSSANKIDFQGVEIKNMCVLDTWQYLGIQFSHIGCTDRITPEVSDLLFKLQKAPLKVQQKLYALRHYLIPRLLHGLILSRVLITELKSIDNLIRKYVRSLLHLPKDTPLGYLYASTKDGGLGIPCLRYLILKCRLARILRMRSSNDAVVREIANSEFLLHETQRLRDSLSIDGSVLDTNELIRKYWAKRLYTSYDGKSLAYSEFFPYGNSWVREDHMNQRAHVFCDCIKLRINALPTRARTSRGRTESKDSSCRAGCKFSSGIPMRETVNHITGVCQRTHDARVRRHDSIVDFLVSIWKTKSTNEVYKEPNYRTPLGLRKPDIVVKTPNEVWIADVQVLADNANLEKEYSIKTNKYASDAGLIQGLKKQFPNINLFSFFAVTINNRGLISRSSVNELRKRGVNSRDMLTIILRAMEGSLMIWRIFNQTTSSAR

SEQ ID NO: 18513 - protein, 1710 aa, Microplitis demolitor
MEIELQFPFVFPVRCPLCATAMKRTLRQYCNYASFNQHLSREHPNADIRYFCRTCKYKSLKPKAVALKDVKAHFRKAHPGASAKDVELPSGESELPVVKDRNRRSGSARRSIPLNSSPVTRSPPSRPSTRPSPASTSTTISRSPAGTGTSAPPVCSSAAGIGPSSRLCTPKPVATTTITTTTTTIIPITTPSVNTTTSYTCSVLPKKSRPTVASNVLLKKKVVVRLERIPPSTSKSPGSGGAASKAPSPPSRVLTRSMRAGSVPPPPINSKPPSSATLVTPAVSFATVARGTRAQSAPPTPVIARRGPGRPRKDIAVATSTNIAAITTATVTTTVIRGSVTSPRISSSPTTPPTTSSGLGTIREADRVHNGATGDNTDDNDHDEGTGNSQQHQQQSTSTPTPSAGDVDHPQQHLFPQIIINSPPNMATPPAPRTVSPAVTTYPPLNNSITISCNSKNSSPTNNNNDNSITTQNNSLVNNPVNISTTNNSLMTGGGRADTPNSASNGDNDSNNLFSIFSSSRHTAAAGSGRGVNYRDCNNNNNNNNNSCIRCECGRRITPDIFNSLSSCGDTNGVTVLNGSSSNSNNNNNYNNNVVNINKWTRVKRGRGGRNGGRNTFNNSSRVTNNSPVLHTSNVFNLLNHDDSGDVNHGLDPCPGGRSGVPRDASGRILQRDTYTSLRRPRNSQNPPLPNPRRETTTSSTRHNSHPPQSRKNQRQPTQRNMAGPTRVVLRDNKRQELIAMANATESWDELEEMDRELSVFFQGTTESRPAGRGKPRGRTEINNQGGNFVREGPQEQGNGGRIRSATRIQKLYRENRRKAMQEVLEGPSPSCQVPKDDVDRYFRALYSDDSPFNEELPARQVWPLDESDELAEALIVPLSATEVSRRLARMQDTAPGPDGLKYSDLKRMDPGSGLLTAAYNACYRLGAIPVSWKVSNTVLIYKKGDRNDLSNWRPLAMGNTIYKLFAALIADRLTNFVVNGNRLTSAQKGFLKYEGCLEHNYVVQEVLTDGAREGKDVIIACLDASNAFGSIPHEVIYDAIDGIGAPKVFQDLIRSLYTGCTTRVRTSEGFTDPVLLMRGTKQGCPASPIVFNIGTDSVLRAIEELNRGYMLKTKRVASRAYADDYCFVADSVEDMEQMLLTVSVAAKRVGIKFNTSKCVTLHVSGKGSKRGVLDTKFNIDGGQLKSLAEGESYDYLGVPVGFNINQTPIATIGEMLADARSIDRSLLAPWQKMDALRTFIMPRIDYILRGGKIDKTPLIMADKVLRKLVKGWMHLPQRASAEVVYLQPWKGGGGILPLADLADISVIAQAFRMLSCKDLEVAEIAKSSLEQAVQRRTSHQPSMQEIAQYLSGSLEGPFARNQGDPSLWSRVRIATRRQASRFGLSWEWCAANEELALKCKDVEGRYALIGPSLRSQVIWRLRKAAQAFYYETLTMKKDQGKVWQVTARNRESNLCLRDGKYIRFAEWRFIHRARLDVLPLNGAIRWGQRDKRCRVCGYSLESLPHVLNHCMTHSAAYQLRHNSILNRVSQASRAAGDTRVNKRVQGVDGDLARLRPDIVVRNERAKSVLIVDVTVAFENQCVAFDDARQSKIDTYHELATALRAQGYQVRIDAIVVGSLGGWDPNNEAVLRALSISPYYARLMRRLIVSETIRWARDIYVEHVSGQRQYAGTVAPNEDASCVRPDTDLTNGPLSSFFNASTTAIAATAN

SEQ ID NO: 18514 - protein, 1710 aa, Microplitis demolitor
MEIELQFPFVFPVRCPLCATAMKRTLRQYCNYASFNQHLSREHPNADIRYFCRTCKYKSLKPKAVALKDVKAHFRKAHPGASAKDVELPSGESELPVVKDRNRRSGSARRSIPLNSSPVTRSPPSRPSTRPSPASTSTTISRSPAGTGTSAPPVCSSAAGIGPSSRLCTPKPVATTTITTTTTTIIPITTPSVNTTTSYTCSVLPKKSRPTVASNVLLKKKVVVRLERIPPSTSKSPGSGGAASKAPSPPSRVLTRSMRAGSVPPPPINSKPPSSATLVTPAVSFATVARGTRAQSAPPTPVIARRGPGRPRKDIAVATSTNIAAITTATVTTTVIRGSVTSPRISSSPTTPPTTSSGLGTIREADRVHNGATGDNTDDNDHDEGTGNSQQHQQQSTSTPTPSAGDVDHPQQHLFPQIIINSPPNMATPPAPRTVSPAVTTYPPLNNSITISCNSKNSSPTNNNNDNSITTQNNSLVNNPVNISTTNNSLMTGGGRADTPNSASNGDNDSNNLFSIFSSSRHTAAAGSGRGVNYRDCNNNNNNNNNSCIRCECGRRITPDIFNSLSSCGDTNGVTVLNGSSSNSNNNNNYNNNVVNINKWTRVKRGRGGRNGGRNTFNNSSRVTNNSPVLHTSNVFNLLNHDDSGDVNHGLDPCPGGRSGVPRDASGRILQRDTYTSLRRPRNSQNPPLPNPRRETTTSSTRHNSHPPQSRKNQRQPTQRNMAGPTRVVLRDNKRQELIAMANATESWDELEEMDRELSVFFQGTTESRPAGRGKPRGRTEINNQGGNFVREGPQEQGNGGRIRSATRIQKLYRENRRKAMQEVLEGPSPSCQVPKDDVDRYFRALYSDDSPFNEELPARQVWPLDESDELAEALIVPLSATEVSRRLARMQDTAPGPDGLKYSDLKRMDPGSGLLTAAYNACYRLGAIPVSWKVSNTVLIYKKGDRNDLSNWRPLAMGNTIYKLFAALIADRLTNFVVNGNRLTSAQKGFLKYEGCLEHNYVVQEVLTDGAREGKDVIIACLDASNAFGSIPHEVIYDAIDGIGAPKVFQDLIRSLYTGCTTRVRTSEGFTDPVLLMRGTKQGCPASPIVFNIGTDSVLRAIEELNRGYMLKTKRVASRAYADDYCFVADSVEDMEQMLLTVSVAAKRVGIKFNTSKCVTLHVSGKGSKRGVLDTKFNIDGGQLKSLAEGESYDYLGVPVGFNINQTPIATIGEMLADARSIDRSLLAPWQKMDALRTFIMPRIDYILRGGKIDKTPLIMADKVLRKLVKGWMHLPQRASAEVVYLQPWKGGGGILPLADLADISVIAQAFRMLSCKDLEVAEIAKSSLEQAVQRRTSHQPSMQEIAQYLSGSLEGPFARNQGDPSLWSRVRIATRRQASRFGLSWEWCAANEELALKCKDVEGRYALIGPSLRSQVIWRLRKAAQAFYYETLTMKKDQGKVWQVTARNRESNLCLRDGKYIRFAEWRFIHRARLDVLPLNGAIRWGQRDKRCRVCGYSLESLPHVLNHCMTHSAAYQLRHNSILNRVSQASRAAGDTRVNKRVQGVDGDLARLRPDIVVRNERAKSVLIVDVTVAFENQCVAFDDARQSKIDTYHELATALRAQGYQVRIDAIVVGSLGGWDPNNEAVLRALSISPYYARLMRRLIVSETIRWARDIYVEHVSGQRQYAGTVAPNEDASCVRPDTDLTNGPLSSFLMPPPLRSPPLQI

SEQ ID NO: 18515 - protein, 989 aa, Strongylocentrotus purpuratus
MSGAGSLHILTLILCFVQAGAFTRFIIPSYTTDDWHRVNSDLKDLITPLHHDLCQRDITTTEAADRFNSIVFDYYSSQPDFVGNRNSESYIAHDPKTLSDARKKKNALRRKAYGENATEEDRRNFRDAVKAVSFLKKKSDSRKAEKDSQYQEKRYRRDFWSFSKAICNGSLDKDSTKPSFTKETADLYYPGKYSQKVTLDFNQLHWFPYVSVNEPTKSEFNLNPITPKQVKSVLQMKKASSAPGPDCLMYGLLRNVPCIHHCLATLYSRILFESNDPPDNWSVSRVSLIHKDGDTSLPENFRMISLTSCVSKVFHQILANRLVEYLVENKFVDKSVQKAFIYGINGCIEHNQVVQEIIADSRYRKRTVHITFFDIADAFGSVSHDIISHSLKRFDVPQNVSLYIENLYSKLQGSIAGCNWSSNPFTFKRGVFQGDPLSPVIFLACFNPLLEYLAELKDKYGYNLNGTKVITTPYADDFNLITCNKLQHQKIISKLHQYSSSMGLILKPSKCCSLSVSSGSPREIPFYLGNETSIRTLREKPHRFLGAQICFSGKTSEVFQYVYSEIKTKLERIDRSLVRPEFKVAIYTRYMQPSVRFLLTVHSLHKTNLDELDLLSRRFVKKWLGIPSRGANVALVHMTQGMNIPQMSDIYWQSHTLALTRSRVKGDSLVNHALDCTLERESRWSQKTSSIVQCQLNLNRVEDTVDVNNSSWKVVKKSVKNVLEDDASTYWEKSVEPLLCQGQFVKLLTLEDENLTWKSIMYNLPKRVLSFVTNSCIDSLPSYANLYRWGKRLTNKCPFCPLTTGTLHHILSNCSTFLDRYEWRHNNILRYIYRTVKESLPHEQVYADIQGFTVAGGTIPSHIYVTSQRPDLVIIWESMKQMLMIELTVPFETNTNAAHTRKLDRYKELVAEVRNNGYSVTYHAIEIGARGQINRDNTNRLKWVLRKCSVPLRPNSFFQTISRYAVVSSFVIFNARKESQWKDVEYLDL

SEQ ID NO: 18516 - protein, 1180 aa, Dictyostelium purpureum
MIDNKIKQAKANTPLNPSSSKLREIRTEIRTNRAETISNHEITGFRTELSTEATSIAFSNNNSLDRKTTRTKLTLSNQELHDANEIFEEIITRLLADNTPLLDAISKTIYAVATSIIKIKSKGDKESLPQKVANDIINDNKLKIKDISRQRRILEAACSRLRRGGKPGSKVIKMVMKESPEAQTFNIKCLRRVIASICKQKDTYKAAIAKCMKQHKFTVINNLMATDRTKAFGMLSKSKPNILPDESNQSAVKKQAHDFWSKLWNPQAQHDFVPHDPDYSRLKWIKDVNKVVTKLKIKPTKFAPIDSTSVFNYIRNKKNWSAPGPDMICNYWIKKLTSSHSYIATAFSDAIDNNVLPDWFCEGITYRVFKAGDPNSESNYRPISCLNNLYKCFTGVLLTQLNDHTLIRNNIIQEQQKGAKPSTWGTYENLTADRFVTEKVNSNDLNCAWVDLIKAYDSLRHDFIVFALELQKVDKVIVNAIRLVMSKWKTRIFINRCTKTDFIPITNGIFQGDALCPLLFCLSINVVSLYISHIHNPLVIDETKISHRLYIDDIKLYSCSNEALCHTLAETLTAFADIGLKANKSKSAVFLGESVAARCYQCQKILKKQNYLSRNYMPDDFPVGSRVCSSCGMFFKKHGHFNTEQVPLVNGDNPYFDGVDLFQGIQKVSKDTPYKYMGVYFNPIIDIDKNREVINREAISRANRLFKSELSGFNLVSAFDSLIVGYLRYYWFLDFSLKDIKALSTAIKEIMRSNGIKHPFMSNDFLHLPRKYGGRGFTNIKQEFMVYKITTLLKFHENIKFSVFIGDDFDLYKNSSIMVPPPSRRYDTACHYASELGFELSFAANGLWTVTIPKVDDDNVTTYTVYSNNENAEQSDKMSSIIKHFTNLQLYKRVKEEEVGVAKKRLWRRFHEHWIHWIKGWTHIPAHIEATFWEAVLSLLPNRMSLVHRDASSNADRRCRLCASADESIEHLVGGCTGMNKFGRITRHDMVVTEIIKSLIKRYKIPNITNFKAPIFSNSLKENNQTIINVEILRDVCFKNTDSIQNKPDIVIIDKVKHIIRVIDVCIPFDGNMLFRQHEKLLKYDYFKKHFKNQYKDPDGRSFDVQIIPIVIGAFGRIITKEVPHTEKDITLTIKSLKDCLSLLPLPETEKVHLFKKLPRKAIIGTILSLQSWTQKFKAS

SEQ ID NO: 18517 - protein, 1192 aa, Centruroides sculpturatus
MEPSGGPSTVTLLVPLRPPYHCPACLPVYRDYVDHGGLSRHLRRVHGKRLDFECRACKTRSDKLKAIKLHQAKSASCSAQFPSLSPDCSRRDPKYRPKVYNGPWNPRVPRPGLDEAYLASLNATTSSQPTPSTCFNQSTTSTTNPTPVSPTPTITSRTDSPCRPVDEHPRLDSGNDSSSPPLVRRPRRPRRRRRRKSTPSPISPPATDSAVDPAPPPTAPEPGITASDPAPPPTAPEPGITTSDPPSHPAQCRPQVSVQPDPPAPNISTEPPPPWVIAWRDRFDCALDIDMLEVMVQDLTSLAESMAPQQQPNNRLRQPRSQHLRERRHCRYNAAEAGRIQRLYRANKRKAFDEITRGPSRYCNIDKSTITDHFTSTSSRLQVPQEPLRTLLPPGLHPTTSDPILDIFTPLEVAARLTKCHNTAPGPDGIRYYIWRRLDPQGHILSALFNAVQRIGAVPNAWKTSMTVLIHKKGDHDNIHNWRPIALANTLGKLYSACIANRLLRWCEENHIISTAQKGFMRYEGCSDHNFTLQTAIQDARRKNRGCHVGWLDLTNAFGSIPHETIFTCLEWCGLSESAINCIRTLLDGCHTRVRTSSGLTDAIPIHAGVKQGCPLSPILFNIVMEPALRLVTNLKVGYELHNQSISILAYADDITIISSSPAGLQSQLDLLSTWALHSGLRFNPSKCATLSVVNKYHCAEGDHFNIQGTAIPQLKKDEHYHHLGIPTGFTLGLSAESVIEGIIGDLQHVDRSLLAPWQKIDCVSTFLTPRLTFHLMLGTVRKKPLGKLDRAIKRSVKKWMYLPQRASPEVIHMPHAQGGANITPCSILADIAQISHAINLLHSKDPTVATLADCTLRHVVEKRIKRPPTDADVCTYLAGSMENEFGLDPYDIPSTWTRLRMATRRLRKHLELEWHTNAEGAFIPSINGKPISKNTAMKTISDAAKTTLVSSLLRKPDQGKTYKLIASNPCSNHFLRNGDFTRFADWRFIHRARLSVVPLRGLRRFGNASQTCRRCQRHRETLAHVVNHCPPNYHLITKRHNAVLDRLCNAFNRKNLTVYKNQQVPDFPSTLRPDLVVINNSPKTVTIIDVATPFENGEDAFNRVRDEKVAKYSDLANHFKRQGYDTFIDAFLVGALGGYDAANEGVLQRLGITRNYSKLMKRLMVSDCIRWSRDIYTNHLSSNRNSAHRPM

SEQ ID NO: 18518 - protein, 1192 aa, Centruroides sculpturatus
MANPQNVTLLVPLRPPYHCPACLPVYRDYVDHGGLSRHLRRIHGGRLNFECRACGRQSDKLKELKLHQARSTQCSNMFPSMSPDQARDPKQRGKIPTGARRRLRQTDYGLDEAYLASQAALNSEVSSSHPRLPTSHPRPTPAAHPPTASPPPAVDTSPAGATPTATSTIQDVGPTPTSTASDTSPTPLVRRPRRRRRRKPSDTPDAASSQDSIPDSPADSNGTTTAEPSPSTAPHLDTNTVPEAATADCPQPPPALATDPVPRPCTPASHPPEYNTSSDPPSWVLAWRDRFNYAVDEDMLETMVDDLTCLAQSMTPQQHRPPHRPNRTRPARSRNNNRRGNFNPAEASRLQRLYRANKHKAFEEVTRGASRFCSASKAALTEHFSATNPAPSEPLCSLLPPRLQPTTSNPLHTTFTPTEVAKRLTKCHNTAPGPDGIRYYIWRRLDPQGHILSAVFNAVQRIGHVPSAWKTSTTILLHKKGDPNDIHNWRPIALANTLGKIYSACLANRLLRWCEDNEIISNAQKGFMRFEGCSEHSYVLQSTIQHARRKNGECHVAWLDLRNAFGSVPHSTIYSCLKWCGLDEASIECVQLLLEGCHTRIRSNTGLTDPIPVLAGVKQGCPLSPILFNLVIEPAIRLINSLQLGYRLHEHAISILAYADDITIVSGSASGLQSQLDLLTNWALHSGLTFNPAKCATLSVAGKYQCSDSSNFRIQNSNIPCLGKNDSYHHLGIPTGFTLGRSADSTIDGIIADIKHIDNSPLAPWQKIDCVSTFLTSRLTFHLTLGKVHKKRLSQLDTVIKRNVKKWMNLPQRASPEIVYIPHAQGGANVTPCNVLADVAQVSHAINLIQSKDPVVATLATKTLQLVVEKRIKRQPTEADLCTYLAGSMDNEFGADPYDIPSTWTRLRMATRRLKKRINIEWSHTENGALIPTLDGTPIKKTTAMKSISAAVRATFLQSLLNKPDQGKAFKITSANNNSNHFLREGNFTRFADWRFIHRARLSVVPLRGLRRFGNASQTCRRCQRHRETLAHVINHCPPNLHLITKRHNAILDRLNRAFNHKDLNVYINQQIPDFPSSCRPDLVVINQNPKTATIVDIATPFENGADAFERARSDKIQKYEELANHYRRQGYDTFIDAFVVGSLGGYDSANDSVLQRLGVSRNYAKLMRKLMVSDCIRWSRDIYARHLGHRI

SEQ ID NO: 18519 - protein, 902 aa, Centruroides sculpturatus
MLEVMVQDLTSLAECMAPQQQPNNRQRQPRPHHPREQRPNRYNAADAGRIQRLYRANKRKAFDEITRGPNRYCTIDKSTITSHFTNTTSCLQASQEPLRAFLPPRPQPTTDDPLLNTFTPPEVAARLSKCHNTAPGPDGIRYYVWRRLDPQGHILSALFNAVQRIGAVPNAWKTSTTVLLHKKGDHDNIHNWRPIALANTLGKLYSVCIANRLLRWCEDNHIISTAQKGFMRYEGCSDHNFTLQTTIQDARRKNRGCHVGWLDLSNAFGSIPHETIFTCLEWCGLSEPAINCIRILLDGCHTRIRTSTGLTDAIPICAGVKQGCPLSPILFNIIMEPALRLVTNLQVGYELHNQPISILAYADDITIISNSPAGLQSQLDLLSTWAQYSGLSFNPSKCATLSVASKYQCAEDAHFNIQGTTIPQLKKGEHYHHLGIPTGFTLGLSAESVIEGIINDLHHVNRSLLAPWQKIDCVSTFLTPRLTFHLMLGTVRKKPLGKLDRAIKRSVKKWMYLPQRASPEVIHMPHAQGGANITPCGILADIAQISHAINLLHSKDPTVATLADCTLRLVVEKRIKRPPTDADVCTYLAGSMENEFGLDPYDIPSTWTRLRMATRRLRKHLELEWHTNAEGAFIPSINGKPISKNTAMKTISDAAKTTLVSSLLRKPDQGKTYKLIASNPCSNHFLRNGDFTRFADWRFVHRARLSVVPLRGLRRFGNASQTCCRCQRHRETLAHVVNHCPNNFHLITKRHNAVLDRLYNAFNRKNLTVYKNQQVPDFPSTLRPDLVVINNSPKTVTISDVATPFENGEDAFDRVREEKVAKYSNLANHFKRQGYDTFIDAFLVGALGGYDAANEGVLQRLGISRNYSKLMKRLMVSDCIRWSRDIYTNHLSSNRNSAHRPM

SEQ ID NO: 18520 - protein, 1172 aa, Centruroides sculpturatus
MATRSDLANVTLLVPLRPPYHCPACLPVYRDYVDHGGLSRHLRRVHGGHLNFECRACHVQSEKLKEIKLHQARSTNCAGALPPMSPNHTCRDPKPRGRIPTGARRRNRSKDYGLDEAYLASQSATNNEVSASHHLSPESPPAVDPVQVPPASVSPANMTCTPPRNNDDPNQPPEPAASPSSPPLVRRPRRRTRQRRRRTSNSSTASPTTTGPSTLEPPPDEPAATVEDIHPLPPPAVSIPEEPPPEPDTTDTNAEPPAWVIAWRNRFDCALDEDMLEAMVNDLSNLAKSMIPQPTRHQRPRHNRPQRNQHYNHRSDANAAAASRIQRLYRANRSKAFDEITRGPGRYCNIDKTTLEEHFTSVYGLRQVPQEPLVNLLPPPPQPTTSDPLSAAFTPSEVAKRLARCHNTAPGPDHIRYYIWRRLDPQGHILAALFNAIRRTGHIPESWRTSTTILLHKKGDQSCTNNWRPIALANTLGKIYSACVANRLLLWCEENNIISSAQKGFMRFEGCSEHSFVLQSTIQDARRRNRECHVAWLDLANAFGSVPHNTILTCLRWCGLDPSSIDCIESLLKGCHTSIRTSSGYTNPIPICAGVKQGCPLSPILFNLVIEPALRLINNLQHGYQLHDQAISILAYADDVTIVSNSTTGLQAQLDLLSTWAQCSGLAFNPSKCATLSVASKYRCATNPSFTIQESSIPQLGKNDYYQHLGVPTGFSLGKSAEAIIDDIISDLKRIDNSRLAPWQKIDCVSTFLTSRLTFHLTVGNVQKRKLSILDKHIKRSVKRWMYLPQRASPELIYMPHGQGGANITPCNLLADVAQVSHAVHLLLSRDTTVSALAFKTLRLVVEKRIKRLPTDADLCTYLAGSMANEFGCDPYDIPSVWTRLRMATRRLKKRIDINWTPNNDGTLIPIINGRPINKNTAAKSISAAVRESFLGSLLNKPDQGKAYKIIATNHHSNHFLREGNFTRFADWRFIHRARLSVVPLRGLRRFGNASQTCRKCRRQRETLAHVINHCPPNFRMITMRHNAILERLNNSFNHRNLTVYSNQQIPDFPSSCRPDLVVLNSNPKTATIVDVATPFENGADAFHRARTEKINKYTDLANHFRSQGYDTFIDAFVVGALGGYDAANEGILQRLGVNRNYAKLMKKLMVSDCIRFSRDIYANHLSNHQRN

SEQ ID NO: 18521 - protein, 1171 aa, Centruroides sculpturatus
MAASSKSLEVTLLVPLRPPYHCPPCLPVYRDYVDHGGLSRHLRRTHGGRLTFECRVCGLRSDKLKEVKLQRGRIPTGLRKHPIRDEAYLAYMASQASQGSKTGNCQPQPVVSQARPTPSCPATPTTNASAPGTQEQHPSPAETTIDDSTPPLVRRPRRRRRRPASNSSHTSSPVSPANASITSTNASGSAAAAPTAAMPASGSPPADVPEPQPPSQPADDTHLSCVSGPQPPSQLATDAHQSCVSSPRPPLNDSTSAPPPWVIAWRDRFDCAVDEDMLEAMVDDLSNLARSMTPQQYGQHHRPRRTRPPQASNPRSTYSAAEASRLQRLYRANRHKAFEEVTRGANRFCKIDNATITDHFSDTNSLQLIDHEALRNLLPPALQPATNNPLCGTFTPAEVAKRLSKCHNTAPGPDGIRYYIWRRLDPQGHILSAVFNAVQRIGHVPSAWKVSNTILLHKKGDQNDIHNWRPIALANTLGKIYSSCLASRLLCWCEENGTISPAQKGFMRFEGCNDHTFILQSIIQNARRRNSECHIAWLDLCNAFGSVPHSTIFTCLEWCGLCPSSIDCIRDLLEGCHTRIRGHTGLTDPIPVLTGVKQGCPLSPVLFNLVIEPVLRLINDLQHGYCLHDQNLSILAYADDITIISKSAAGLQSQLDLLSSWARCSGLSFNPSKCATLVVAGKYRCDDQTHFSIQGSNIPRLHKDDSYLHLGIPTGFTMGRSADDTIDGILSDIKLVDNSCLAPWQKIDCVNTFLTSRLTFHLTLGKVQKKKLSHLDKVIKRCVKKWMNLPQRASPEVLYMPHAQGGANITPCNILADVAQVNHAHSLLHSRDPTVAALALKTLQVVVEKRIRRPPTDADLCTYLAGSMDNEFGCDPYDVPSTWTRLRMATRRLKKRLDIEWHPDTKGTLTLSINGNPVKRPTVMKSISTAVKATYLQSLLNKPDQGKAFKVTAANFNSNHFLRGGSFTRFADWRFIHRARLSVVPLRGLRRFGNASQNCRRCQRHRETLAHVLNHCPPNLSTITKRHNAILDRLNNAFNHRNLTTYINQQIPGFESNCRPDLVVLNQNPKTATIVDVATPFENGADAFDRARAEKIRKYEELANHFRRQGYDTYIDAFVVGALGGYDTANDSVLQRLGVSRSYAKLMRKLMVSDCIRYSRDIYANHLGYRN

SEQ ID NO: 18522 - protein, 1172 aa, Centruroides sculpturatus
MATRSDLANVTLLVPLRPPYHCPACLPVYRDYVDHGGLSRHLRRVHGGHLNFECRVCHVQSEKLKEIKLHQARSTNCAGALPSMSPDHTCRDPKPRGRIPTGARRRNRSKDYGLDEAYLASQSATNNEVSASHHLPPESPPAVDPVQVPPASVSPANTTCTPPRNNDDPNQPPEPATSPSSPPLIRRPRRRTRQRRRRTSSSSTASPTTTGPSTLEPPPDEPTTSVEDIHPLPPPTVSIPEEPPPESDITNTNAEPPAWVIAWRDRFDCAQDEDMLEVMVNDLTSLAQDMMPQQQRQHHRPRQNRPQRSQQPARRRYNALEASRIQRLFRANKRKAFEEVTRGASRYCQINKTVLEDHFSRVNGLRDVPQEPLTDLLPPAPQPSTNDPLCATFTPAEVAKRLTKCHNTAPGPDTIKYYAWRRLDPDGYILAALFNAVQRTGHVPKSWKTSTTILIHKKGNHDEVSNWRPIALANTLGKIYSACIANRLLQWCDSNNTISTMQKGFMRFEGCSEHSFILQSTIQSARRKNKECHVAWLDLSNAFGSVPHATILTCLKWCGLSSTSIDCVMDLLTNCHTRIRTSSGYTDPIPIQAGVKQGCPLSPILFNLVVEPALRLVHSLKKGYLLHNHDISALAYADDITVVSSSREGLQSQLDTLSRWAQHSGLSFNPSKCATLSVVGKYHCDDNSHFTIQGANIPQLSKDDHYLHLGVPTGLTLGRSADAVIDGIIMDLKHVDNSCLAAWQKIECVSTFLTSRLTFYLTLGKVHKKRLTHLDNTIKRCVKRWMNLPQQASPELLYMPHDQGGANITPCNILADVAQVSHAVHLLHSRDSTVTTLALETLKLVVEKRIKRPPSDADLCTYLAGSTEHEFGNDPYDVPSVWTRLRMVTRRLKSRVHIDWHPSGDGNLIPSVNGRPITVLNASKTISAAVRCSFLNQLLKKPDQGKAFRLTATNSNSNHFLREGNFTRFADWRFIHRARLSVVPLRGLRRFGNGSQTCRRCQRHRETLAHVVNHCPPNFRLITQRHNAILDRLKKAFSHKDLTIYVNQRIPEFPSNCRPDLVVINQQPKTATIVDVAIPFENGTDAFSIARAEKTSKYAELANFFKERGYDTFLDAFVVGSLGGYDATNDGVLQRLGVNRNYAKLMRKLMVSDCIRWSRDIYANHLGYNQRN

SEQ ID NO: 18523 - protein, 1183 aa, Centruroides sculpturatus
MATTGDCTDVTLLVPLRPPYYCPHCMPCYRDYVDHGGLSRHLRRGHRAKLNFECRACGVRSDKLKEIKLHQAKSASCSSQLPTISPNSSRDPKQRLRMPANPLGPRARRSTRRHDAACPTPQDSSCVDTDRSPPPSPTNDQVTNSSPCTNDTSVTPRGASDSTTPPLIRRPRRRRHRRSSTQDPTADAASAILPNTNASVSTSLTTDVTPSSEPATQPPAAVDSTCQPAATSTRQPAATTNPDDQPAAPVANQPAVDTNAELPQWVTAWCERFNCALDEDMLEVMVSDLTCLAQSMSPQQRTQANSYQRQPRRPTNQRSNTNRPQRYNAAEASRVQRLYRANKRKAFEEITRGTGRFCQIGKSALTDHFNAINSQPSADLGPTSDQLPPPLQPTSDDPLNCVFTPNEVSTRLNKCHNTAPGPDGVRYYTWRRLDPQGHILASLFNAVHRTGAIPSAWRTSTTILLHKKGSRDDVRNWRPIALANTLGKIYAACIANRLLRWCEENNTISTAQKGFMRFEGCSEHTFVLQSIIQDARRRNKECHIAWLDLANAFGSVPHSTILACLKWCGLGPHSIYRIRQLLTGCHTRIRSCTGLTDPIPILAGVKQGCPLSPILFNIVVEPALRLLSNLQVGYPLHGHSVSALAYADDITIASATRSGLQSQLDLLSSWAQYSGLSFNAAKCATLSVADKYHCSSSSSSFKVQEARIPKLKKEDHYSHLGIPTGFTVGTTAESVIDGIHTDLRLVDTSCLAPWQKIDCVNTFLLPRLTFHLTLGNTPKKRLNDLDKAVKRCIKRWMHLPQRASPEIVYMPNCQGGANVTPCGILADIAQVSHATNLFLSRDPTISNLATKTLEKVVEKRIRRKPTGQDLCTYLTGSMENEFGTDPYDIPSLWTRLRMATRRLRNRINLNWHPNEDGTLTPSVDGKLINKPTAFNTLSTAVKTTFLGSLLRKPDQGKVFKLTATNKNSNHFLHDGNYIRFADWRFIHRARLSVVPLRGLRRFGNSTQQCRRCQRHRETLAHVINHCPPNLSQITTRHNAILNRLINAIDRKNLRIYTNQQIPDFHSTCRPDLVVINNNPKTATIVDIATPFENGEDAFNRAREEKIRKYSDLAAHYKHKGYDTYIDAFIVGALGGYDAANEGVIQRLGISRNYAKLMRRLMVSDCIKASRDIYTNHLGPRYQN

SEQ ID NO: 18524 - protein, 1186 aa, Centruroides sculpturatus
MASTGDCTEVTLLVPLRPPYHCPPCMPYYRDYVDHGGLARHLRRGHRGKLNFECRACDKRSDKLKEIKLHQSKSTSCSSQIPTISPNSTRDPKQRQRVPVDPTRLRPYRSTRRRNAACPAPQDSSCIDADHSPPLSPTNNQVANPTPGQSSSLACPDDTSVTPRDTGSDITPPLIRRPRRRRHRRPSTQVPAAVTGSGTPPGTNTTTNASPTVDATPSNEPATQPPAAVDPICQPVTTTYSDNQPATMAASPDASQPAASTTASPPQWVTAWCERFDCAIDEDMLEVMVNDLTYLAQRMSPRQPTQTNNYQRQPRHPTGQRNNANRPRRYNAAEASRVQRLYRANKRKAFEEITRGTSRFCQIGKSALTDHFNAINSQPSGDSGPTSDQLPPPLQPTSDDPLNCTFTPVEVSSKLAKCHNTAPGPDGVRYYTWRRLDPQGHILALLFNAVHRIGAIPSAWRTSTTILLHKKGSHDDVRNWRPIALANTLGKIYAACIANRLLRWCEENNTISTAQKGFMRFEGCSEHTFVLQSIIQDARRRNKECHVAWLDLANAFGSVPHSTILSCLKWCVLGPQSIYRIQQLLSGCHTHICSCTGLTDPIPILAGVKQGCPLSPILFNIVVEPALRLLSGLQVGYSLHGNSVSALAYADDITIAGATRSGLQSQLDLLSSWAQHSGLSFNATKCATLSVANKYHCSNSSSSFKIQEACIPQLKKEDHYSHLGIPTGFTVGTTAESVIDGIHKDLRLVDTSCLAPWQKIDCVNTFLLPRLTFHLTLGNTPKKRLNDLDKTVKRCIKRWMHLPQRASPEIIYMPNCQGGANVTPCGILADIAQVSHATNLFLSRDPTISNLATKTLEKVVEKHIRRKPTGQDLCTYLTGSMENEFGSDPYDVPSLWTRLRMATRRLRNRIDLNWHPNEDGTLTPSIDGKPINKPTAFSIISTAVKTTFLGSLLRKPDQGKVFKLTATNKDSNHFLHDGNYIRFADWRFIHRARLSVVPLRGLRRFGNTTQRCRRCQRHRETLAHVINHCPPNLSQITKRHNAILNRLINAIDRRNLRIYTNQQIPDFHSTCRPDLVVINNNPKTATIVDIATPFENDEDAFNRAREEKIRKYNDLAAHYRHKGYDTYIDAFIVGALGGYDAANEGVIQRLGISRNYAKLMRRLMVSDCVKASRDIYTNHLGPRYQN

SEQ ID NO: 18525 - protein, 1177 aa, Centruroides sculpturatus
MATASDCTEVTLLVPLRPPYQCLPCMPCYRDYVDHGGLARHLRRGHRGKLSFECRACGKRSDKLKEIKLHQSKSASCSSQIPAISPNSTRDPKQRQRLPADPTRPRPRRSTRRQTAACPAPQDSDRSPPLSPSNDRAASCTPGQPSPQSRLDDTSVTPCDTSSCATPPLIRRPRRHRRRSTHGPTVVADSSTPTRADPPASTNIVADVIPEEEPATYPPAPVDTCCQPAQSATSQPTSETTPPDANQLTASATTEPPQWVTAWCERFNCALDEDMLEVMVGDLTHLAQSMSPQQRTRTNYHQRQPRQPTAQRSNYNRPRRYNAAEASRMQRLYRANKRKAFEEITRGTGRYCQIGKSALTDHFNTVNSNSSTCPGISSDQLPPPLQPTSDDPLNSTFTPVEVSTRLSKCHNTAPGPDGVRYYTWRRLDPQGHILAALFNTVHRIGATPAAWRTSTTILLHKKGAQDDIRNWRPIALANTLGKIYAACIANRLLRWCEENNTISTAQKGFMRFEGCSEHTFVLQSIIQDARRKNRECHVAWLDLTNAFGSVPHATIFACLKWCGLGQQSIHRIEQLLTGCHTRIRSCSGLTDPIPILAGVKQGCPLSPILFNIVVEPALRLLSNLQVGYSLHGHSISALAYADDITVASATRSGLQSQLDLLSSWARNSGLSFNAAKCATLSVADKYHCSNSSSGFKIQEARIPQLKKEDHYLHLGIPTGFTIGTTAETVIDGIHKDLRSVDTSCLAPWQKIDCVNTFLLPRLTFHLTLGNTPKRRLNDLDKTIKRCIKRWMHLPQRASPELVYMPNCQGGANVTPCGILADVAQVSHATNLFLSRDSTISSLATKTLELVVEKRIRRKPTGQDLCTYLSGSMENEFGSDPYDIPSLWTRLRMATRRLRNRINLNWHPNEDGTIIPSIDGELVKKPTAVNTISTAVKTTFLSSLLRKPDQGKVFKLTATNKNSNHFLHDGNYIRFADWRFIHRARLSVVPLRGLRRFGNASQQCRRCQRHRETLAHVINHCPPNLSQITKRHNAILDRLINAIDRKNLRIFTNQQIPDFHSACRPDLVVLNNSPKTATIIDIATPFENGEDAFNRAREEKVRKYEDLATHYRRQGYDTYIDAFIVGALGGYDAANEGVIQRLGISRNYAKLMRRLMVSDCIKASRDIYTSHLGPRYQN

SEQ ID NO: 18526 - protein, 999 aa, Centruroides sculpturatus
MQDPATDTGSGTPPGINTTTIASPTVDATPPNEPATQPPAAVDPLCQPVTTAYPDNQPATTVASPDASQPVASTTAKPPQWVTAWCERFDCAIDEDMLEVMVNDLTYLAQSMSPRQPAQTNNYQRQPRHPTGQRSNTNRPRRYNAAEARRVQRLYRANKRKAFEEITRGTNRFCQIGKSALTDHFNAINSQPSVDSGPTSDQLPPPLQPTSDDPLNCTFTPVEVSTRLAKCHNTALGPDGIRYYTWRRLDPQGYILASLFNAVHRIGAIPSAWRTSTTILLHKKGSHDDIRNWRPIALANTLGKIYAACIANRLLRWCEENNTISTAQKGFMRFEGCSEHTFVLQSIIQDARRRNKECHIAWLDLANAFGSVPHSTILSCLKWCGLSPQSIHRIQQLLTGCHTRIRSCTGLTDPIPILAGVKQGCPLSPILFNIVVEPALRLLSSLQVGYPLHGTSVSALAYADDITIASATRSGLQSQLDLLSSWAQYSGLSFNATKCATLSVANKYHCSNSSSSFKIQEACIPQLKKEDHYSHLGIPTGFTVCTTAESVIDGIHKDLRLVDTSCLAPWQKIDCVNTFLLPRLTFHLTLGNTPKKRLNDLDKTIKRCIKRWMHLPQRASPEIIYMPNCQGGANVTPCGILADIAQVSHATNLFLSRDPTISNLATKTLERVVEKRIRRRPTGQDLCTYLSGSMENEFGSDPYDVPSLWTRLRMATRRLRNRIDLNWHPNEDGTLTPSIDGKPINKPMVFSILSTAVKTTFLGSLLRKPDQGKVFKLTATNKDSNHFLHDGNYIRFADWRFIHRARLSVVPLRGLRRFGNTTQQCRRCQRHRETLAHVINHCPPNLSQITKRHNAILNRLINAIDRRNLRIYTNQQIPDFHSTCRPDLVVINNNPKTATIVDIATPFENGEDAFNRAREEKIRKYGDLAAHYRHKGYDTYIDAFIVGALGGYDAANEGVIQRLGISRNYAKLMRRLMVSDCIKASRDIYTNHLGPRYQN

SEQ ID NO: 18527 - protein, 852 aa, Centruroides sculpturatus
MLEVMVDDLTNLAQSMAPQQHPQRSIHQHQRHPHHPRPQAQGNTRRQQRYNAAEASRIQRLYRANKHKAFEEITRGPSRYCNIGESTLINHFTNTSGRRSVPQDQLAASLPQRPQPTTSNPLCGEFTPAKVAKRLAKCRNTAPGPDGVRYYIWKRLDPQGHILSALFNAVQRIGATPSTWKTSTTILLHKKGDQGNINNWRPIALANTLGKVYSACIASRLLRWCEENNIISAAQKGFMRYDGCSEHTFTLQSAIQNTRRKNHGCHVAWLDLANAFGSVPHDTIYTCLEWCGLDESSIHCIKALLDGCNTRIRSTTGLTTPIPILAGVKQGCPLSPILFNIVVEPALRLISDLKLGYHLHNQSISVLAYADDITIISGTAKGLQTQLDLLSTWPQNCGLTFKPAKCATLSIASKYRCDEDRHFSIQDTTIPHLKKDDHYHHLGIPTGFTVGCSAETVIDGILTNLKHVDSSRLAPWQKIDCVSTFLISRLTFYLILGSVQKKSLGKLDKSIKRYVKKWMYLPQRASPEIIAMPHAQGGANITPCGILAYVAQVSHAINLLHSRDPVVAALAGNTLRLVVEKRIKRPPSDDDVCTYLSGSMENEFGLDPYDIPSVWTRLRMATHRLKKYIDLVWQPNADGTFIPSVNEKPLQKATAMKFLSDAVKATLRKPDQGKTYRLIARNANSNHFLHDGSFTRFADWRFVHRARLRVVPLRGLQRFGNASQNCRRCQRHCETLAHVVNHCPPNFSLITKRHNSILNRLYNAIDRRNLTVFTNQRIPDYPGTCCPDLVIVNSNPKTATIVDVATPFENGEDAFDRARNEKVSKYRPGELLQTQSLRYVRRRLHCWRPWRL

SEQ ID NO: 18528 - protein, 898 aa, Centruroides sculpturatus
MLETMIEDLTNLARGMAPQNHRQQPRFSRPRPPRSRNGGRHNNSNVAEACRIQHLYRANKHKAFEKITRGTSRFCQISSSALVEHFSNTNGLCHTPQKPLNDILPPALQPSTNNPLCGTFTPAEVAKRLSKCHNTAPGPDGIRYYIWRRLDPQGHILAAVFNAVQRIGFVPSGWKTSTTILLHKKGDVNDVNNWRPIALANTLGKIYSACLASRLLSWCEANNIISAAQKGFMPFQGCSEHTFVLQSIIQNARRKNSECHVAWLDLRNAFGSVPHSTIYTCLKWCGLGEPSIECVRGLLEGCQTHIRSSTGLTDPILVAAGVKQGCPLSPILFNLVIEPALRLVSNLQQGYHLHGLDISSLAYADDITVISGSAKGLQKQLDLLTSWAQHSGLAFNPTKCATLSVASKYRCAEGPNFCIQSSSIPRLNKDDSYLHLGIPTGFTLGSSANSTIDQILTDIKRIDSSRLAPWQKIDCVNTFLTSRLTFHLTLGKVQKKSLSLLDKNIKRYVKRWLNLPQRASPEIVYMPHAQGGVNVTPCNILADVAQVSHAINILHSKDPVVATIAAKTLQQVVEKRIKRPPSEADLCTYLAGSMDSEFGCDPYDIPSTWTRLRMATRRLKKRINIEWHPNGSGTLIPSINDAPIRSTNTAMKTISSAVKATFLHSLLVKPDQGKAYKITASNTNSNHFLQDGNFTRFADWRFIHRARLSVVPLRGLRRFGNASQTCRRCQRQRETLAHVINHCPPNFRLITKCHNAILDRLNNTFDHSGLTVYVNQRIPDFPDNCRPDLVVLNQNPRTATIIDVATPFENGADAFVRAREDKVQKYEDLAAHFRRRGYDTYIDAFIAGALGGYDTANDAVLQRLGVRRNYAKLMRKLMVSDCIRWSRDIYTSHLGHQH

SEQ ID NO: 18529 - protein, 1179 aa, Centruroides sculpturatus
MASVSELANVTLLVPLRPPYHCPACLPVYRDYVDHGGLSRHLRRVHGGSLSFECRICHVQSEKLKEIKLHQARSTECSSQLPSMSPVQSSRDPKQRCRIPIDRNNGRRKKSYGLDETYVASQNATSSEARSSPRRLPSSQPGPTATQEPPTSCPTTTLTPSPATQALHLSPAHAESDASPPPLVRRPRRRRHRKSSSTTSPSASSPVVTAVSLASPSPANDPTATITTSNDPPPSLPAPVLCDDHLPGPPLEPAPASDSSPDPPSWVIAWRDRFDCAVDEDMLETMIEDLTNLARGMTPQNHRQQPRFSRPRPPRSRNGGRHNNPNVAEACRIQRLYRANKHKAFEEITRGTSRFCQISSSALVEHFSNTNGLCHTPQKPLDDILPPALQPSTNNPLRGTFTPAEVAKRLSKCHNTAPGPDGIRYYIWRRLDPQGHILAAVFNAVQRIGFVPSGWKTSTTILLHKKGDVNDVNNWRPIALANTLGKIYSACLASRLLSWCEANNIISAAQKGFMPFQGCSEHTFVLQSIIQNARRKNSECHVAWLDLRNAFGSVPHSTIYTCLKWCGLGEPSIECVRGLLEGCQTHIRSSTGLTDPILVAAGVKQGCPLSPILFNLVIEPALRLVSNLQQGYHLHGLDISSLAYADDITVISGSAKGLQKQLDLLTSWAQHSGLAFNPTKCATLSVASKYRCAEGPNFCIQSSSIPRLNKDDSYLHLGIPTGFTLGSSANSTIDQILTDIKRIDSSRLAPWQKIDCVNTFLTSRLTFHLTLGKVQKKSLSLLDKHIKRYVKRWLNLPQRVSPEIVYMPHAQGGANVTPCNILADVAQVSHAINILHSKDPVVATIAAKTLQQVVEKRIKRPPSEADLCTYLAGSMDSEFGCDPYDIPSTWTRLRMATRRLKKRINIEWHPNGSGTLIPSINDAPIRSTNTAMKTISSAVKATFLHSLLVKPDQGKAYKITASNTNSNHFLQDGNFTRFADWRFIHRARLSVVPLRGLRRFGNASQTCRRCQRQRETLAHVINHCPPNFRLITKRHNAILDRLNNTFDHSGLTVYVNQRIPDFPDNCRPDLVVLNQNPKTATIIDVATPFENGADAFVRAREDKVQKYEDLAAHFRRRGYDTYIDGFIVGALGGYDTANDAVLQRLGVRRNYAKLMRKLMVSDCIRWSRDIYTSHLGYQH

SEQ ID NO: 18530 - protein, 998 aa, Glossina brevipalpis
MLSISQSDLACRVCRRTFTTKTGVGVHMSRAHPNEHDVAKIRIDIKSRWSEEEEALLAKKEAELTTAGVKFLNKALAPLFPSRSLEAIKKARQKASYRQRVEKYIELIAESDQDRDKVLPESDIRNPPSPLDNVETSEAICEDIRLRELMAMTINDNESFRTNELKLLIRNAPVCGKAETLIGLLNYIEKILPIRTQMGHSIKTTNRNEREKSRRKRRRQEYARTQRNWHKHQGRCIKEILDGPTDTIKPPEHIMVPFWRTIMENDCSSSPILDQQPQNLEGIWSQISPIEIERARLEKKTSPGLDGISSGQLRAIPADILSVVFNIIMWCGKMPNRFCKTKTIFIPKKSLAKDPGDFRPITIPSVIVRQLHSIIAKRIAMVLKLDPRQRAFQPTDGTGDNAVLLDIILRSIKAKFHCCYMASLDVSKAFDSVSHNTIIGALRSCGFPEEFVLYLEEFYKSANTVLLGDGWASSVKPKRGVKQGDPLSPIIFNIIIDKLLKMLPNEVGVRVGDSSFNSLAFADDLILFASTPSGLQLLLDTTNEFLKQCGLCLNTAKCITISIKGQPKQKNSVVESRKFKVEQTNIPALKRTDEWKYLGISFTADGRCKIEPQNDILPKLLRLTKAALKPQQRLHALRTVLIPQLYHKITLGNVRISCLNKLDKTIRSYVRRWLALPHDITTAFYHAPITGGGLGIPCMRWYAPLIRQNRLKSVTLPNNTGVKEINDFISKEIRITELRLQNRENNLSSLADIDCYFNRRLYNSVDGAGLREAGNHIQAHRWLREPTRMLSGKDFIECIRVRINALPSRSRTTRGRSNINRMCRAGCQVPETSYHTIQVCHRTSAARIERHNSVAKYVTKKLKEKGYTVLEEKHLKTSEGLRKPDILALKNNEAIILDAQVVSDSTSLDIAHRRKKAYYNTVGVKNQINTELQHNVTTVSTIILSWRGIWSKESINDLIKLKILNKSDSAPISTRALIGSTRCFRIFNNSTTYRQGIG

SEQ ID NO: 18531 - protein, 1385 aa, Laupala kohalensis
MPVIALPRWDALRREEENIRCADGTLDAHTVVATAPRREQGVEGNTHAHPAAAARARAAERATSARAGVLARASVARVARTGEAAATCNGDGLTPPAPNAAVADSSIDEVPSHRGAPAVPVQPDAVRPPANAMLSVTALSPAADARPLAALPQRDRPARVRANAPQRCANAAQRHSNATQQRDNAAQQRTNALQRKPSAGGPLLTASARRAVAAAARRAARAGTGSVETAAATAVAQAAELGPSAHTPEVAERPATTATSQELDELTEQLRRLCGASPTEQAASELEEAYSELIKCFQTSVHLPPVNEERRNVGERRDKDNPEYIRSLYKRNPRRAMRVIMGDDGARCPVPREQVEAHFRATCETPPPSDLDGMYAAVTDRPTVQDGPITAEEIMKRLRMATNSAPGEDRLTYSHLRSADPDGRVLAALFNCVRHLRRAPAAWKRSRTCLIFKGGEASDIGNWRPIALMSTLAKLYAGVWASRFSAWAERNGVFSAAQKGFRPFDGVLEHNFMLQNSIGHARRHRKDLCVAFLDLANAFGSVPHDAILAAAEAAGTGKAFLEIVGDMYAGTTTTILAGDGATSPISMSRGVRQGCPLSAHLFNLVVDAALREIEVAAPQQPSVLAYADDIVVLAETPTDLQERINKVADVLQRVGVRAKPSKCRSIHLVLGGLRRTTFTVDGRPMEALDFAQSARYLGKPVGYQLAPTWEDVRRVQQAAYRIVDAPLHPWQQLSTLKTFLLPSLYFPVRMGDFSKTQMSRLDATLRPPLKHLLNLPQRATSHYLYGSRDAGAVGFYEMAAETDIWAVDVGFKILTSSDPHVRSSATAALAEEVRHCLATVETTPQLLGAYLSGEATERFPVVSSWWSRTRKASRRLGVAWRFSEDEGGESLPSLILPDPSEFRRILSTATTIEPPAAVAVTATDDNNAAAAILTNSAEAHASVEAHASMEAPPAAAAADTLVAAIDMAITRSGTAAPEATSFATAFSAALAAAADVVTANPMSAGEEAAAADRAAGVSAAAAGDDAAAAGRDAVSHAEADSATRPSTADADAQQIAPERNITCKQRHLVVKRLRQLCQQLHNVKWQQCSDQGRSAEALSRSGHTSSHFMEGGCEYKTWRFAHCARVNLLRGLRNKVYDNADPSAVACRNGCLDATGAPMKETLAHVLNNCLAHGTQWTLRHNQIVAAIKGAALGSGHHVLGESRAFTADQLRPDLVVGKGNNIIIFEVSVPFAGRGVLDTVRAEKQEKYDILRAHFLGLGYLQAEVVPVVIGSLGEWTPENDAALRKICSNKRRRKALSEKMVLDVLNASRSIFNKHIGELGLADPEFLRRGRGAATCRAPGLPTITEEALGHKENEDAGEEEENTLEELTIEPPSSLSCIPITN

SEQ ID NO: 18532 - protein, 1059 aa, Diploscapter coronatus
MSIIDEVEAVGNIRQRRDESESIEEESPSETFRRHYKLASRGVRRRPIEKPNRTPKQSLIIEINGIATGFLENLERIARKGRAILLNNVAYATAATISEIANRPVNDRNRTRTVYLEALSERAKVLERLVHQVTEALRNRGEGRRRNILKSIRTRLGYDYKSAEEARADLRDRWFCAVEELKVAKQEGVRVAERRKGAKLTLRPKNTDPVPLIEIRKYWESIIGKEKPLVVGRELEAWATEMNNSARGTHSTVTLNENEWNEIFRKVKPWRATGPDGIHAFWWKAIPILRSKTEWFFNRCLDDPKSHIQPWMCEGMTTLLKKDDKGGNGPNNFRPIAGLNTFYKIITAAIAKITLREVGDNLPKEQLAMAKDVWGCTHAHIIDQAVIQNANRYKKPLCMLWVDMCKAYDSLSRGAIKWTLKKWGVSRNVRWMTSALMEHNAVRFVGSHNGKRVFSDRLEVKRGVMQGDTLSPLLYVLAMAPISHWIRNNIERYVVQNSDEPIGVSHTFYMDDLKVYTKSVIQLRRCTLGLCKIAGQMGLGINPQKSAIKLMNTSNNRINRIKKIREIGNRTYKYLGVEQNDLVEFKRSWENAEAKAIKQIQNIVNTRLTMRQKVAAVNAQCMAKMAYIAGSVIFGRGRYNCTTALADKLDTKIRQILRQKKSPGSDNKLRDENTCTGRIYANQANGGIGLKSVRFAIERAIVYTASYTAMHPDLKQIREYMRKQMASSRRTVLSDFNKIIEQYDLQGDLMLDEKKSRFQGREYSHHTKLAAAVSRQMRMKVEHQALEEWRSKPVAGLIARSENICQIDSYLWLKKGQISFDVARTALGTQEGSLYTNSNAAKMGKARSAMCRHCKVNRETPEHIVSCCPFQRHTGYVERHNAVAKVIYKAMAKQYGIDVRVRNPPKVVNKDGIELRWDQNIHVSTSIRYTKPDIVIIDKVSRKAHLIEIGVSWHERLRTQQLRKLYKYERNSTLDENTTLDKWVAGPNLVAAMKSNLKLDATVYPIVVGTCGEVTPECREQLTRLLPKSEHNRLIERLERVAILGTHMIVKRHLARDGS

SEQ ID NO: 18533 - protein, 835 aa, Schmidtea mediterranea
MTNILHRETPILSPEYRSHTKIDAEEMERNFSQLDTSSSPGNDKITYADWRIMDPDLEYLKELFNQIIKNEQSPMIWKTFRTKLIIKPGKEHAPHEVSSWRPLAILDTAYRFFATIINNRLLSWMATNNLLSGNQKAVGTPDGCAEHNTVISLAKEWAIRNGSDINIVWLDLADAFGSIPHNLIWHTLSRLKLNNSTISLIKEMYTDCFSIYECENKKTKQIKVTNGVKQGCPMSMTIFSLYIDFIIKNILIDHPLIINKHNISIMAYADDIVLISKTRTQMREMIKDIIKYIDMATLKFRPSKCGYFQLKRNHTDTSLKLYNENIPIIGENNIYKYLGVDFGQKGKHSIDDTLEIAIKDTEKLFNSDLHPTQKIQAYKTYIHSRLIFIFRNCHINHMILDSNRNKIVQHREKQMGFDQKIKRKIKDTLQDIHQNINNNFIYANIKMGGLGVVPSIDEYFMQSIAHLIKILNSTDKKMREFIIKELINITQGRFPNQTSDIDLSLKWLNAEIKGEKYVHKTIFSKFCNSIRRLNEKFNIIIKITLVEERFELEIKGNNFATTIDIDSLKETSNILHDLTSERYAEQWYLMTCQGHIAKTIVNNRQSAYLIKHNLLNDQQFYFLIKARNNMLSLNYNTHRVKESANTLCRLCNKEPETQAHIFNHCTQTCNARRNKHNNVMEKASEYLISKGFHVDVEKPPPGIVTRLRPDLIIKSKRNKLIHILDIKVPYDHLINFESAKEENYKKYKDLSLEIGKANNCHTTVSALVVGTLGSWDSGNNSTLAKIGLNKTEVKKLAKICMTTAVISSYRIYMDHVTNWINNISTQKLMSQALSA

SEQ ID NO: 18534 - protein, 1096 aa, Schmidtea mediterranea
MLTYATLPTTIFVDSFIGKAFVSKNFKTFFSSFPFHKYPNWNDLLWPLNLEKNLWVLFYMNKTKRIATFLDPTCENSTEKHHSLTESIANALTNLQNIIDKIPIKITEISYPQCPLIKDSGFYICHFASCLIKNLNITLPNIGEIKEKLNKTIIKIINNKKDVTDITKYKPFINDLITQIRDNCITPDDSLRELYRIHEATNPERYKTKHAVPNFLNNKDRNKLVFELRQGFDLRQKVTIGRILNPLSSIRTTPTQSDLINNFSKEPKHMTNILHKETPILSPEYRSHTKIEDEEMKKAYSQLDTSSSPGSDKITYSDWRKMDPDFEYLTGLFNQIIRTGRSPTTWKTFRTKLIIKPGKEHSPHEVSSWRPLAILDTAYRFFASIINNRLLSWIATNNLLSRNQKAVGTPDGCAEHNTVISLAKEWAVRNGSDINIVWLDLADAFGSIPHNLIWHTLSRLKLNKQTINLIKEMYTDCYSIYECEDKKTKEIKVNNGVKQGCPMSMTLFSLSIDFILRNILLDHPLIINNYNISIMAYADDIVLISKNRTEMRSMLKDITKYTEMATLKFRPNKCGYFQLKRNHTDPSLKLYDENIPIIGENNLYKYLGVDFGQKGKHSIDDTLDLALNDTEKLFNSDLHPAQKIQAYKTHIHSRLVFIFRNCHVNHMILDSNRNKIVQHREKQLGFDQKIKRKMKDALQDIHQNLNNNFLYANIKMGGLGIVPSIDEYLIQSIAHLIKILNSRDTEMKKFIIKELIVITQNRFPNQIADIDLSLRWLNAEIKGEKYVPKTIFSKFCNSIRRINEKFNIIIKITTVKERFELEIMGKNFKTTIDIDSLKETSNIIHDLTSEWYADQWFIMTCQGHIAKTIGGNRQSAYLIKHSALNDQQFYFLIKARNNMLSLNYNTHRVKESANTSCRLCNKEPETQAHIFNHCTQTCNARRNKHNNVMEKASEYLISKGFSVDVEKPPPGIETRLRPDLIIKSKRNNLIHILDIKVPYDQLINFDNAKEENYKKYKDLALEIGKANNCHTTVTALVVGTLGSWDSENDRTLTKIGLNRTEIKKLAKICMTTAVISSYRIYMDHVTNRISNIGTQN

SEQ ID NO: 18535 - protein, 1096 aa, Schmidtea mediterranea
MLTYATLPTTIFVDSFIGKAFISKNFKTFFSSFPFHKYPNWNDLLWPLNLEKNLWVLFYMNKTKRIATFLDPTCENSTEKHHSLTESIANVLTNLQNIIDKIPIKITELSYPQCLLVKDSGFYICHFASCLINNSNITLPNIGEIKEKLNKTIIKIINNKKDVTDITKYKPFINDLITQIRDNYITPDDSLKELYRIHEATNPERYKTKHAVPNFLNNKDRNKLVFELRQGFDLRQKVTIGRILNPLSSIRTTPTQSDLINNFSKEPKHMTNILHKETPILSPEYRSHTRIEDEEMKKAYSQLDTSSSPGSDKITYSDWRKMDPDFEYLTELFNQIIKTGRSPTTWKTFKTKMIIKPGKEHSPHEVSSWRPLAILDTAYRFFASIINNRLLSWIATNNLLSRNQKAVGTPDGCAEHNTVISLAKEWAVRNGSDINIVWLDLADAFGSIPHNLIWHTLSRLKLNKQTINLIKEMYTDCYSKYECEDKKTKEIKVNNGVKQGCPMSMTLFSLSIDFILRNILLDHPLVINNYNISIMAYADDIVLISKNRTEMRSMLKDITKYTEMATLKFRPNKCGYFQLKRNHTDPSLKLYDENIPIIGENNLYKYLGVDFGQKGKHSIDDTLDLALNDTEKLFNSDLHPAQKIPAYKTHIHSRLVFIFRNCHVNHMILDSNRNKIVQHREKQLGFDQKIKRKLKDALQDIHQNLNNNFLYANIKMGGLGIVPSIDEYLIQSVAHLIKILNSRDTEMKKFIINELIVITQNRFPNQIADIDLSLRWLNAEIKGEKYGPKTIFSKFCNSIRRINEKFNIIIKITTVKERFELEIIGKNFKTTIDIDSLKETSNIIHDLTSEWYADQWFIMTCQGHIAKTIGGNRQSAYLIKHSTLNDHQFYFLIKARNNMLSLNYNTHRVKENANTSCRLCNKEPETQAHIFNHCTQTCNARRNKHNNVMEKASEYLISKGFSVDIEKPPPGIETRLRPDLIIKSKRNNLIHILDIKVPYDQLINFDNAKEDNYKKYKDLALEIGKPNTCHTTVTALVVGTLGSWDAENDRTLTKIGLNRTEIKKLAKICMTTAVISSYRIYMDHVTNRISNIGTQN

SEQ ID NO: 18536 - protein, 976 aa, Schmidtea mediterranea
MLTYATLPTTIFVDSFIGKAFVSKNFKTFFSSFPFHKYPNWNDLLWPLNLEKNLWVLFYMNKTKRIATFLDPTCENSTEKHHSLTESIANALTNLQNIIDKIPIKITEISYPQCPLIKDSGFYICHFASCLIKNLNITLPNIGEIKEKLNKTIIKIINNKKDVTDITKYKPFINDLITQIRDNCITPDDSLRELYRIHEATNPERYKTKHAVPNFLNNKDRNKLVFELRQGFDLRQKVTIGRILNPLSSIRTTPTQSDLINNFSKEPKHMTNILHKETPILSPEYRSHTKIEDEEMKKAYSQLDTSSSPGSDKITYSDWRKMDPDFEYLTGLFNQIIRTGRSPTTWKTFRTKLIIKPGKEHSPHEVSSWRPLAILDTAYRFFASIINNRLLSWIATNNLLSRNQKAVGTPDGCAEHNTVISLAKEWAVRNGSDINIVWLDLADAFGSIPHNLIWHTLSRLKLNKQTINLIKEMYTDCYSIYECEDKKTKEIKVNNGVKQGCPMSMTLFSLSIDFILRNILLDHPLIINNYNISIMAYADDIVLISKNRTEMRSMLKDITKYTEMATLKFRPNKCGYFQLKRNHTDPSLKLYDENIPIIGENNLYKYLGVDFGQKGKHSIDDTLDLALNDTEKLFNSDLHPAQKIQAYKTHIHSRLVFIFRNCHVNHMILDSNRNKIVQHREKQLGFDQKIKRKMKDALQDIHQNLNNNFLYANIKMGGLGIVPSIDEYLIQSIAHLIKILNSRDTEMKKFIIKELIVITQNRFPNQIADIDLSLRWLNAEIKGEKYVPKTIFSKFCNSIRRINEKFNIIIKITTVKERFELEIMGKNFKTTIDIDSLKETSNIIHDLTSEWYADQWFIMTCQGHIAKTIGGNRQSAYLIKHSALNDQQFYFLIKARNNMLSLNYNTHRVKESANTSCRLCNKEPETQAHIFNHCTQTCNARRNKHNNVMEKASEYLISKGFSVDVEKPPPGIETRL

SEQ ID NO: 18537 - protein, 1096 aa, Schmidtea mediterranea
MLTYATLPTTIFVDSFIGKAFVSNNFKTFFSSFPFHKYPNWNDLLWPLILEKNLWVLFYMNKTKRIATFLDPTCENSIEKHHSLTESIANVLTNLQNIIDKIPIKITELSYPQCLLVKDSGFYICHFASCLINNSNITLPNIGEIKEKLNKTIIKIINNKKDVTDITKYKPFINDLITQIRDNCITPDDSLRELYRIHEATNPERYKTKHAVPNFLNNKDRNKLVFELRRGFDLRQKVTIGRILNPLSSIRTTPTQSDLINNFSKEPKHMTNILHKETPILSPEYRSHTKIEDEEMKKAYSQLDTSSSPGSDKITYSDWRKMDPDFEYLTELFNQIIRTGRSPTTWKTFRTKLIIKPGKEHSPHEVSSWRPLAILDTAYRFFASIINNRLLSWIATNNLLSRNQKAVGTPDGCAEHNTVISLAKEWAVRNGSDINIVWLDLADAFGSIPHNLIWHTLSRLKLNKQTINLFKEMYTDCYSIYECEDKKTKKIKVNNGVKQGCPMSMTLFSLSIDFILRNILLDHPLIINNYNISIMAYADDIVLISKNRTEMRSMLKDITKYTEMATLKFRPNKCGYFQLKRNHTDPSLKLYDENIPIIGENNLYKYLGVDFGQKGKHSIDDTLDLALNDTEKLFNSDLHPAQKIQAYKTHIHSRLVFIFRNCHVNHMILDSNRNKIVQHREKQLGFDQKIKRKMKDALQDIHQNLNNNFLYANIKMGGLGIVPSIDEYLIQSVAHLIKILNSRDTEMKKFIIKELIVITQNRFPNQIADIDLSLRWLNAEIKGEKYVPKTIFSKFCNSIRRINEKFNIIIKITTVKERFELEIMGKNFKTTIDIDSLKETSNIIHDLTSEWYADQWYIMTCQGHIAKTIGGNRQSAYLIKHSALNDQQFYFLIKARNNMLSLNYNTHRVKESANTSCRLCNKEPETQAHIFNHCTQTCNARRNKHNNVMEKASEYLISKGFSVDVEKPPPGIETRLRPDLIIKSKRNNLIHILDIKVPYDQLINFDNAKEENYKKYKDLALEIGKANNCHTTVTALVVGTLGSWDGENDRTLTKIGLNRTEIKKLAKICMTTAVISSYRIYMDHVTNRISNIGTQN

SEQ ID NO: 18538 - protein, 1096 aa, Schmidtea mediterranea
MLTYATLPTTIFVDSFIGKAFVSKNFKTFFLSFPFHKYPNWNDLLWPLNLEKSLWVLFYMNKTKRIATFLDPTCENSTEKHHSLTESIANVLTNLQNIIDKIPIKITEISYPQCPLIKDSGFYICHFASCLIKNSNITLPNIGEIKEKLNKTIIKIINNKKDVTDITKYKPFINDLITQIRDNCITPDDSLRELYRIHEATNPEKYKTKHAVPNFLNNKDRNKLVFELLQGFDLRQKVTIGRILNPLSNIRTTPTQSDLINNFSKEPKHMTNILHKETSILSPEYRSHTKIEDEEMKKAYSQLDTSSSPGSDKITYSDWRKMDPDFEYLTELFNQIIRTGRSPTTWKTFRTKLIIKPGKEHSPHEVSSWRPLAILDTAYRFFASIINNRLLSWIATNNLLSRNQKAVGTPDGCAEHNTVISLAKEWAVRNGSDINIVWLDLADAFGSIPHNLIWHTLSRLKLNKQTINLIKEMYTDCYSIYECEDKKTKEIKVNNGVKQGCPMSMTLFSLSIDFILRNILLDHPLVINNYNISIMAYADDIVLISKNRTEMRSMLKDITKYTEMATLKFRPNKCGYFQLKRNHTDPSLKLYDENIPIIGENNLYKYLGVDFGQKGKHSIDDTLDLALNDTEKLFNSDLHPAQKIQAYKTHIHSRLVFIFRNCHVNHMILDSNRNKIVQHREKQLGFDQKIKRKMKDALQDIHQNLNNNFLYANIKMGGLGIVPSIDEYLIQSIAHLIKILNSRDIEMKKFIIKELIVITQNRFPNQIADIDLSLRWLNAEIKGEKYVHKTIFSKFCNSIRRINEKFNIIIKITTVKERFELEIMGKNFKTTIDIDSLKETSNIIHDLTSEWYADQWYIMTCQGHIAKTIGGNRQSAYLIKHSALNDQQFYFLIKARNNMLSLNYNTHRVKESANTSCRLCNKEPETQAHIFNHCTQTCNARRNKHNNVMEKASEYLISKGFSVDVEKPPPGIETRLRPDLIIKSKRNKLIHILDIKVPYDQLINFDNAKEENYKKYKDLALEIGKANNCHTTVTALVVGTLGSWDGENDRTLTKIGLNRTEIKKLAKICMTTAVISSYRIYMDHVTNRISNIGTQN

SEQ ID NO: 18539 - protein, 825 aa, Schmidtea mediterranea
MTNILHKETPILSPEYRSHTKIEDEEMKKAYSQLDTSSSPGSDKITYSDWRKMDPDFEYLTGLFNQIIRTGRSPTTWKTFRTKLIIKPGKEHSPHEVSSWRPLAILDTAYRFFASIINNRLLSWIATNNLLSRNQKAVGTPDGCAEHNTVISLAKEWAVRNGSDINIVWLDLADAFGSIPHNLIWHTLSRLKLNKQTINLIKEMYTDCYSIYECEDKKTKEIKVNNGVKQGCPMSMTLFSLSIDFILRNILLDHPLIINNYNISIMAYADDIVLISKNRTEMRSMLKDITKYTEMATLKFRPNKCGYFQLKRNHTDPSLKLYDENIPIIGENNLYKYLGVDFGQKGKHSIDDTLDLALNDTEKLFNSDLHPAQKIQAYKTHIHSRLVFIFRNCHVNHMILDSNRNKIVQHREKQLGFDQKIKRKMKDALQDIHQNLNNNFLYANIKMGGLGIVPSIDEYLIQSIAHLIKILNSRDTEMKKFIIKELIVITQNRFPNQIADIDLSLRWLNAEIKGEKYVHKTIFSKFCNSIRRINEKFNIIIKITTVKERFELEIMGKNFKTTIDIDSLKETSNIIHDLTSEWYADQWFIMTCQGHIAKTIGGNRQSAYLIKHSGLNDQQFYFLIKARNNMLSLNYNTHRVKESANTSCRLCNKEPETQAHIFNHCTQTCNARRNKHNNVMEKASEYLISKGFSVDVEKPPPGIETRPDLIIKSKRNNLIHILDIKVPYDQLINFDKAKEENYKKYKDLALEIGKANNCHTTVTALVVGTLGSWDGENDRTLTKIGLNRTEIKKLAKICMTTAVISSYRIYMDHVTNRISNIGTQN

SEQ ID NO: 18540 - protein, 936 aa, Schmidtea mediterranea
MAPESRENLWVLFYMNKTKRIATFLDPTCENSTEKHHSLTESIANVLTNLQNIIDKIPIKITELSYPQCLLVKDSGFYICHFASCLINNSNITLPNIGEIKEKLNKTIIKIINNKKDVTDITKYKPFINDLITQIRDNYITPDDSLGELYRIHEATNPERYKTKHAVPNFLNNKDRNKLVFELRQGFDLRQKVTIGRILNPLSNIRTTPTQPDLINNFSKEPKHMTNILHKETPILSLEYRSHTKIEDEEMKKAYSQLDTSSSPGSDKITYSDWRKMDPDFEYLTGLFNQIIRTGRSPTSWKTFRTKLIIKPGKEHSPHEVSSWRPLAILDTAYRFFASIINNRLLSWIATNNLLSRNQKAVGTPDGCAEHNTVISLAKEWAVRNGSDINIVWLDLADAFGSIPHNLIWHTLSRLKLNKQTINLIKEMYTDCYSIYECEDKKTKEIKVNNGVKQGCPMSMTLFSLSIDFILRNILIDNPLVINNYDISIMAYADDIVLISKNRTEMRSMLKDITKYTEMATLKFRPNKCGYFQLKRNHTDPSLKLYDENIPIIGENNLYKYLGVDFGQKGKHSIDDTLDLALNDTEKLFNSDLHPAQKIQAYKTHIHSRLVFIFRNCHVNHMILDSNRNKIVQHREKQLGFDQKIKRKLKDALQDIHQNLNNNFLYANIKMGGLGIVPSIDEYLIQSVAHLIKILNSRDTEMKKFIINELIVITQNRFPNQIADIDLSLRWLNAEIKGEKYGPKTIFSKFCNSIRRINEKFNIIIKITTVKERFELEIIGKNFKTTIDIDSLKETSNIIHDLTSEWYADQWFIMTCQGHIAKTIGGNRQSAYLIKHSTLNDQQFYFLIKARNNMLSLNYNTHRVKENANTSCRLCNKEPETQAHIFNHCTQTCNARRNKHNNVMEKASEYLISKGFSVDIEKPPLVSKRDYDLTSL

SEQ ID NO: 18541 - protein, 981 aa, Schmidtea mediterranea
MLTYATLPSTIFVDSFIGKAFVSKNFKTFFSSFPFHKYPNWNDLLWPLNLEKNLWVLFYMNKTKRIATFLDPTCETSTEKHHRMTESIANVLTNLQNIIDKIPIKITELSYPQCPLIKDSGFYICHFATCLIKNSNITLPNIGEIKEKLNKTIIKIINNKKDVSDITKYKPFIKDLITQIRDNCIMPDDSLKKLYRIHEATNPKKYKTKHAAPNFLTNKNKNKLIFELRQGFDLRQKVTISRIFNPLSSISTTPTQADLINNFLKEPKHMTNILHKETPILSPEYRSHMKIEDEEMEKAYSQLDTSSSPGNDKITYSDGRKMDPDFEYLTKLFNQIIKNGRSPTTWKTFRTKLIIKPGKEHAPHEVSSWRPLAILDTAYRFFASIINNRLLSWIATNNLLSRNQKAVGTPDGCAEHNTVISLAKEWAVRNGSDINIVWLDLADAFGSIPHNLIWHTLSRLKLNKSTINLIKEMYTDCYSIYECEDKKTKEIKVNNGVKQGFPMSMTLFSLSIDFILRNILLDHPLIINNYNISIMAYADDIVSISKNRTEMRAMLKDITKYTEMITLKFRPNKCGYFQLKRNHTDPSLKLYDENIPIIGENNLYKYLGIDFGQKGKHSIDDTLDLALNDTEKLFNSDLHPAQKIQAYKTHIHSRLVFIFRNCHVNHMILDSNRNKIVQHRETQLGFDQKIKRKLKDTLQDIHQNLNNNFLYANIKMGGLGIVPSIDEYFIQSVAHLIKILNSRDTKMKEFIIRELIAITQSRFPNQTADIDLSLRWLNAEIKGGKYVPKTIFSKFCNSIRRINEKFNIIIKITTVKERFELEITGKNFKTTIDKDSLKETSNIIHDLTSEWYADQWFIMTCQGHVARTIGGNRQSAYLTKHSALNDQQFYFLIKARNNRLSLNYNTHRVKESANTSCRLCNKEPETQAHIFNHCTQTCNARRNKHNNVMEKASEYLISKGFHVDVEKPPPASKRDYDLTSL

SEQ ID NO: 18542 - protein, 1069 aa, Schmidtea mediterranea
MLTYATLPSTIFVDSFIGKAFVSKNFKTFFSSFPFHKYPNWNDLLWPLNLEKNLWVLFYMNKSKRIATFFDPTCENSTEKHHRMTESIANALTNLQNIIDKIPIKITELSYPQCPLTKDSGFYICHFATCLIKNSNITLPNIGEIKEKLNKTIIKIINNKKDVSDIAKYEPFIKDLITQIRDNCIMPDDSLKELYRIHEATNPEKYKTKHAAPNFLSNKNKNKLIFELRQGFDLRQKVTIGRILNPLNSISTTPTQADLINNFLKEPKHMTYILHKETPILSLEYRSHMKIEDEEMEKAYSQLDTSSSPGNDKITYSDWRKMDPEFEYLMELFNQIIKNGRSPTTWKTFRTKLIIKPGKEHAPHEVSSWRPLAILDTAYRFFASIINNRLLSWIATNSLLSRNQKAVGTPDGCAEHNTVISLAKEWAVRNGSDINIVWLDLADAFGSIPHNLIWHTLSRLKLNKQTINLIKEMYTDCYSIYECEDKKTKEIKVNNGVKQGCPMSMTLFSLSIDFILRNILLDHPLIINNHNISIMAYADDIVLISKNRTEMRAMLKDITKYTEMATLKFRPNKCEYFQLKRNHTDPSLKLYDENIPIIGENNLYKYLGVDFGQKGKHSIDDTLDQALNDTEKLFSSDLHPAQKIQAYKTHIHSCLVFIFRNCHVNHMILDSNRNKIVQHMEKQLGFDQKIKRKLKNTLQDIHQNLNNNFLYANIKMGGLGIVPSIDEYFIQSIAHLIKILNSRDTKMKEFIIRELIAITQSRFPNQTADIDLSLRWLNAEIKGEKYVPKTIFSKFCNSIRRINEKFNIIIKITTVKERFEIEITGKNFKTTIDKDSLKETSNIIHDLTSEWYADQSFIMTCQGHVARTIGGNRQSAYLTKHSALNDQQFYFLIKARNNMLSLNYNTHRVKESANTSCRLCNKEPETQAHIFNHYTQTCNARRNKHNNVMEKASEYLISKGFHVDNEKPPPGIETRLQPDLIIKSKKNNLIHILDIKVPYDQLINFDNAKEDNYKKYKDLALEIGKVNNCHTTVSALVIGTLGSWDGENDRTLTKIGLNKTEIKKLAKYA

SEQ ID NO: 18543 - protein, 1104 aa, Schmidtea mediterranea
MLTYATLPSTIFVDSFIGKSFVSKNFETFFSSFPFHKYPNWNDLLWPMNLEKNFWVLFYINKSKHIATFLDPTCENSTLKHHEMTESIKNVLTTLQNIIDKTTIEIRELSYPQCELIKDSGFYICHFATCLVKNQPITLPNIGEIKDKLNETIIKIINNKKDVSDITKYRTFIKDLIIQTKTNNITPDDSLKEFYRIHEATNPKKYKTKHAAPNFLVNKDKKKLVFELRQGFDLRQKVTISRILNPLSSISTTPTHDDLNNNFSKEPKHMTNILHRETPILSPEYRSHTKINAEEMEKNFSQLDTSSSPGNDKITYADWRKMDPDFEYLTELFNQIIKNGRSPTTWKTFRTKLIIKPGKEHAPHEVSSWRPLAILDTAYRFFTSIINNRLLSWIRVNNILSRNQKAVGTPDGCAEHNTVISLAKEWAIRNGSDINIVWLDLADAFGSIPHNLIWHTLSRLKLNNTTTNLIKEMYTDCFSIYECENKNTKQIKVTNGVKQGCPMSMTLFSLSIDFIIKNILIDHPLIINKHIISIMAYADDIVLISKTRTQMREMIKDIVKYTDMATLKFRPSKCGYFQLKRNHTDASLKLYDENIPIIGENNIYKYLGVDFGQKGKHSIDDTLEIAIKDTEKLFNSDLHPAQKLQAYKTYIHSRLVFIFRNCHINHMILDSNRNKIVQHREKQMGFDQKIKRKIKDTLQDIHQNINNNFLYANIKMGGLGIVPSIDEYFIQSIAHLIKILNSTDRKMREFIIKELIDITQGRFPNQTSDIDLSLKWLNAEIKGEKYVHKTIFSKFCNSIRRLNENFNIIIKITLVKERFELVIKGNNFATTIDIDSLKGTSNILHDLTSEWYAEQWFLMTCQGHIAKTIGGNRQSAYLIKHNVLNDQQFYFLIKARNNMLSLNYNTHRVKENANTLCRLCNKETETQAHIFNHCTQTCNARRNKHNNVIEKASEYLISKGFHVDVEKPPPGIETRLRPDLIIKSKRNNLIHILDIKVPYDHLINFENAKEENYKKYKDLSLEIGKANNCNTTVSALVVGTLGSWESGNNNTLAKIGLNKTEVKKLAKICMTTAVISSYRIYMDHVTNRINNISTQKLMPQALSA

SEQ ID NO: 18544 - protein, 1096 aa, Schmidtea mediterranea
MLTYATLPSTIFVDSFIDKAFVSKNFKTFFSSFPFHKYPNWNDLLWPLNLEKNLWVLFYMNKIKRIATFLDPTCENSTEKHHRMTESIANVLTNLQNIIDKIPIKITELSYPQCPLIKDSGFYICHFATCLIKNSNITLPNIGEIKEKLNKTIIKIINNKKDVSDITKYKPFIKDLITQIRDNCIMPDDSLKELYMIHEATNPKKYKTKHTAPNFLTNKNKNKLIFELRQGFDLRQKVTISRIFNPLSSISTTPTQADLINNFLKEPKHMTNILHKETPILSPEYRSHMKIEDEEMEKAYSQLDTSSSPGNDKITYSDWRKMDPDFEYLTELFNQIIKNGRSPTTWKTFRTKLIIKPGKEHAPHEVSSWRPLAILDTAYRFFASIINNRLLSWIATNNLLSRNQKAVGTPDGCAEHNTVISLAKEWAVRNGSDINIVWLDLADAFGSIPHNLIWHTLSRLKLNKPTINLIKEMYTDCYSIYECEDKKTKEIKVNNGVKQGCPMSMTLFSLSIDFILRNILLDHPLIINNYNISIMAYADDIVLISKNRTEMRAMLKDITKYTEMATLKFRPNKCGYFQLKRNHTDPSLKLYDKNIPIIGENNLYKYLGVDFGQKGKHSIDDTLDLALNDTEKLFNSDLHPAQKIQAYKTHIHSRLVFIFRNCHVNHMILDSNRNKIVQHREKQLGFDQKIKRKLKDTLQDIHQNLNNNFLYANIKMGGLGIVPSIDEYFIQSVSHLIKILNSRDTKMKEFIIRELIAITQSRFPNQTANIDLSLRWLNAEIKGEKYVPNTIFSKFCNSIRRINEKFNIIIKITTVKERFELEITGKNFKTTIDKDSLKETSNIIHDLTSEWYADQWFIMTCQGHVARTIGGNRQSAYLTKHSALNDQQFYFLIKARNNMLSLNYNTHRVKESANTSCRLCNKEPETQAHIFNHCTQTCNARRNKHNNVMEKASEYLISKGFHVDIEKPPPGIETRLRPDLIIKSKRNNLIHILDIKVSYDQLINFDNAKEDNYKKYKDLALEIGKVNNCHTTVSALVVGTLGSWDGENDRTLTKIGLNKTEIKKLAKICMTTAVISSYRIYMDHVTNRINNIGTQN

SEQ ID NO: 18545 - protein, 1037 aa, Schmidtea mediterranea
MNKSKRIATFLDPTCENSTEKHHRMIESIANVLTNLQNIIDKIPIKITELSYPQCPLTKDSGFYICHFATCLIKNSNITLPNIGEIKEKLNKTIIKIINNKKDVSDITKYEPFIKDLITQIRDNCIMPDDSLKELYRIHEATNPEKYKTKHAAPNFLSNKNKNKLIFELRQGFDLRQKVTIGRILNSLTSISTTPTQADLINNFLKETKHMTNILHKETPILSPEYRSHMKIEDEEMEKAYSQLDTSSSPGNDKITYSDWRKMDPEFEYLTELFNQIIKNGRSPTTWKTFRTKLIIKPGKEHAPHEVSSWRPLAILDTAYRFFASIINNRLLSWIATNSLLSRNQKAVGTPDGCAEHNTVISLAKEWAVRNGSDINIVWLDLADAFGSIPHNLIWHTLSRLKLNKQTINLIKEMYTDCYSIYECEDKKTKEIKVNNGVKQGCPMSMTLFSLSIDFILRNILLDHPLIINNYNISIMAYADDIVLISKNRTEMRAMLKDITKYTEMATLKFRPNKCGYFQLKRNHTDPSLKLYDENIPIIGENNLYKYLGVDFGQKGKHSIDDTLDLALNDTEKLFNSDLHPAQKIQAYKTHIHSCLVFIFRNCHVNHMILDSNRNKIVQHREKQLGFDQKIKRKLKNTLQDIHQNLNNNFLYANIKMGGLGIVPSIDEYFIQSIAHLIKILNSRDTKMKEFIIRELIAITQSRFPNQTADIDLSLRWLNAEIKGEKYVPKTIFSKFCNSIRRINEKFNIIIKITTVKERFEIEITWKNFKTTIDKDSLKETSNIIHDLTSEWYADQWFIMTCQGHVARTIGGNRQSAYLTKHSALNDQQFYFLIKARNNMLSLNYNTHRVKESANTSCRLCNKEPETQAHIFNHCTQTCNARRNKHNNVMEKASEYLISKGFHVDIEKPPPGIETRLRPDLIIKSKRNNLIHILDIKVPYDQFINFDNAKEDNYKKYKDLALEIGKVNKCHTTVSALVIGTLGSWDGENDRTLTKIGLNKTEIKKLAKICMTTAVISSYRIYMDHVTNRINNIGTQN

SEQ ID NO: 18546 - protein, 827 aa, Schmidtea mediterranea
MTNILHKETPILSPEYRSHTKIEDEEMKKAYSQLDTSSSPGSDKITYSDWRKMDPDFEYLTELFNQIIRTGRSPTTWKTFRTKLIIKPGKEHSPHEVSSWRPLAILDTAYRFFASIINNRLLSWIATNNLLSRNQKAVGTPDGCAEHNTVISLAKEWAVRNGSDINIVWLDLADAFGSIPHNLIWHTLSRLKLNKQTINLFKEMYTDCYSIYECEDKKTKKIKVNNGVKQGCPMSMTLFSLSIDFILRNILLDHPLIINNYNISIMAYADDIVLISKNRTEMRSMLKDITKYTEMATLKFRPNKCGYFQLKRNHTDPSLKLYDENIPIIGENNLYKYLGVDFGQKGKHSIDDTLDLALNDTEKLFNSDLHPAQKIQAYKTHIHSRLVFIFRNCHVNHMILDSNRNKIVQHREKQLGFDQKIKRKMKDALQDIHQNLNNNFLYANIKMGGLGIVPSIDEYLIQSVAHLIKILNSRDTEMKKFIIKELIVITQNRFPNQIADIDLSLRWLNAEIKGEKYVPKTIFSKFCNSIRRINEKFNIIIKITTVKERFELEIMGKNFKTTIDIDSLKETSNIIHDLTSEWYADQWYIMTCQGHIAKTIGGNRQSAYLIKHSALNDQQFYFLIKARNNMLSLNYNTHRVKESANTSCRLCNKEPETQAHIFNHCTQTCNARRNKHNNVMEKASEYLISKGFSVDVEKPPPGIETRLRPDLIIKSKRNNLIHILDIKVPYDQLINFDNAKEENYKKYKDLALEIGKANNCHTTVTALVVGTLGSWDGENDRTLTKIGLNRTEIKKLAKICMTTAVISSYRIYMDHVTNRISNIGTQN

SEQ ID NO: 18547 - protein, 1104 aa, Schmidtea mediterranea
MLTYATLPSTIFVDSFIGKSFVSKNFGTFFSSFPFHKYPNWNDLLWPMNLEKNLWVLFYINKTKHIATFLDPTCENSTLKHHEMTESIKNILTTLQNIIDKTTIDISELSYPQCELTKDSGFYICHFATCLVKNLPITLPNIGEIKNKLNQTITKIINNKKDVSDITKYRTFIKDLVIQTKTNGITPDNSLKEFYRIHEATNPKKFKTKHAAPNFLVNKDKNKLVFELRQGFDLRQKVTISRIINPLSNISTTPSHDDLINNFSKEPKHMTNILHRETPILSPEYRSHTKIDAEEMERNFSQLDTSSSPGNDKITYADSRRMDPDLEYLTELFNQIIKNGQSPMTWKTFRTKFIIKPGKEHAPHEVSSWRPLAILDTAYRFFATIINNRLLSWMVTNNLLSRNQKAVGTPDGCAEHNTVISLAKEWAIRNGSDINIVWLDLADAFGSIPHNLIWHTLSRLNLNNSTISLIKEMYTDCFSIYECENKNTKQIKVTNGVKQGCPMSMTLFSLSIDFIIKNILIDHPLIINKHNISIMAYADDIVLISKTRTHMREMIKEIIKYNDMATLKFRPSKCGYFQLKRNHTDASLKLYNENIPIIGENNIYKYLGVDFGQKGKHSIDDTLEIAIKDTEKLLILTYTQPKKIQAYRTYIHSRLIFTFRNCHINHMILDSNRNKIVQHREKKMGFDQKIKRKIKDTLQGIHQNINNNFIYANIKMGGLGIVLSIDEYFIQSIAHLIKILNPTDKKMREFIIKELINITQGRFPNQTSDIDLSLKWLNAEIKGEKYVHKTIFSKFCNSIRRLNEKFNIIIKITLVEERFELEIKGNNFATTIDIDSLKETSNILHDLTSEWYAEQWYLMTCQGHIAKTIGSNRQSAYLIKHNVLNDQQFYFLIKARNNMLSLNYNTHRVKENANTLCRLCNKEPETQAHIFNHCTQTCNARRNKHNNVMEKASEYLISKGFKVDVEKPPPGVETKLRPDLIIKSKRNNLIHILDIKVPYDHLINFENAKEENYKKYKDLSLEIGKVNNCHTTVTALVVGTLGLWDVENDRTLTKIGLNKTEVKKLAKICMTTAVISSYRIYMDHVTNRINNIGTQKMMPQALSA

SEQ ID NO: 18548 - protein, 827 aa, Schmidtea mediterranea
MTNILHKETPILSLEYRSHTKIEDEEMKKAYSQLDTSSSPGSDKITYSDWRKMDPDFEYLKGLFNQIIRTGRSPTSWKTFRTKLIIKPGKEHSPHEVSSWRPLAIFDTAYRFFASIINNRLLSWIATNNLLSRNQKAVGTPDGCAEHNTVISLAKEWAVRNGSDINIVWLDLADAFGSIPHNLIWHTLSRLKLNKQTINLIKEMYTDCYSIYECEDKKTKEIKVNNGVKQGCPMSMTLFSLSIDFILRNILLDHPLVINNYNISIMAYADDIVLISKNRTEMRSMLKDITKYTEMATLKFRPNKCGYFQLKRNHTDPSLKLYDENIPIIGENNLYKYLGVDFGQKGKHSIDDTLDLALNDTEKLFNSDLHPAQKIQAYKTHIHSRLVFIFRNCHVNHMILDSNRNKIVQHREKQLGFDQKIKRKLKDALQDIHQNLNNNFLYANIKMGGLGIVPSIDEYLIQSVAHLIKILNSRDTEMKKFIINELIVITQNRFPNQIADIDLSLRWLNAEIKGEKYGPKTIFSKFCNSIRRINEKFNIIIKITTVKERFELEIIGKNFKTTIDIDSLKETSNIIHDLTSEWYADQWFIMTCQGHIAKTIGGNRQSAYLIKHSTLNDQQFYFLIKARNNMLSLNYNTHRVKENANTSCRLCNKEPETQAHIFNHCTQTCNARRNKHNNVMEKASEYLISKGFSVDIEKPPPGIETRLRPDLIIKSKRNNLIHILDIKVPYDQLINFDNAKEENYKKYKDLALEIGKANNCHTTVTALVVGTLGSWDAENDRTLTKIGLNRTEIKKLAKICMTTAVISSYRIYMDHVTNRISNIGTQN

SEQ ID NO: 18549 - protein, 1034 aa, Schmidtea mediterranea
MNKTKKSAIIIDPTCENSTIKHKALAESIINTLTNLQNIIEVNTITLNDVQYPKCDLIIHTGLYICHFARCLATNSPITLPIIPELRNQLDHLITKIINNKRNPNDINKYRTFIKDIIIQLDTSHIEPDISLAEMYRVHEAICPQKYKPLHVVPNFLIQKDHKRMIFELRQSFDRKAKASIDKILYPITNISTTPTDDSLISYFESKVKHIDTIIHLDTYIPDPEFSSDMPMTSEDLVTTYSCLDTHSAPGSDKITFSDWRRLDPDFEFLTALFNNILRTGKSPNKWKTFRTKLIIKPGKEHSPHEVSSWRPLAILDTAYRFFATILNNRLLTWIAKRNLLCSNQKAVGIPDGCAEHNTVISLAKEWAVINGKDINFVWLDLADAFGSVPHDLIWHSLSRLKLKNKTINLIKDMYNDCYTVYECEGKHTKTIKVNNGVKQGCPMSMTLFSLTINFILQNILKEYPLIIHNHNISIMAYADDLVLIADTREKMRKMIKDITKYTDSATLKFRPSKCGYFQLKRNHNDPPITLYDEQIPIIDENHLYKYLGVDFGQKGKHNIDTILNTALDDTTKILSSDLHPAQKLQAYKTFIHSRLIFPFRNCNINHMTLDTNRNRTVQHREKQLGFDQKIKRLFKTMLGDIHQNINNNFLYAHSKLGGLGITPSIDEYIIQSVTHLIKLLNSKDTKMRQFIIAELIEHTKMRFPSQQNTIDDALKWLHSETKGGTGGPKTIFTKFRSSANRLNEKFGIITKLTLDNDNFQLTIKSKNYKDTITHDNLKESSSKLHDLTSEWYADQWHTMTCQGHISKTIGSNRQSAFLIKHRALTDKQYLFLIKARNNMITLNFSTNRNKNKMNILCRLCHKEPETQAHIFNHCTQTQNARRNKHKNVMKTTSDYLISKGFSVDIECTPQGIGTRLRPDLIIKSKRNKKLHILDIKVPYDREESFNAAREDNYKKYRELALEMGKTNACKTTLSVLVVGTLGSWDKGNDKALDQIGLNKIEQKKLAKLCTTTAVISSYTIYIGHITNRPKQTQ

SEQ ID NO: 18550 - protein, 1034 aa, Schmidtea mediterranea
MNKTNKSAIIIDPTCENSTIKHKALAESIIDTLTNLQNIIEKNTITLTIIQYPKCDLITHSGLYICHFARCLATNSPITLPIIPGLRNQLDHLIIKIINNKRNSNDINKYKTFIRDIIIQLNTNHIEPDTSLAEMYRIHQAICPQKYKPLHVVPNFLIQKDHKRMIFELRQSFDRKAKACIDKILYPIANISTTPTNESLISYFESTVKHIDTIIHLDTYIPDPEFSSDTPTTSEDLVAAYSCLDTHSAPGSDKITFSDWRRLDPDFEFLAALFNNILRTGKSPNKWKTFRTKLIIKPGKEHSPHEVSSWRPLAILDTAYRFFATILNNRLLSWIAKRNLLCSNQKAVGIPDGCAEHNTVISLAKEWAIINGKDINIVWLDLADAFGSVPHDLIWHSLSRLKLKNKTINLIKDMYNDCYTVYECEGKHTKTIKVNNGVKQGCPMSMTLFSLTINFILQNILKEYPLIIHDHNISIMAYADDLVLIADTREKMRKMIKDITKYTDSATLKFRPSKCGYFQLKRNHNDPPITLYDEQIPIIDENHLYKYLGVDFGQKGKHNIDTILNTALDDTTKMLSSDLHPAQKLQAYKTFIHSRLIFFFRNCNINHMTLDTNRNRTVQHREKQLGFDQKIKRLFKTMLGDIHQNINNNFLYAHSKLGGLGITPSIDEYIIQSVTNLIKLLNSKDTKMRQFIIAELIEHTKMRFPSQQNTIDDALKWLHSETKGGTGGPKTIFTKFRSSANRLNEKFGIITKLTLDNDNFQLTIKGKNYKDTITHDNLKESSSILHDLTSEWYADQWHTMTCQGHISKTIGSNRQSAFLIKHRALTDKQYLFLIKARNNMITLNFSTNRNKNKMNIMCRLCHKEPETQAHIFNHCTQTQNTRRNKHNNVMKTTSDYLISKGFSVDIECTPQGIDTQLRPDLIIKSKRNKKLHILDIKVPYDREESFNAAREDNYKKYRKLALEMGKTNACKTTLSALVVGTLGSWDKGNDKALDQIGLSKIEQKKLAKLCTTTAVISSYTIYIDHITNRPKQTQ

SEQ ID NO: 18551 - protein, 900 aa, Schmidtea mediterranea
MYRIHEVTCPQKYKPLHVVPNFLIQKDHKRMIFELRQSFDRKAKASIDKILYPITNISTTPTDDSLISYFESTVKHIDTIIHLDTYIPDPEFSSDTPITFEDLVAAYSCLDTHSAPGSDKITFSDWRRLDPDFVFLAALFNNILRTGKSPNKWKTFRTKLIIKPGKEHSPHEVSSWRPLAILDTAYRFFATILNIRLLSWIAKRNLLCSNQKAVGIPDGCAEHNTVISLAKEWAVINGKDINIVWLDLADAFGSVPHDLIWHSLSRLKLKNKTINLIKDMYNDCYTVYECEGKHTKTIKVNNGVKQGCPMSMTLFSLTINFILQNILKEYPLIIHNHNISIMAYADDLVLIADTREKMRKMIKDITKYTDSATLKFRPSKCGYFQLKRNHNDPPITLYDEQIPIIDKNHLYKYLGVDFGQKGKHNIDTILNTALDDTTKILSSDLHPAQKLQAYKTFIHSRLIFPFRNCNINHMTLDTNRNRTVQHREKQLGFDQKIKRLFKTMLGDIHQNINNNFLYAHSKLGGLGITPSIDEYIIQSVTHLIKLLNSKDTKMRQFIIAELIEHTKMRFPSQQNTIDDALKWLHSETKGGTGGPKTIFTKFRSSANRLNEKFGIITKLTLDNDNFQLTIKGKNYKDTITHDNLKESSSKLHDLTSEWYADQWHTMTCQGHISKTIGSNRQSAFLIKHRALTDKQYLFLIKARNNMITLNFSTNRNKNKMNIMCRLCHKEPETQAHIFNHCTQTQNARRNKHNNVMKTTSDYLISKGFSVDIECTPQGIDTRLRPDLIIKSKRNKKLHILDIKVPYDREESFNAAREDNYKKYRELALEMGKTNACKTTLSALVVGTLGSWDKGNDKALDQIGLNKIEQKKLAKLCTTTAVISSYTIYIDHITNRPKQTQ

SEQ ID NO: 18552 - protein, 1347 aa, Babesia ovata
MESSQEVQLSSQVDTAGYLQAIDVDVPDGMDIDAPLVPVGHREDRMPERRHESRKQVQSGVKAPKKNPKKSKGPGRGGESRLSPHQGQISRQPGTTPAVQGAPKKARNGGPQGKKGNTSKPKKAGKKANRPPAASSHAVPSSVELAPVCVQVSNLQPPAGGTNENGGICRSPSVYSILSDDFMDVDEEEPEQVGPVDETNNSIATGTASEVALAEPAALARAPEGQAPQAVWVGNTSPMPLNYGRLNAKIQFLHCVMRQINGPWCHWAVDVYKAVATKYRRMPRGGWKVLAEFANEKFEFHKTTAEVEQMAKQMVFKIAKNRPREAGEIVPLHDADTFVAVSQEFNKILARRLREPGVIRNVRNKKHTLCSLDFAAIKALDVVIANYLEHNPVTDMGMLAILYQTAQDCYDSVTSKTPGTSSRKEAAQQRIKELEELGLLLIRYKNKVNLDKPDRQRVYRQMDKYNMIADKPQELSYVISRTQEELQKEYDKLKKIKFKTEMYGHNRMFELYRGHFYRMLEKQQNVDETAINEEALKEYWAQMWVKPKAPDNGSQYLVERPPAQSVTGFPTFEEFLRILKKMPDWKSPGVDGIYTYYIKWLPSLHRVTYRLVEEACSYGKPQDDWFYCGITHLQPKGNKPVSASQYRPITCMSNLYKLTTRCATEALKREVAGRGLRSENQMGTRSNVQGAKEHALSNIALNEKHNGQLRAVWIDVMKAYDSIDHDYLAQVIENLHLPGWLSLFIKQTVKKWNIEIRWHNNTLMHKKVERGILQGDSLSPLLFVLCLDPLSRHLTRLFPKVEIQVPGDRVYATNHFLYIDDLKIFAHEESTIIGMTREVELFFKNTGFVINRDKSATNTEACSSIAKMMEGPDTYRYLGVTENRHSITECNAMYETIVNEICRRVELLAASKLSAKNLSLAINEYARSVINYYVGVIPMDITYFNRIDLEVRTRIADKKAHAKWANTQRLYLPRKEMGRGLHSMVFRAEAMLLRLWMTFAADEATSERRAAIMQHYRETYAHISLILLHLEGRYGLKFEQEDTIEKCLRDLRRAQNKWLYDRMEVKSTHKVLFAKRDDPNLDIEGSSLVFTSGILSPSEEAQAAAVQDRNLTWMSPTKKCPRCKNGKNVDLATKCPKMLRIEYTRRHEAVARIIHSELGRQIGLPKEKMDAHKIESEVHGKHGWIAYDKTVKTQKIKEYNRPDIIVADRRRNMITIVEIGITNQDNLVETEIFKKRKYEALIEDLKARQFNQHTTFRAIPYVMTWEGIVTKEHTKYRRDLGISDRLEAHIQRVVIQETQKLVLRDMKPREDYDSVNDPLAQTGWMPQWMVPVVYDNSTWIPQPTPAA

SEQ ID NO: 18553 - protein, 1347 aa, Babesia bigemina
MESSQEVQLSSQIDEDGDLMVIDVDVPDGMDIDAPLATVGRRECRQPERRHESRKPVQSGVQGPKGKPTNSKGAGRGGESRPIPQASRKRHQPGTTPAVKGAGNKARNGGPQGQKGNNRKAKKTGNTAQTPPVVVCNAGPSSSERAPVCVQTLSTLQPPAGEVVGNGGCRSPTVYSISSDDFMDVDEEEPEQVGPVRESNNSIAPGTASEVALTETAALPRAPEGHAPQAERAGNTPQMPPNYARLNAKLQFLHCVMRQIDGPWCHWVPDVYKAVVTKYQRMPRGGWKVLAEYANEHFEFHKTHKEVEQMARQVVAKAARSQPTDVGEIASLHDVDSYNALQEDFDRIMAQRLREPGVIRTVKNKRHTMDSLDFTAIRSLDLVVHNYVKHNPVTDMGMLAILYQTAQDCYDKYSAKPSSSSGKKEAAERRIKELEEIGALLLKYKQKVPLEKEDRKRVYRQMDKYNMIADKPQELSYVISRTQEELQKEQDKLKNAKFKKELYNDNRMFELYTGHFYRTLENKQDADESAINEGMMIEYWAQMWVKPNAPHNGEGYLVERPPAENKAGFPTYEEFVTIVKKLRDWKSPGADGIYNYYIKWLTSLHRVIYRLVEEACQQGKVQDDWFYCGITYLLPKNKKPKSAAQYRPITCMSNLYKLTTRCATETLKREVDGRGLRSENQMGTRSNVQGAKEHALANIALNEKHKGKLLATWVDVMKAYDSIDHAYLARVIDNLNLPGWLSNFIKQTIKRWNIEIRWNKNTIMHKKVERGILQGDSLSPLLFVLCLDPLSRHLTRIFPKVELSVTGGRIFATNHFLYIDDLKFFAHEESTMRGMGREVEKFFNDIGLRINRDKSATNTEACASIAKQMEGPETYKYLGVTETSNSLTSDGMFDIILQEICRRTELLAASKLSGKNLSMAINQYALSVINYYIGVIPMDITHFDKIDLAVRRIINAKHGHKKWANTQRLYLPRKEMGRGLHSMVFRAEAMLLRLWLTLSADEVTSTRRAAIMQHFRDTYAHISHIKMHLEGRYGMEFGMEDTTDKSLRDLRVAQNKWLYNRMHVKSTHKVLYAKREDPKLDIEASSLYLTCGILTPEEEANVAEVQDRNLQWMSSSKKCTRCNNGKNVDHLATKCQKLLHLEYTKRHNEVAKRVHSVLGRQIGLPKEKIDAHKIESEVHGKYGWIAYDKTVKTQKTKEYNRPDIILADRRRNTITIVEIGITNQDNLVDTEKFKKQKYEDLIEDLKARQFNQHTKIRVIPYVMTWEGIVTKEHSKYRRDLGISDRMEAHIQRVVIQETHKIVMRDMKPKEDYDSVEDPQAQTGWMPAWMAPVTSGNGPAWIPQPVSA

SEQ ID NO: 18554 - protein, 1347 aa, Babesia bigemina
MESSQEVQLSSQIDEDGDLMVIDVDVPDGMDIDAPLATVGRRECRQPERRHESRKPVQSGVQGPKGKPTNSKGAGRGGESRPIPQASRKRHQPGTTPAVKGAGNKARNGGPQGQKGNNRKAKKTGNTAQTPPVVVCNAGPSSSERAPVCVQTLSTLQPPAGEVVGNGGCRSPTVYSISSDDFMDVDEEEPEQVGPVRESNNSIAPGTASEVALTETAALPRAPEGHAPQAERAGNTPQMPPNYARLNAKLQFLHCVMRQIDGPWCHWVPDVYKAVVTKYQRMPRGGWKVLAEYANEHFEFHKTHKEVEQMARQVVAKAARSQPTDVGEIASLHDVDSYNALQEDFDRIMAQRLREPGVIRTVKNKRHTMDSLDFTAIRSLDLVVHNYVKHNPVTDMGMLAVLYQTAQDCYDKYSAKPSSSSGKKEAAERRIKELEEIGALLLKYKQKVPLEKEDRKRVYRQMDKYNMIADKPQELSYVISRTQEELQKEQDKLKNAKFKKELYNDNRMFELYTGHFYRTLENKQDADESAINEGMMIEYWAQMWVKPNAPHNGEGYLVERPPAENKAGFPTYEEFVTIVKKLRDWKSPGADGIYNYYIKWLTSLHRVIYRLVEEACQQGKVQDDWFYCGITYLLPKNKKPKSAAQYRPITCMSNLYKLTTRCATETLKREVDGRGLRSENQMGTRSNVQGAKEHALANIALNEKHKGKLLATWVDVMKAYDSIDHAYLARVIDNLNLPGWLSNFIKQTIKRWNIEIRWNKNTIMHKKVERGILQGDSLSPLLFVLCLDPLSRHLTRIFPKVELSVTGGRIFATNHFLYIDDLKFFAHEESTMRGMGREVEKFFNDIGLRINRDKSATNTEACASIAKQMEGPETYKYLGVTETSNSLTSDGMFDIILQEICRRTELLAASKLSGKNLSMAINQYALSVINYYIGVIPMDITHFDKIDLAVRRIINAKHGHKKWANTQRLYLPRKEMGRGLHSMVFRAEAMLLRLWLTLSADEVTSTRRAAIMQHFRDTYAHISHIKMHLEGRYGMEFGMEDTTDKSLRDLRVAQNKWLYNRMHVKSTHKVLYAKREDPKLDIEASSLYLTCGILTPEEEANVAEVQDRNLQWMSSSKKCTRCNNGKNVDHLATKCQKLLHLEYTKRHNEVAKRVHSVLGRQIGLPKEKIDAHKIESEVHGKYGWIAYDKTVKTQKTKEYNRPDIILADRRRNTITIVEIGITNQDNLVDTEKFKKQKYEDLIEDLKARQFNQHTKIRVIPYVMTWEGIVTKEHSKYRRDLGISDRMEAHIQRVVIQETHKIVMRDMKPKEDYDSVEDPQAQTGWMPAWMAPVTSGNGPAWIPQPVSA

SEQ ID NO: 18555 - protein, 1347 aa, Babesia bigemina
MESSQEVQLSSQIDEDGDLMVIDVDVPDGMDIDAPLATVGRRECRQPERRHESRKPVQSGVQGPKGKPTNSKGAGRGGESRPIPQASRKRHQPGTTPAVKGAGNKARNGGPQGQKGNNRKAKKTGNTAQTPPVVVCNAGPSSSERAPVCVQTLSTLQPPAGEVVGNGGCRSPTVYSISSDDFMDVDEEEPEQVGPVRESNNSIAPGTASEVALTETAALPRAPEGHAPQAERAGNTPQMPPNYARLNAKLQFLHCVMRQIDGPWCHWVPDVYKAVVTKYQRMPRGGWKVLAEYANEHFEFHKTHKEVEQMARQVVAKAARSQPTDVGEIASLHDVDSYNALQEDFDRIMAQRLREPGVIRTVKNKRHTMDSLDFTAIRSLDLVVHNYVKHNPVTDMGMLAVLYQTAQDCYDKYSAKPSSSSGKKEAAERRIKELEEIGALLLKYKQKVPLEKEDRKRVYRQMDKYNMIADKPQELSYVISRTQEELQKEQDKLKNAKFKKELYNDNRMFELYTGHFYRTLENKQDADESAINEGMMIEYWAQMWVKPNAPHNGEGYLVERPPAENKAGFPTYEEFVTIVKKLRDWKSPGADGIYNYYIKWLTSLHRVIYRLVEEACQQGKVQDDWFYCGITYLLPKNKKPKSAAQYRPITCMSNLYKLTTRCATETLKREVDGRGLRSENQMGTRSNVQGAKEHALANIALNEKHKGKLLATWVDVMKAYDSIDHAYLARVIDNLNLPGWLSNFIKQTIKRWNIEIRWNKNTIMHKKVERGILQGDSLSPLLFVLCLDPLSRHLTRIFPKVELSVTGGRIFATNHFLYIDDLKFFAHEESTMRGMGREVEKFFNDIGLRINRDKSATNTEACASIAKQMEGPETYKYLGVTETSNSLTSDGMFDIILQEICRRTELLAASKLSGKNLSMAINQYALSVINYYIGVIPMDITHFDKIDLAVRRIINAKHGHKKWANTQRLYLPRKEMGRGLHSMVFRAEAMLLRLWLTLSADEVTSTRRAAIMQHFRDTYAHISHIKMHLEGRYGMEFGMEDTTDKSLRDLRVAQNKWLYNRMHVKSTHKVLYAKREDPKLDIEASSLYLTCGILTPEEEANVAEVQDRNLQWMSSSKKCTRCNNGKNVDHLATKCQKLLHLEYTKRHNEVAKRVHSVLGRQIGLPKEKIDAHKIESEVHGKYGWIAYDKTVKTQKTKEYNRPDIILADRRRNTITIVEIGITNQDNLVDTEKFKKQKYEDLIEDLKARQFNQQTKIRVIPYVMTWEGIVTKEHSKYRRDLGISDRMEAHIQRVVIQETHKIVMRDMKPKEDYDSVEDPQAQTGWMPAWMAPVTSGNGPAWIPQPVSA

SEQ ID NO: 18556 - protein, 1165 aa, Babesia bigemina
MDVDEEEPEQVGPVRESNNSIAPGTASEVALTETAALPRAPEGHAPQAERAGNTPRMPPHYARLNAKLQFLHCVMRQIDGPWCHWVPDVYKAVVTKYQRMPRGGWKVLAEYANEHFEFHKTHKEVEQMARQVVAKAARSQPTDVGEIASLHDVDSYNALQEEFDRIMAQRLREPGVIRTVKNKRNTMDSLDFTAIRSLDLVVHNYVKHNPVTDMGMLAILYQTAQDCYDKYSAKPSSSSGKKEAAERRIKELEEIGALLLKYKQKVPLEKEDRKRVYRQMDKYNMIADKPQELSYVISRTQEELQKEQDKLKNAKFKQELYNHNRMFELYTGHFYRTLENQQDADESAINEGMMIEYWAQMWVKPNAPHNGEGYLVERPPAENMAGFPTYEEFVTIVKKLRDWKSPGADGIYNYYIKWLTSLHRVIYRLVEEACTQGKVQDDWFYCGITYLLPKNKKPKSAAQYRPITCMSNLYKLTTRCATETLKREVDGRGLRSENQMGTRSNVQGAKEHALANIALNEKHKGKLLATWVDVMKAYDSIDHAYLARVIDNLNLPGWLSNFIKQTTKRWNIEIRWNKNTIMHKKVERGILQGDSLSPLLFVLCLDPLSRHLTRIFPKVELSVPGGRIFATNHFLYIDDLKFFAHEESTMRGMGREVEKFFNDIGLRINRDKSATNTEACVSIAKQMEGPETYKYLGVTETSNSLTSDGMFDIILQEICRRTELLAASKLSGKNLSMAINQYALSVINYYIGVIPMDITHFDKIDLAVRRIINAKHGHKKWANTQRLYLPRKEMGRGLHSMVFRAEAMLLRLWLTFSADEVTSTRRAAIMQHFRDTYAHISHIKMHLEGRYGMEFGVEDTTDKSLRDLRVAQNKWLYNRMHVKSTHKVLYAKREDPKLDIEASSLYLTCGILTPEEEAKVAEVQDRNLQWMTSSKKCSRCNNGKNVDHLATKCPKLLHLEYTKRHNEVAKRVHSVLGRQIGLPKEKIDAHKIESEVHGKYGWIAYDKTVKTQKTKEYNRPDIILADRRRNTISIVEVGISNHDNLVDMEKFKKQKYEDLIEDFKARQFNQQTKIRVIPYVMTWEGIVTKEHSKYRRDLGISDRMEAHIQRVVIQETHKIVMRDMRPREDYDSVEDPQVQTGWMPAWMAPVTIGNGQTRNPQPVPA

SEQ ID NO: 18557 - protein, 1165 aa, Babesia bigemina
MDVDEEEPEQVGPVRESNNSIAPGTASEVALTETAALPRAPEGHAPQAERAGNTPRMPPHYARLNAKLQFLHCVMRQIDGPWCHWVPDVYKAVVTKYQRMPRGGWKVLAEYANEHFEFHKTHKEVEQMARQVVAKAARSQPTDVGEIASLHDVDSYNALQEDFDRIMAQRLREPGVIRTVKNKRHTMDSLDFSAIRSLDLVVHNYVKHNPVTDMGMLAILYQTAQDCYDKYSAKPSSSSGKKEAAERRIKELEEIGALLLKYKQKVPLEKEDRKRVYRQMDKYNMIADKPQELSYVISRTQEELQKEQDKLKNAKFKKELYNDNRMFELYTGHFYRTLENQQNADESAINEGMMIEYWAQMWVKPNAPHNGEGYLVERPPAENMAGFPTYEEFVTIVKKLRDWKSPGADGIYNYYIKWLTSLHRVIYRLVEEACQQGKVQDDWFYCGITYLLPKNKKPKSAAQYRPITCMSNLYKLTTRCATETLKREVDGRGLRSENQMGTRSNVQGAKEHALANIALNEKHKGKLLATWVDVMKAYDSIDHAYLARVIDNLNLPGWLSNFIKQTTKRWNIEIRWNKNTIMHKKVERGILQGDSLSPLLFVLCLDPLSRHLTRIFPKVELSVPGGRVFATNHFLYIDDLKFFAHEESTMRGMGREVEKFFNDIGLRINRDKSATNTEACVSIAKQMEGPETYKYLGVTETSNSLTSDGMFDIILQEICRRTELLAASKLSGKNLSMAINQYALSVINYYIGVIPMDITHFDKIDLAVRRIINAKHGHKKWANTQRLYLPRKEMGRGLHSMVFRAEAMLLRLWLTFSADEVASTRRAAIMQHFRDTYAHISHIKMHLEGRYGMEFGVEDTTDKSLRDLRVAQNKWLYNRMHVKSTHKVLYAKREDPKLDIEASSLYLTCGILTPEEEAKVAEVQDRNLQWMTSSNKCSRCNNGKNVDHLATKCPKLLHLEYTKKHNEVAKRVHSVLGRQIGLPKEKIDAHKIESEVHGKYGWIAYDKTVKTQKTKEYNRPDIILADRRRNTITIVEIGITNQDNLVDTEKFKKQKYEDLIEDLKARQFNQQTKIRVIPYVMTWEGIVTKEHSKYRRDLGISDRMEAHIQRVVIQETHKIVMRDMKPKEDYDSVEDPQAQTVWMPAWMAPVTSGNGPTWNPQPVSA

SEQ ID NO: 18558 - protein, 1347 aa, Babesia bigemina
MESSQEVQLSSQIDEDGDLMVIDVDVPDGMDIDAPLATVGRRECRQPERRHESRKPVQSGVQGPKGKPTNSKGAGRGGESRPIPQASRKRHQPGTTPAVKGAGNKARNGGPQGQKGNNRKAKKTGNTAQTPPVVVCNAGPSSSERAPVCVQTLSTLQPPAGEVVGNGGCRSPTVYSISSDDFMDVDEEEPEQVGPVRESNNSIAPGTASEVALTETAALPRAPEGHAPQAERAGNTPQMPPNYARLNAKLQFLHCVMRQIDGPWCHWVPDVYKAVVTKYQRMPRGGWKVLAEYANEHFEFHKTHKEVEQMARQVVAKAARSQPTDVGEIASLHDVDSYNALQEDFDRIMAQRLREPGVIRTVKNKRHTMDSLDFTAIRSLDLVVHNYVKHNPVTDMGMLAVLYQTAQDCYDKYSAKPSSSSGKKEAAERRIKELEEIGALLLKYKQKVPLEKEDRKRVYRQMDKYNMIADKPQELSYVISRTQEELQKEQDKLKNAKFKKELYNDNRMFELYTGHFYRTLENKQDADESAINEGMMIEYWAQMWVKPNAPHNGEGYLVERPPAENKAGFPTYEEFVTIVKKLRDWKSPGADGIYNYYIKWLTSLHRVIYRLVEEACQQGKVQDDWFYCGITYLLPKNKKPKSAAQYRPITCMSNLYKLTTRCATETLKREVDGRGLRSENQMGTRSNVQGAKEHALANIALNEKHKGKLLATWVDVMKAYDSIDHAYLARVIDNLNLPGWLSNFIKQTIKRWNIEIRWNKNTIMHKKVERGILQGDSLSPLLFVLCLDPLSRHLTRIFPKVELSVTGGRIFATNHFLYIDDLKFFAHEESTMRGMGREVEKFFNDIGLRINRDKSATNTEACASIAKQMEGPETYKYLGVTETSNSLTSDGMFDIILQEICRRTELLAASKLSGKNLSMAINQYALSVINYYIGVIPMDITHFDKIDLAVRRIINAKHGHKKWANTQRLYLPRKEMGRGLHSMVFRAEAMLLRLWLTLSADEVTSTRRAAIMQHFRDTYAHISHIKMHLEGRYGMEFGMEDTTDKSLRDLRVAQNKWLYNRMHVKSTHKVLYAKREDPKLDIEASSLYLTCGILTPEEEANVAEVQDRNLQWMSSSKKCTRCNNGKNVDHLATKCQKLLHLEYTKRHNEVAKRVHSVLGRQIGLPKEKIDAHKIESEVHGKYGWIAYDKTVKTQKTKEYNRPDINLADRRRNTITIVEIGITNQDNLVDTEKFKKQKYEDLIEDLKARQFNQQTKIRVIPYVMTWEGIVTKEHSKYRRDLGISDRMEAHIQRVVIQETHKIVMRDMKPKEDYDSVEDPQAQTGWMPAWMAPVTSGNGPAWIPQPVSA

SEQ ID NO: 18559 - protein, 1347 aa, Babesia bigemina
MESSQEVQLSSQIDEDGDLMVIDVDVPDGMDIDAPLATVGRRECRQPERRHESRKPVQSGVQGPKGKPTNSKGAGRGGESRPIPQASRKRHQPGTTPAVKGAGNKARNGGPQGQKGNNRKAKKTGNTAQTPPVVVCNAGPSSSERAPVCVQTLSTLQPPAGEVVGNGGCRSPTVYSISSDDFMDVDEEEPEQVGPVRESNNSIAPGTASEVALTETAALPRAPEGHAPQAERAGNTPQMPPNYARLNAKLQFLHCVMRQIDGPWCHWVPDVYKAVVTKYQRMPRGGWKVLAEYANEHFEFHKTHKEVEQMARQVVAKAARSQPTDVGEIASLHDVDSYNALQEDFDRIMAQRLREPGVIRTVKNKRHTMDSLDFTAIRSLDLVVHNYVKHNPVTDMGMLAVLYQTAQDCYDKYSAKPSSSSGKKEAAERRIKELEEIGALLLKYKQKVPLEKEDRKRVYRQMDKYNMIADKPQELSYVISRTQEELQKEQDKLKNAKFKKELYNDNRMFELYTGHFYRTLENKQDADESAINEGMMIEYWAQMWVKPNAPHNGEGYLVERPPAENKAGFPTYEEFVTIVKKLRDWKSPGADGIYNYYIKWLTSLHRVIYRLVEEACQQGKVQDDWFYCGITYLLPKNKKPKSAAQYRPITCMSNLYKLTTRCATETLKREVDGRGLRSENQMGTRSNVQGAKEHALANIALNEKHKGNFLATWVDVMKAYDSIDHAYLARVIDNLNLPGWLSNFIKQTIKRWNIEIRWNKNTIMHKKVERGILQGDSLSPLLFVLCLDPLSRHLTRIFPKVELSVTGGRIFATNHFLYIDDLKFFAHEESTMRGMGREVEKFFNDIGLRINRDKSATNTEACASIAKQMEGPETYKYLGVTETSNSLTSDGMFDIILQEICRRTELLAASKLSGKNLSMAINQYALSVINYYIGVIPMDITHFDKIDLAVRRIINAKHGHKKWANTQRLYLPRKEMGRGLHSMVFRAEAMLLRLWLTLSADEVTSTRRAAIMQHFRDTYAHISHIKMHLEGRYGMEFGMEDTTDKSLRDLRVAQNKWLYNRMHVKSTHKVLYAKREDPKLDIEASSLYLTCGILTPEEEANVAEVQDRNLQWMSSSKKCTRCNNGKNVDHLATKCQKLLHLEYTKRHNEVAKRVHSVLGRQIGLPKEKIDAHKIESEVHGKYGWIAYDKTVKTQKTKEYNRPDIILADRRRNTITIVEIGITNQDNLVDTEKFKKQKYEDLIEDLKARQFNQHTKIRVIPYVMTWEGIVTKEHSKYRRDLGISDRMEAHIQRVVIQETHKIVMRDMKPKEDYDSVEDPQAQTGWMPAWMAPVTSGNGPAWIPQPVSA

SEQ ID NO: 18560 - protein, 1072 aa, Babesia bigemina
MESSQEVQLSSQIDEDGDLMVIDVDVPDGMDIDAPLATVGRRECRQPERRHESRKPVQSGVQGPKGKPTNSKGAGRGGESRPIPQASRKRHQPGTTPAVKGAGNKARNGGPQGQKGNNRKAKKTGNTAQTPPVVVCNAGPSSSERAPVCVQTLSTLQPPAGEVVGNGGCRSPTVYSISSDDFMDVDEEEPEQVGPVRESNNSIAPGTASEVALTETAALPRAPEGHAPQAERAGNTPQMPPNYARLNAKLQFLHCVMRQIDGPWCHWVPDVYKAVVTKYQRMPRGGWKVLAEYANEHFEFHKTHKEVEQMARQVVAKAARSQPTDVGEIASLHDVDSYNALQEDFDRIMAQRLREPDLLPKNKKPKSAAQYRPITCMSNLYKLTTRCATETLKREVDGRGLRSENQMGTRSNVQGAKEHALANIALNEKHKGKLLATWVDVMKAYDSIDHAYLARVIDNLNLPGWLSNFIKQTIKRWNIEIRWNKNTIMHKKVERGILQGDSLSPLLFVLCLDPLSRHLTRIFPKVELSVTGGRIFATNHFLYIDDLKFFAHEESTMRGMGREVEKFFNDIGLRINRDKSATNTEACASIAKQMEGPETYKYLGVTETSNSLTSDGMFDIILQEICRRTELLAASKLSGKNLSMAINQYALSVINYYIGVIPMDITHFDKIDLAVRRIINAKHGHKKWANTQRLYLPRKEMGRGLHSMVFRAEAMLLRLWLTLSADEVTSTRRAAIMQHFRDTYAHISHIKMHLEGRYGMEFGMEDTTDKSLRDLRVAQNKWLYNRMHVKSTHKVLYAKREDPKLDIEASSLYLTCGILTPEEEANVAEVQDRNLQWMSSSKKCTRCNNGKNVDHLATKCQKLLHLEYTKRHNEVAKRVHSVLGRQIGLPKEKIDAHKIESEVHGKYGWIAYDKTVKTQKTKEYNRPDIILADRRRNTITIVEIGITNQDNLVDTEKFKKQKYEDLIEDLKARQFNQHTKIRVIPYVMTWEGIVTKEHSKYRRDLGISDRMEAHIQRVVIQETHKIVMRDMKPKEDYDSVEDPQAQTGWMPAWMAPVTSGNGPAWIPQPVSA

SEQ ID NO: 18561 - protein, 1165 aa, Babesia bigemina
MDVDEEEPEQVGPVRESNNSIAPGTASEVALTETAALPRAPEGHAPQAERAGNTPQMPPNYARLNAKLQFLHCVMRQIDGPWCHWVPDVYKAVVTKYQRMPRGGWKVLAEYANEHFEFHKTHKEVEQMARQVVAKAARSQPTDVGEIASLHDVDSYNALQEDFDRIMAQRLREPGVIRTVKNKRHTMDSLDFTAIRSLDLVVHNYVKHNPVTDMGMLAILYQTAQDCYDKYSAKPSSSSGKKEAAERRIKELEEIGALLLKYKQKVPLEKEDRKRVYRQMDKYNMIADKPQELSYVISRTQEELQKEQDKLKNAKFKKELYNDNRMFELYTGHFYRTLENKQDADESAINEGMMIEYWAQMWVKPNAPHNGEGYLVERPPAENKAGFPTYEEFVTIVKKLRDWKSPGADGIYNYYIKWLTSLHRVIYRLVEEACQQGKVQDDWFYCGITYLLPKNKKPKSAAQYRPITCMSNLYKLTTRCATETLKREVDGRGLRSENQMGTRSNVQGAKEHALANIALNEKHKGKLLATWVDVMKAYDSIDHAYLARVIDNLNLPGWLSNFIKQTIKRWNIEIRWNKNTIMHKKVERGILQGDSLSPLLFVLCLDPLSRHLTRIFPKVELSVTGGRIFATNHFLYIDDLKFFAHEESTMRGMGREVEKFFNDIGLRINRDKSATNTEACASIAKQMEGPETYKYLGVTETSNSLTSDGMFDIILQEICRRTELLAASKLSGKNLSMAINQYALSVINYYIGVIPMDITHFDKIDLAVRRIINAKHGHKKWANTQRLYLPRKEMGRGLHSMVFRAEAMLLRLWLTLSADEVTSTRRAAIMQHFRDTYAHISHIKMHLEGRYGMEFGMEDTTDKSLRDLRVAQNKWLYNRMHVKSTHKVLYAKREDPKLDIEASSLYLTCGILTPEEEANVAEVQDRNLQWMSSSKKCTRCNNGKNVDHLATKCQKLLHLEYTKRHNEVAKRVHSVLGRQIGLPKEKIDAHKIESEVHGKYGWIAYDKTVKTQKTKEYNRPDIILADRRRNTITIVEIGITNQDNLVDTEKFKKQKYEDLIEDLKARQFNQHTKIRVIPYVMTWEGIVTKEHSKYRRDLGISDRMEAHIQRVVIQETHKIVMRDMKPKEDYDSVEDPQAQTGWMPAWMAPVTSGNGPAWIPQPVSA

SEQ ID NO: 18562 - protein, 886 aa, Babesia bigemina
MDKYNMIADKPQELSYVISRTQEELQKEQDKLKNAKFKKELYNDNRMFELYTGHFYRTLENKQDADESAINEGMMIEYWAQMWVKPNAPHNGEGYLVERPPAENKAGFPTYEEFVTIVKKLRDWKSPGADGIYNYYIKWLTSLHRVIYRLVEEVCQQGKVQDDWFYCGITYLLPKNKKPKSAAQYRPITCMSNLYKLTTRCATETLKREVDGRGLRSENQMGTRSNVQGAKEHALANIALNEKHKGKLLATWVDVMKAYDSIDHAYLARVIDNLNLPGWLSNFIKQTIKRWNIEIRWNKNTIMHKKVERGILQGDSLSPLLFVLCLDPLSRHLTRIFPKVELSVTGGRIFATNHFLYIDDLKFFAHEESTMRGMGREVEKFFNDIGLRINRDKSATNTEACASIAKQMEGPETYKYLGVTETSNSLTSDGMFDIILQEICRRTELLAASKLSGKNLSMAINQYALSVINYYIGVIPMDITHFDKIDLAVRRIINAKHGHKKWANTQRLYLPRKEMGRGLHSMVFRAEAMLLRLWLTLSADEVTSTRRAAIMQHFRDTYAHISHIKMHLEGRYGMEFGMEDTTDKSLRDLRVAQNKWLYNRMHVKSTHKVLYAKREDPKLDIEASSLYLTCGILTPEEEANVAEVQDRNLQWMSSSKKCTRCNNGKNVDHLATKCQKLLHLEYTKRHNEVAKRVHSVLGRQIGLPKEKIDAHKIESEVHGKYGWIAYDKTVKTQKTKEYNRPDIILADRRRNTITIVEIGITNQDNLVDTEKFKKQKYEDLIEDLKARQFNQHTKIRVIPYVMTWEGIVTKEHSKYRRDLGISDRMEAHIQRVVIQETHKIVMRDMKPKEDYDSVEDPQAQTGWMPAWMAPVTSGNGPAWIPQPVSA

SEQ ID NO: 18563 - protein, 956 aa, Carcina quercana
MNTHNRSLSPCPHCPGSPRLYVVPRGLNVHISRAHRDIRDVSQSSQNTRDRLLPSDLVHASPSTSSPSAPPRTSALVIDFNVLGHLKNKVRVLKHVPKGARSVAAGRLTTLIDNCVKSNGVDDWFALLTFAFTALKVPEQNQNLSLTAKVKNSIEEGGLYFPSYGNQRPRSVYQSIEAKVYEGDLRGSVRLLVSDCSLAPSDATTLTALKEKHPTISRPLDTVPSPDSTGPYLRVTVTDVSSAIESFYNGSSSGLDGIRPGHLKELISTSAGNNGQRLIESLTRLCNFLLEGLLNPEVCPYLYGATLYALQKKDGGIRPIAVGNTFRRLVAKLCCRALRGEMSAFLQPHQLGFGSPLGCESAIHATRSFVRANDGADCVVVKVDVKNAFNTLERDIILQAAKDHIPIAYNFIHQCYSTPSFLFYRGDSIVSLVGAQQGDPLGPLVFSLAIQKTVSSLETPLNAWYLDDGTLGGPPDVVERDIERLMPAFKNIGLEVNPLKCELFACGPTAMTSLSRFESLFPGLTVMDKRTFLLLGAPIFCEGVGASFREKTMVLSKVGEHLNHLPAHVSLVLLRNCLSTPRLTYLLRTAPTWLFPAETQTHDDVTRQLLERVLNVSLNEVQWSQASLPVRHGGLGVRRVQDVGLIAFLASANGSADLVARILSINGEGIRIPFHQEAMEAWSCLSPNVVPERPTEQRGWDEIQCKQAISNLLDVATGADLSRLRAASKTESGAWLHALPSPQLGTLLDSDSLRVAAALRLGCKVCEPHRCVCGTIVEANGHHGLSCPRSAGRFPRHHALNDIIRRAMVLANAPCVLEPPGLSRTDGKRPDGLTLVPWAKGRSLLWDATCVSTFAPSHLSSTARAAGAAAETAARLKHAKYAALEPTYEFVPVAVETGGPWCLEARTFVHELGRRLRERGSDPRSGSFLVQRISIAIQRGNAASVMGTFGSGPDPR

SEQ ID NO: 18564 - protein, 956 aa, Carcina quercana
MNTHNRSLSPCPHCPGSPRLYVVPRGLNVHISRAHRDIRDVSQSSQNTRDRLLPSDLVHASPSTSSPSAPPRTSALVIDFNVLGDLKNKVRVLKHIPKGARSVAAGRLTTLIDNCVKSNGVDDWFALLTFAFTALKVPEQNQNLSLTAKVKNSIEEGGLYFPSYGNQRPRSVYQSIEAKVYEGDLRGAVRLLVSDCSLAPSDATTLTALKEKHPTISRPLDTVPSPDSTGPYLRVTVTDVSSAIESFYNGSSSGLDGIRPGHLKELISTSAGNNGQRLIESLTRLCNFLLEGLLNPEVCPYLYGATLYALQKKDGGIRPIAVGNTFRRLVAKLCCRALRGEMSAFLQPHQLGFGSPLGCESAIHATRSFVRANDGADCVVVKVDVKNAFNTLERDIILQAAKDHIPIAYNFIHQCYSTPSFLFYRGDSIVSLVGAQQGDPLGPLVFSLAIQKTVSSLESPLNAWYLDDGTLGGPPDVVERDIERLIPAFKNIGLEVNPLKCELFACGPTAMTSLSRFESLFPGLTVMDKRTFLLLGAPIFCEGVGASFREKTMVLSKVGEHLNHLPAHVSLVLLRNCLSTPRLTYLLRTAPTWLFPAETQTYDDVTRQLLERVLNVSLNEVQWSQASLPVRHGGLGVRRVQDVGLIAFLASANGSADLVARILSINGEGIRIPFHQEAMEAWSCLSPNVVPERPTEQRGWDEIQCKQAISNLLDVATGADLSRLRAASKTESGAWLHALPSPQLGTLLDSDSLRVAAALRLGCKVCEPHRCVCGTIVEANGHHGLSCPRSAGRFPRHHALNDIIRRAMVLANVPCVLEPPGLSRTDGKRPDGLTLVPWAKGRSLLWDATCVSTFAPSHLSSTARAAGAAAETAARLKHAKYAALEPTYEFVPVAVETGGPWCLEAKAFVHELGRRLREGGSDPRSGSFLVQRISIAIQRGNAASVMGTFGSGPDPR

SEQ ID NO: 18565 - protein, 956 aa, Carcina quercana
MNTHNRSLSPCPHCPGSPRLYVVPRGLNVHISRAHRDIRDVSQSSQNTRDRLLPSDLVHASPSTSSPSAPPRTSALVIDFNVLGNLKNKVRVLKHIPKGARSVAAGRLTTLIDNCVKSNGVDDWFALLTFAFTALKVPEQNQNLSLTAKVKNSIEEGGLYFPSYGNQRPRSVYQSIEAKVYEGDLRGAVRLLVSDCSLAPSDATTLTALKEKHPTISRPLDTVPSPDSTGPYLRVTVTDVSSAIESFYNGSSSGLDGIRPGHLKELISTSAGNNGQRLIESLTRLCNFLLEGLLNPEVCPYLYGATLYALQKKDGGIRPIAVGNTFRRLVAKLCCRALRGEMSAFLQPHQLGFGSPLGCESAIHATRSFVQANDGADCVVVKVDVKNAFNTLERDIILQAAKDHIPIAYNFIHQCYSTPSFLFYRGDSIVSLVGAQQGDPLGPLVFSLAIQKTVSSLESPLNAWYLDDGTLGGPPDVVERDIERLIPAFKNIGLEVNPLKCELFACGPTAMTSLSRFESLFPGLTVMDKRTFLLLGAPIFCEGVGASFREKTMVLSKVGEHLNHLPAHVSLVLLRNCLSTPRLTYLLRTAPTWLFPAETQTHDDVTRQLLERVLNVSLNEVQWSQASLPVRHGGLGVRRVQDVGLIAFLASANGSADLVARILSINGEGIRIPFHQEAMEAWSCLSPNVVPERPTEQRGWDEIQCKQAISNLLDVATGADLSRLRAASKTESGAWLHALPSPQLGTLLDSDSLRVAAALRLGCKVCEPHRCVCGTIVEANGHHGLSCPRSAGRFPRHHALNDIIRRAMVLANVPCVLEPPGLSRTDGKRPDGLTLVPWAKGRSLLWDATCVSTFAPSHLSSTARAAGAAAETAARLKHAKYAALEPTYEFVPVAVETGGPWCLEAKVFVHELGRRLRERGSDPRSGSFLVQRISIAIQRGNAASVMGTFGSGPDPR

SEQ ID NO: 18566 - protein, 956 aa, Carcina quercana
MNTHNRSLSPCPHCPGSPRLYVVPRGLNVHISRAHRDIRDVSQSSQNTRDRLLPSDLVHASPSTSSPSAPPRTSALVIDFNVLGNLKNKVRFLKHIPKGARSVAAGRLTTLIDNCVKSNGVDDWFALLTFAFTALKVPEQNQNLSLTAKVKNSIEEGGLYFPTYGNQRPRSVYQSIEAKVYEGDLRGAVRLLVSDCSLAPSDATTLTALKEKHPTISRPLDTVPSPDSTGPYLRVTVTDVSSAIESFYNGSSSGLDGIRPGHLKELISTSAGNNGQRLIESLTRLCNFLLEGLLNPEVCPYLYGATLYALQKKDGGIRPIAVGNTFRRLVAKLCCRALRGEMSAFLQPHQLGFGSPLGCESAIHATRSFVQANDGADCVVVKVDVKNAFNTLERDIILQAAKDHIPIAYNFIHQCYSTPSFLFYRGDSIVSLVGAQQGDPLGPLVFSLAIQKTVSSLESPLNAWYLDDGTLGGPPDVVERDIERLIPAFKNIGLEVNPLKCELFACGPTAMTSLSRFESLFPGLTVMDKRTFLLLGAPIFCEGVGASFREKTMVLSKVGEHLNHLPAHVSLVLLRNCLSTPRLTYLLRTAPTWLFPAETQTHDDVTRQLLERVLNVSLNEVQWSQASLPVRHGGLGVRRVQDVGLIAFLASANGSADLVARILSINGEGIRIPFHQEAMEAWSCLSPNVVPERPTEQRGWDEIQCKQAISNLLDVATGADLSRLRAASKTESGAWLHALPSPQLGTLLDSDSLRVAAALRLGCKVCEPHRCVCGTIVEANGHHGLSCPRSAGRFPRHHALNDIIRRAMVLANVPCVLEPPGLSRTDGKRPDGLTLVPWAKGRSLLWDATCVSTFAPSHLSSTARAAGAAAETAARLKHAKYAALEPTYEFVPVAVETGGPWCLEAKVFVHELGRRLRERGSDPRSGSFLVQRISIAIQRGNAASVMGTFGSGPDPR

SEQ ID NO: 18567 - protein, 956 aa, Carcina quercana
MNTHNRSLSPCPYCPGSPRLYVVPRGLNVHISRAHRDIRDVSQSSQNTRDRLLPSDLVHASPSPSSPSAPPRTSALVIDFNVLGHLKNKVRVLKHVPKGARSVAAGRLTTLIDNCVKSNGVDDWFALLTFAFTALKVPEQNQNLSLTAKVKNSIEEGGLYFPSYGNQRPRSVYQSIEAKVYEGDLRGAVRLLVSDCSLAPSDAITLTALKEKHPTISRPLDTVPSPDSTGLYLRVTVTDVSSAIESFYNGSSSGLDGIRPGHLKELISTSAGNNGQRLIESLTRLCNFLLEGLLNPEVCPYLYGATLYALQKKDGGIRPIAVGNTFRRLVAKLCCRALRGEMSAFLQPHQLGFGSPLGCESAIHATRSFVRANDGADCVVVKVDVKNAFNTLERDIILQAAKDHIPIAYNFIHQCYSTPSFLFYRGDSIVSLVGAQQGDPLGPLVFSLAIQKTVSSLESPLNAWYLDDGTLGGPPDVVERDIERLMPVFKNIGLEVNPLKCELFACGPTAMTSLSRFESLFPGLTVMDKRTFLLLGAPIFCEGVGASFREKTMVLSKVGEHLNHLPAHVSLVLLRNCLSTPRLTYLLRTAPTWLFPAETQTHDDVTRQLLERVLNVSLNEVQWSQASLPVRHGGLGVRRVQDVGLIAFLASANGSADLVARILSINGEGIRIPFHQEAMEAWSCLSPNVVPERPTEQRGWDEIQCKQAISNLLDVATGADLSRLRAASKTESGAWLHALPSPQLGTLLDSDSLRVAAALRLGCKVCEPHRCVCGTIVEANGHHGLSCPRSAGRFPRHHALNDIIRRAMVLANALCVLEPPGLSRTDGKRPDGLTLVPWAKGRSLLWDATCVSTFAPSHLSSTARAAGAAAETAARLKHAKYAALEPTYEFVPVSVETGGPWCLEARTFVHELGRRLRERGSDPRSGSFLVQRISIAIQRGNAASVMGTFGSGPDPR

SEQ ID NO: 18568 - protein, 956 aa, Carcina quercana
MNTHNRSLSPCPHCPGSPRLYVVPRGLNVHISRAHRDIRDVSQSSQNTRDRLLPSDLVHASPSTSSPSAPPRTSALVIDFNVLGHLKNKVRVLKHVPKGARSVAAGRLTTLIDNCVKSNGVDDWFALLTFAFTALKVPEQNQNLSLTAKVKNSIEEGGLYFPSYGNQRPRSVYQSIEAKVYEGDLRGSVRLLVSDCSLAPSDATTLTALKEKHPTISRPLDTVPSPDSTGPYLRVTVTDVSSAIESFYNGSSSGLDGIRPGHLKELISTSAGNNGQRLIESLTRLCNFLLEGLLNPEVCPYLYGATLYALQKKDGGIRPIAVGNTFRRLVAKLCCRALRGEMSAFLQPHQLGFGSPLGCESAIHATRSFVRANDGADCVVVKVDVKNAFNTLERDIILQAAKDHIPIAYNFIHQCYSTPSFLFYRGDSIVSLVGAQQGDPLGPLVFSLAIQKTVSSLESPLNAWYLDDGTLGGPPDVVERDIERLMPAFKNIGLEVNPLKCELFACGPTAMTSLSRFESLFPGLTVMDKRTFLLLGAPIFCEGVGASFREKTMVLSKVGEHLNHLPAHVSLVLLRNCLSTPRLTYLLRTAPTWLFPAETQTHDDVTRQLLERVLNVSLNEVQWSQASLPVRHGGLGVRRVQDVGLIAFLASANGSADLVARILSINGEGIRIPFHQEAMEAWSCLSPNVVPERPTEQRGWDEIQCKQAISNLLDVATGADLSRLRAASKTESGAWLHALPSPQLGTLLDSDSLRVAAALRLGCKVCEPHRCVCGTIVEANGHHGLSCPRSAGHFPRHHALNDIIRMAMVLANAPCVLEPPGLSRTDGKRPDGLTLVPWAKGRSLLWDATCVSTFAPSHLSSTARAAGAAAETAARLKHAKYAALEPTYEFVPVAVETGGPWCLEARTFVHELGRRLRERGSDPRSGSFLVQRISIAIQRGNAASVMGTFGSGPDPR

SEQ ID NO: 18569 - protein, 985 aa, Tinea semifulvella
MTISEHYPPTTTHAHTNKENTFKLKLRRKKRELRKRLRCAKNIGDKQQCHQVARALRSILKLIQGISLQIKDNSNQYNRARHEVLFDNNPFVYARKIFSEKSGVLSLTRDQIYKYYKETYTEIQKEEQYLDPPSPRPVRPLEDFRCLPPSMEEMEEQIKRKSSKSAPGPDGIPYIVYKKCPHTRKHLYNIYRKIWSTNQVPKAFGEAVFVLIPKKTEVNDPKDARPIALTNTMSKIFFSIVQARMSRFMIKNEYFSRQHQKGFLPGVSGCLEHNTLLAECLKDARKQERQLSVCWIDLENAFGSVQHELLQTALKWYNFPTLIRDIIANYYKNLRFVVTNKDGYTDTLKYNVGLFQGCCLSPVAFIIIINILIDKLKSREKKWGYRFKQNNIYTESVLAFADDLAVITRNPKQCQGLLKIVDDFCSWTKGMRTKPSKCFSLCLARRNTTFTSYDPGLSIAGQRIAPVNETMPFKILGRRINFQGKTPSLEVVVKQFTDDMNRVTQQPISNVKKAWIYDNYLASRLTWPFLVYDFNKSLLSSLDADVIRTLKSWLGLAQGADSSTFFRGRRNFGMDLKRPSELYKHLRISKYQILTSSQDNTISSLPRDPLVSDMEPRLLFFKKFMTGAQTDKRGIGWKKKESDKEVIKSFLRKDEEHEYRVHAMTLEVQNDWLTLGDFCIPPALKWRTLMYDWSPALLKFYLNAFQMSLPDQSNLVRWGKATEKNCTLCGAAIGTARHTLVGCVTLLEKGYYSRRHDKVLGVIREAVSLSIARARKGLTTNKTLTTFVKEGQSTKTKCKPTSILGAASDWKILMDTFEHHYRIPDELAVSAYRPDILVFSRNLKKVILIELTVPWESNIPKDHNMKSNKYYDLTEEMIRNGFKTQLCAVEVGARGVPAKSLHHLLKELGLSRSAVNTFMERASKTALTESYSIGREVEWWMVSVLSRNRKKRRPPFLKPANCRSQARDTILLISYPHTMDPAPAR

SEQ ID NO: 18570 - protein, 1075 aa, Tinea semifulvella
MNCPLVDNNNDPGDNMDLKCPTCGKIYRRQAWFKKHLKTHEGIEAQMVRPSTSTADRVSPHISHGTPPCEFNQESMTIRTRLSIPTIKETTWKVHDGNLAVMLDCPGTKQDLDSQVRAFQNTVYDYFSEHYPPTTTHAHTNKENTFKLKLRRKKRELRKRLRCAKNIGDKQQCHQVARALRSILKLIQGISLQIKDHSNQYNRARHEVLFDKNPFVYARKIFSEKSGVLSLTRDQIYKYYKETYTEIQKEEQYLDPPSPRPVRPLEDFRCLPPSMEEMEEQIKRKSSKSAPGPDGIPYIVYKKCPHTRKHLYNIYRKIWSTNQVPKAFGEAVFVLIPKKTEVNDPKDARPIALTNTMSKIFFSIVQARMSRFMIKNEYFSRQHQKGFLPGVSGCLEHNTLLAECLKDARKQERQLSVCWIDLENAFGSVQHELLQTALKWYNFPTLIRDIIANYYKNLRFVVTNKDGYTDTLKYNVGLFQGCCLSPVAFNIIINILIDKLKSREKKWGYRFKQNNIYTESVLAFADDLAVITRNPKQCQGLLKIVDDFCSWTKGMRTKPSKCFSLCLARRNTTFTSYDPGLSIAGQRIAPVNETMPFKFLGRRINFQGKTPSLEVVVKQFTDDMNRVTQQPISNVKKAWIYDNYLASRLTWPFLVYDFNKSLLSSLDADVIRTLKSWLGLAQGADSSTFFRGRRNFGMDLKRPSELYKHLRISKYQILTSSQDNTISSLPRDPLVSDMEPRLLFFKKFMTGAQTDKRGIGWKKKESDKEVIKSFLRKDEEHGYRVHAMTLEVQNDWLTLGDFCIPPALKWRTLMYDWSPALLKFYLNAFQMSLPDQSNLVRWGKATEKNCTLCSAAIGTARHTLVGCVTLLEKGYYSRRHDKVLGVIREAVSLSIARARKGLTTNKTLTTFVKEGQSTKTKCKPTSILGAASDWKILMDTFEHHYRIPDELAVSAYRPDILVFSRNLKKVILIELTVPWESNIPKDHNMKSNKYYDLTEEMIRNGFKTQLYAVEVGARGVPAKSLHHLLKELGLSRSAVNLFMERASKTALTESYSIWLGRERSRMVDGERIIAQ

SEQ ID NO: 18571 - protein, 996 aa, Tinea trinotella
MNIRTRLSIPSIKDTTWKAHDHNLAVRLDCPGNKQDLDSQVKTFQDTIYNYFSEHYPPATAYAHNNKENTFKLKMRRKKRELIKKLRWAKTMGDNHLCHQLARALRSILKLIQGISLQIDDHHNQFNRAKHEVAFDKNPFVYAKKIFSKKSGRLSLTKEQIYQYYSETYAKTHKEESYIEPPTLRPDNPSVDFQCSPPSIEEIEEQIKKKSSGSAPGPDGIPYIVFKKCQHVRKHLHNIYGKIWSSKQVPKAFGEAVFVLIPKTANVTHPTDARPIALTNTVSKIFFSVLQVRMSRFMTNNKYFTPQHQKGFLPGISGCLEHNTLLGECLKDAREHERQLTVCWIDLENAFGSVQHQLLQTALKWYNFPSVVMDIIANYYNKLSFVIANKGVYTDPLKYNVGLFQGCCLSPVAFNIIINILIDKLKTKEKKFGYRFKLNNKYSESILAFADDLAVLTRNAKQCQELLKDIDQFCSWTKGLKTKPTKCFCLSLGRKDTKFTSFDPGLNMAGQRIAPVEEAVPFKFLGRRIDFKGKTPSLEVVIEGFIEDIKKIEERPIGNVKKAWIYDNYLTSRLTWPFLVYDFNKSLLFKLDAEVIKTLKSWLGLARGADSSTLFRGQQNFGMSFKKPSELYKHLRITKHQILTNSRDNLIASLPKDPLASEMEPRLQFHKAFMTGAQTSKKGLGWEKKKSDKEVIKSLLKQDEAHAYRVHATTLEVQNEWLTLGEICVPPALKWRTIMYDWSPALVKFYLNAFQMSLPDQSNLVRWGKGTDKTCTLCGLAVGTARHILVGCVTLLDRGCYSRRHDKVLEIIREAVSLSIGRARKGLSTNERHITFVKESHLRKSQNKPFSILRDAPDWKILMDTFEKHYKIPEDLAVSAYRPDILVYSRHLKTIIIVELTVPWETNIPKDHNIKSNKYYDLTNEMTKNGFKTQLYAVEVGARGLPAKTLHHLLKNLGLPRSAVTTFLDRMSKAALVGSYNIWLGRGDSEGREGEC

SEQ ID NO: 18572 - protein, 1108 aa, Tinea semifulvella
MPRVKAQQAIPSYYIAKKSKKNNTPGTVREGGRMNCPLVDNNNDPGDNMDLKCPTCGKIYRRQAWFKKHLKTHEGIEAQMVRPSTSTADRVSPHISHGTPPCEFNQESMTIRTRLSIPTIKETTWKVHDGNLAVMLDCPGTKQDLDSQVRAFQNTVYDYFSEHYPPTTTHAHTNKENTFKLKLRRKKRELRKRLRCAKNIGDKQQCHQMARALRSILKLIQGISLQIKDHSNQYNRARHEVLFDKNPFVYARKIFSEKSGVLSLTRDQIYKYYKDTYTEIQKEEQYLDPPSPRPVRPLEDFRCLPPSMEEMEEQIKRKSSKSAPGPDGIPYIVYKKCPHTRKHLYNIYRKIWSTNQVPKAFGEAVFVLIPKKTEVNDPKDARPIALTNTMSKIFFSIVQARMSRFMIKNEYFSRQHQKGFLPGVSGCLEHNTLLAECLKDARKQERQLSVCWIDLENAFGSVQHELLQTALKWYNFPTLIRDIIANYYKNLRFVVTNKDGYTDTLKYNVGLFQGCCLSPVAFNIIINILIDKLKSREKKWGYRFKQNNIYTESVLAFADDLAVITRNPKQCQGLLKIVDDFCSWTKGMRTKPSKCFSLCLARRNTTFTSYDPGLSIAGQRIAPVNETMPFKFLGRRINFQGKTPSLEVVVKQFTDDMNRVTQQPISNVKKAWIYDNYLASRLTWPFLVYDFNKSLLSSLDADVIRTLKSWLGLAQGADSSTFFRGRRNFGMDLKRPSELYKHLRISKYQILTSSQDNTISSLPRDPLVSDMEPRLLFFKKFMTGAQTDKRGIGWKKKESDKEVIKSFLRKDEEHEYRVHAMTLEVQNDWLTLGDFCIPPALKWRTLMYDWSPALLKFYLNAFQMSLPDQSNLVRWGKATEKNCTLCSAAIGTARHTLVGCVTLLEKGYYSRRHDKVLGVIHEAVSLSIARARKGLTTNKTLTTFVKEGQSTKTKCKPTSILGAASDWKILMDTFEHHYRIPDELAVSAYRPDILVFSRNLKKVILIELTVPWESNIPKDHNMKSNKYYDLTEEMIRNGFKTQLYAVEVGARGVPAKSLHHLLKELGLSRSAVNTFMERASKTALTESYSIWLGRERSRMVDGERIIPQ

SEQ ID NO: 18573 - protein, 1029 aa, Tinea semifulvella
MVRPSTSTADRVSPHISHGTPPCEFNQKSMNIRTRLSIPTIKETTWKVHDGNLAVMLDCPGTKQDLDSQVRAFQNTVYDYFSEHYPPTTTHAHTNKENTFKLKLRRKKRELRKRLRCAKNIGDKQQCHQVARALRSILKLIQGISLQIKDNSNQYNRARHEVLFDNNPFVYARKIFSEKSGVLSLTRDQIYKYYKETYTEIQKEEQYLDPPSPRPVRPLEDFRCLPPSMEEMEEQIKRKSSKSAPGPDGIPYIVYKKCPHTRKHLYNIYRKIWSTNQVPKAFGEAVFVLIPKKTEVNDPKDARPIALTNTMSKIFFSIVQARMSRFMIKNEYFSRQHQKGFLPGVSGCLEHNTLLAECLKDARKQERQLSVCWIDLENAFGSVQHELLQTALKWYNFPTLIRDIIANYYKNLRFVVTNKDGYTDTLKYNVGLFQGCCLSPVAFNIIINILIDKLKSREKKWGYRFKQNNIYTESVLAFADDLAVITRNPKQCQGLLKIVDDFCSWTKGMRTKPSKCFSLCLARRNTTFTSYDPGLSIAGQRIAPVNETMPFKFLGRRINFQGKTPSLEVVVKQFTDDMNRVTQQPISNVKKAWIYDNYLASRLTWPFLVYDFNKSLLSSLDADVIRTLKSWLGLAQGADSSTFFRGRRNFGMDLKRPSELYKHLRISKYQILTSSQDNTISSLPRDPLVSDMEPRLLFFKKFMTGAQTDKRGIGWKKKESDKEVIKSFLRKDEEHEYRVHAMTLEVQNDWLTLGDFCIPPALKWRTLMYDWSPALLKFYLNAFQMSLPDQSNLVRWGKATEKNCTLCGAAIGTARHTLVGCVTLLEKGYYSRRHDKVLGVIREAVSLSIARARKGLTTNKTLTTFVKEGQSTKTKCKPTSILGAASDWKILMDTFEHHYRIPDELAVSAYRPDILVFSRNLKKVILIELTVPWESNIPKDHNMKSNKYYDLTEEMIRNGFKTQLYAVEVGARGVPAKSLHHLLKELGLSRSAVNTFMERASKTALTESYSIWLGRERSRMVDGERIIAQ

SEQ ID NO: 18574 - protein, 801 aa, Tinea semifulvella
MEEMEEQIKRKSSKSAPGPDGIPYIVYKKCPHTRKHLYNIYRKIWSTNQVPKAFGEAVFVLIPKKTEVNDPKDARPIALTNTMSKIFFSIVQARMSRFMIKNEYFSRQHQKGFLPGVSGCLEHNTLLAECLKDARKQERQLSVCWIDLENAFGSVQHELLQTALKWYNFPTLIRDIIANYYKNLRFVVTNKDGYTDTLKYNVGLFQGCCLSPVAFNIIINILIDKLKSREKKWGYRFKQNNIYTESVLAFADDLAVITRNPKQCQGLLKIVDDFCSWTKGMRTKPSKCFSLCLARRNTTFTSYDPGLSIAGQRIAPVNETMPFKFLGRRINFQGKTPSLEVVVKQFTDDMNRVTQQPISNVKKAWIYDNYLASRLTWPFLVYDFNKSLLSSLDADVIRTLKSWLGLAQGADSSTFFRGRRNLGMDLKRPSELYKHLRISKYQILTSSQDNTISSLPRDPLVSDMEPRLLFFKKFMTGAQTDKRGIGWKKKESDKEVIKSFLRKDEEHGYRVHAMTLEVQNDWLTLGDFCIPPALKWRTLMYDWSPALLKFYLNAFQMSLPDQSNLVRWGKATEKNCTLCSAAIGTARHTLVGCVTLLEKGYYSRRHDKVLGVIREAVSLSIARARKGLTTNKTLTTFVKEGQSTKTKCKPTSILGAASDWKILMDTFEHHYRIPDELAVSAYRPDILVFSRNLKKVILIELTVPWESNIPKDHNMKSNKYYDLTEEMIRNGFKTQLYAVEVGARGVPAKSLHHLLKELGLSRSAVNTFMERASKTALTESYSIWLGRERSRMVDGERIIAQ

SEQ ID NO: 18575 - protein, 1108 aa, Tinea semifulvella
MPRVKAQQAIPSYYIAKKSKKNNTPGTVREGGRMNCPLVDNNNDPGDNMDLKCPTCGKIYRRQAWFKKHLKTHEGIEAQMVRPSTSTADRVSPHISHGTPPCEFNQESMTIRTRLSIPTIKETTWKVHDGNLAVMLDCPGTKQDLDSQVRAFQNTVYDYFSEHYPPTTTHAHTNKENTFKLKLRRKKRELRKRLRCAKNIGDKQQCHQVARALRSILKLIQGISLQIKDHSNQYNRARHEVLFDKNPFVYARKIFSEKSGVLSLTRDQIYKYYKETYTEIQKEEQYLDPPSPRPVRPLEDFRCLPPSMEEMEEQIKRKSSKSAPGPDGIPYIVYKKCPHTRKHLYNIYRKIWSTNQVPKAFGEAVFVLIPKKTEVNDPKDARPIALTNTMSKIFFSIVQARMSRFMIKNEYFSRQHQKGFLPGVSGCLEHNTLLAECLKDARKQERQLSVCWIDLENAFGSVQHELLQTALKWYNFPTLIRDIIANYYKNLRFVVTNKDGYTDTLKYNVGLFQGCCLSPVAFNIIINILIDKLKSREKKCGYRFKQNNIYTESVLAFADDLAVLTRNPKQCQGLLKIVDDFCSWTKGMRTKPSKCFSLCLARRNTTFTSYDPGLSIAGQRIAPVNETMPFKFLGRRINFQGKTPSLEVVVKQFTDDMNRVTQQPISNVKKAWIYDNYLASRLTWPFLVYDFNKSLLSSLDADVIRTLKSWLGLAQGADSSTFFRGRRNFGMDLKRPSELYKHLRISKYQILTSSQDNTISSLPRDPLVSDMEPRLLFFKKFMTGAQTDKRGIGWKKKESDKEVIKSFLRKDEEHEYRVHAMTLEVQNDWLTLGDFCIPPALKWRTLMYDWSPALLKFYLNAFQMSLPDQSNLVRWGKATEKNCTLCGAAIGTARHTLVGCVTLLEKGYYSRRHDKVLGVIREAVSLSIARARKGLTTNKTLTTFVKEGQSTKTKCKPTSILGAASDWKILMDTFEHHYRIPDELAVSAYRPDILVFSRNLKKVILIELTVPWESNIPKDHNMKSNKYYDLTEEMIRNGFKTQLYAVEVGARGVPAKSLHHLLKELGLSRSAVNTFMERASKTALTESYSIWLGRERSRMVDGERIIAQ

SEQ ID NO: 18576 - protein, 941 aa, Tinea semifulvella
MGLQLQNHWENVRRKLRRKKRELRKRLRCAKNIGDKQQCHQVARALRSILKLIQGISLQIKDNSNQYNRARHEVLFDNNPFVYARKIFSEKSGVLSLTRDQIYKYYKETYTEIQKEEQYLDPPSPRPVRPLEDFRCLPPSMEEMEEQIKRKSSKSAPGPYGIPYIVYKKCPHTRKHLYNIYRKIWSTNQVPKAFGEAVFVLIPKKTEVNDPKDARPIALTNTMSKIFFSIVQARMSRFMIKNEYFSRQHQKGFLPGVSGCLEHNTLLAECLKDARKQERQLSVCWIDLENAFGSVQHELLQTALKWYNFPTLIRDIIANYYKNLRFVVTNKDGYTDTLKYNVGLFQGCCLSPVAFNIIINILIDKLKSREKKWGYRFKQNNIYTESVLAFADDLAVITRNPKQCQGLLKIVDDFCSWTKGMRTKPSKCFSLCLARRNTTFTSYDPGLSIAGQRIAPVNETMPFKFLGRRINFQGKTPSLEVVVKQFTDDMNRVTQQPISNVKKAWIYDNYLASRLTWPFLVYDFNKSLLSSLDADVIRTLKSWLGLAQGADSSTFFRGRRNFGMDLKRPSELYKHLRISKYQILTSSQDNTISSLPRNPLVSDMEPRLLFFKKFMTGAQTDKRGIGWKKKESDKEVIKSFLRKDEEHEYRVHAMTLEVQNDWLTLGDFCIPPALKWRTLMYHWSPALLKFYLNAFQMSLPDQSNLVRWGKATEKNCTLCGAAIGTARHTLVGCVTLLEKGYYSRRHDKVLGVIREAVSLSIARARKGLTTNKTLTTFVKEGQSTKTKCKPTSILGAASDWKILMDTFEHHYRIPDELAVSAYRPDILVFSRNLKKVILIELTVPWESNIPKDHNMKSNKYYDLTEEMIRNGFKTQLYAVEVGARGVPAKSLHHLLKELGLSRSAVNTFMERASKTALTESYSIWLGRERSRMVDGERIIAQ

SEQ ID NO: 18577 - protein, 801 aa, Tinea semifulvella
MEEMEEQIKRKSSKSAPGPDGIPYIVYKKCPHTRKHLYNIYRKIWSTNQVPKAFGEAVFVLIPKKTEVNDPKDARPIALTNTMSKIFFSIVQARMSRFMIKNEYFSRQHQKGFLPGVSGCLEHNTLLAECLKDARKQERQLSVCWIDLENAFGSVQHELLQTALKWYNFPTLIRDIIANYYKNLRFVVTNKDGYTDTLKYNVGLFQGCCLSPVAFNIIINILIDKLKSREKKWGYRFKQNNIYTESVLAFADDLAVITRNPKQCQGLLKIVDDFCSWTKGMRTKPSKCFSLCLARRNTTFTSYDPGLSIAGQRIAPVNETMPFKFLGRRINFQGKTPSLEVVVKQFTDDMNRVTQQPISNVKKAWIYDNYLASRLTWPFLVYDFNKSLLSSLDADVIRTLKSWLGLAQGADSSTFFRGRRNFGMDLKRPSELYKHLRISKYQILTSSQDNTISSLPRDPLVSDMEPRLLFFKKFMTGAQTDKRGIGWKKKESDKEVIKSFLRKDEEHEYRVHAMTLEVQNDWLTLGDFCIPPALKWRTLMYDWSPALLKFYLNAFQMSLPDQSNLVRWGKATEKNCTLCGAAIGTARHTLVGCVTLLEKGYYSRRHDKVLGVIREAVSLSIARARKGLTTNKTLTTFVKEGQSTKTKCKPTSILGAASDWKILMDTFEHHYRIPDELAVSAYRPDILVFSRNLKKVILIELTVPWESNIPKDHNMKSNKYYDLTEEMIRNGFKTQLYAVEVGARGVPAKSLHHLLKELGLSRSAVNTFMERASKTALTESYSIWLGRERSRMVDGERIIAQ

SEQ ID NO: 18578 - protein, 1026 aa, Tinea semifulvella
MVRPSTSTADRVSPHISHGTPPCEFNQESMTIRTRLSIPTIKETTWKVHDGNLAVMLDCPGTKQDLDSQVRAFQNTVYDYFSEHYPPTTTHAHTNKENTFKLKLRRKKRELRKRLRCAKNIGDKQQCHQVARALRSILKLIQGISLQIKDNSNQYNRARHEVLFDNNPFVYARKIFSEKSGVLSLTRDQIYKYYKETYTEIQKEEQYLDPPSPRPVRPLEDFRCLPPSMEEMEEQIKRKSSKSAPGPDGIPYIVYKKCPHTRKHLYNIYRKIWSTNQVPKAFGEAVFVLIPKKTEVNDPKDARPIALTNTMSKIFFSIVQARMSRFMIKNEYFSRQHQKGFLPGVSGCLEHNTLLAECLKDARKQERQLSVCWIDLENAFGSVQHELLQTALKWYNFPTLIRDIIANYYKNLRFVVTNKDGYTDTLKYNVGLFQGCCLSPVAFNIIINILIDKLKSREKKWGYRFKQNNIYTESVLAFADDLAVITRNPKQCQGLLKIVDDFCSWTKGMRTKPSKCFSLCLARRNTTFTSYDPGLSIAGQRIAPVNETMPFKFLGRRINFQGKTPSLEVVVKQFTDDMNRVTQQPISNVKKAWIYDNYLASRLTWPFLVYDFNKSLLSSLDADVIRTLKSWLGLAQGADSSTFFRGRRNFGMDLKRPSELYKHLRISKYQILTSSQDNTISSLPRDPLVSDMEPRLLFFKKFMTGAQTDKRGIGWKKKESDKEVIKSFLRKDEEHEYRVHAMTLEVQNDWLTLGDFCIPPALKWRTLMYDWSPALLKFYLNAFQMSLPDQSNLVRWGKATEKNCTLCGAAIGTARHTLVGCVTLLEKGYYSRRHDKVLGVIREAVSLSIARARKGLTTNKTLTTFVKEGQSTKTKCKPTSILGAASDWKILMDTFEHHYRIPDELAYRPDILVFSRNLKKVILIELTVPWESNIPKDHNMKSNKYYDLTEEMIRNGFKTQLYAVEVGARGVPAKSLHHLLKELGLSRSAVNTFMERASKTALTESYSIWLGRERSRMVDGERIIAQ

SEQ ID NO: 18579 - protein, 1075 aa, Tinea semifulvella
MNCPLVDNNNDPGDNMDLKCPTCGKIYRRQAWFKKHLKIHEGIEAQMVRPSTSTADRVSPHISHGTPPCEFNQESMTIRTRLSIPTIKETTWKVHDENLAVMLDCPGTKQDLDSQVRAFQNTVYDYFSEHYPPTTTHAHTNKENTFKLKLRRKKRELRKRLRCAKNIGDKQQCHQVARALRSILKLIQGISLQIKDNSNQYNRARHEVLFDKNPFVYARKIFSEKSGVLSLTRDQIYKYYKETYTEIQKEEQYLDPPSPRPVRPLEDFRCLPPSMEEMEEQIKRKSSKSAPGPDGIPYIVYKKCPHTRKHLYNIYRKIWSTNQVPKAFGEAVFVLIPKKTEVNDPKDARPIALTNTMSKIFFSIIQARMSRFMIKNEYFSRQHQKGFLPGVSGCLEHNTLLAECLKDARKQERQLSVCWIDLENAFGSVQHELLQTALKWYNFPTLIRDIIANYYKNLRFVVTNKDGYTDTLKYNVGLFQGCCLSPVAFNIIINILIDKLKSREKKWGYRFKQNNIYTESVLAFADDLAVLTRNPKQCQGLLKIVDDFCSWTKGMRTKPSKCFSLCLARRNTTFTSYDPGLSIAGQRIAPVNETMPFKFLGRRINFQGKTPSLEVVVKQFTDDMNRVTQQPISNVKKAWIYDNYLASRLTWPFLVYDFNKSLLSSLDADVIRTLKSWLGLAQGADSSTFFRGRRNFGMDLKRPSELYKHLRISKYQILTSSQDNTIASLPKDHLVSDMEPRLLFFKKFMTGAQTDKRGIGWKKKESDKEVIKSFLRKDEEHEYRVHAMTLEVQNDWLTLGDICIPPALKWRTLMYDWSPALLKFYLNAFQMSLPDQSNLVRWGKATEKNCTLCGAAIGTARHTLVGCVTLLEKGYYSRRHDKVLGVIREAVSLSIARARKGLTTNKTLTTFVKEGQSTKTKCKPTSILGAASDWKILMDTFEHHYRIPDELAVSAYRPDILVFSRNLKKVILIELTVPWESNIPKDHNMKSNKYYDLTEEMIRNGFKTQLYAVEVGARGVPAKSLHHLLKELGLSRSAVNTFMERASKTALTESYSIWLGRERSRMVDGERIIAK

SEQ ID NO: 18580 - protein, 1092 aa, Tinea semifulvella
MMTSLIHEKERYITSDLAVWARPLPYHLIHHPSGEENQKKNKKKRSPRTYVFLLITHEGIEAQMVRPSTSTADRVSPHISHGTPPCEFNQESMTIRTRLSIPTIKETTWKVHDGNLAVMLDCPGTKQDLDSQVRAFQNTVYDYFSEHYPPTTTHAHTNKENTFKLKLRRKKRELRKRLRCAKNIGDKQQCHQVARALRSILKLIQGISLQIKDNSNQYNRARHEVLFDKNPFVYARKIFSEKSGVLSLTRDQIYKYYKETYTEIQKEEQYLDPPSPRPVRPLEDFRCLPPSMEEMDEQMKRKSSKSAPGPDGIPYIVYKKCPHTRKHLYNIYRKIWSTNQVPKAFGEAVFVLIPKKTEVNDPKDARPIALTNTMSKIFFSIVQARMSRFMIKNEYFSRQHQKGFLPGVSGCLEHNTLLAECLKDARKQERQLSVCWIDLENAFGSVQHELLQTALKWYNFPTLIRDIIANYYKNLRFVVTNKDGYTDTLKYNVGLFQGCCLSPVAFNIIINILIDKLKSREKKWGYRFKQNNIYTESVLAFADDLAVLTRNPKQCQGLLKIVDDFCSWTKGMRTKPSKCFSLCLARRNTTFTSYDPGLTIAGQRIAPVNETMPFKFLGRRINFQGKTPSLEVVVKQFTDDMNRVTQQPISNVKKAWIYDNYLASRLTWPFLVYDFNKSLLSSLDADVIRTLKSWLGLAQGADSSTFFRGRRNFGMDLKRPSELYKHLRISKYQILTSSQDNTISSLPRDPLVSDMEPRLLFFKKFMTGAQTDKRGIGWKKKESDKEVIKSFLRKDEEHEYRVHAMTLEVQNDWLTLGDFCIPPALKWRTLMYDWSPALLKFYLNAFQMSLPDQSNLVRWGKATEKNCTLCGAAIGTARHTLVGCVTLLEKGYYSRRHDKVLGVIREAVSLSIARARKGLTTNKTLTTFVKEGQSTKTKCKPISTLGAASDWKILMDTFEHHYRIPDELAVSAYRPDILVFSRNLKKVILIELTVPWESNIPKDHNMKSNKYYDLTEEMIRNGFKTQLYAVEVGARGVPAKSLHHLLKELGLSRSAVNTFMERASKTALTESYSIWLGRERSRMVDGERIIAQ

SEQ ID NO: 18581 - protein, 1108 aa, Tinea semifulvella
MPRVKAQQAIPSYYIAKKSKKNNTPGTVREGGRMNCPLVDNNNDPGDNMDLKCPTCGKIYRRQAWFKKHLKTHEGIEAQMVRPSTSTADRVSPHISHGTPPCEFNQESMTIRTRLSIPTIKETTWKVHDGNLAVMLDCPGTKQDLDSQVRAFQNTVYDYFSEHYPPTTTHAHTNKENTFKLKLRRKKRELRKRLRCAKNIGDKQQCHQVARALRSILKLIQGISLQIKDHSNQYNRARHEVLFDKNPFVYARKIFSEKSGVLSLTRDQIYKYYKETYTEIQKEEQYLDPPSPRPVRPLEDFRCLPPSMEEMEEQIKRKSSKSAPGPDGIPYIVYKKCPHTRKHLYNIYRKIWSTNQVPKAFGEAVFVLIPKKTEVNDPKDARPIALTNTMSKIFFSIVQARMSRFMIKNEYFSRQHQKGFLPGVSGCLEHNTLLAECLKDARKQERQLSVCWIDLENAFGSVQHELLQTALKWYNFPTLIRDIIANYYKNLRFVVTNKDGYTDTLKYNVGLFQGCCLSPVAFNIIINILIDKLKSREKKWGYRFKQNNIYTESVLAFADDLAVITRNPKQCQGLLKIVDDFCSWTKGMRTKPSKCFSLCLARRNTTFTSYDPGLSIAGQRIAPVNETMPFKFLGRRINFQGKTPSLEVVVKQFTDDMNRVTQQPISNVKKAWIYDNYLASRLTWPFLVYDFNKSLLSSLDADVIRTLKSWLGLAQGADSSTFFRGRRNFGMDLKRPSELYKHLRISKYQILTSSQDNTISSLPRDPLVSDMEPRLLFFKKFMTGAQTDKRGIGWKKKESDKEVIKSFLRKDEEHGYRVHAMTLEVQKDWLTLGDFCIPPALKWRTLMYDWSPALLKFYLNAFQMSLPDQSNLVRWGKATEKNCTLCSAAIGTARHTLVGCVTLLEKGYYSRRHDKVLGVIREAVSLSIARARKGLTTNKTLTTFVKEGQSTKTKCKPTSILGAASDWKILMDTFEHHYRIPDELAVSAYRPDILVFSRNLKKVILIELTVPWESNIPKDHNMKSNKYYDLTEEMIRNGFKTQLYAVEVGARGVPAKSLHHLLKELGLSRSAVNTFMERASKTALTESYSIWLGRERSRMVDGERIIAQ

SEQ ID NO: 18582 - protein, 900 aa, Tinea semifulvella
MSKCKYIKYMSYKSQNTIIIKKYNQYNRARHEVLFDKNPFVYARKIFSEKSGVLSLTRDQIYKYYKETYTEIQKEEQYLDPPSPRPVRPLEDFRCLPPSMEEMEEQIKRKSSKSAPGPDGIPYIVYKKCPHTRKHLYNIYRKIWSTNQVPKAFGEAVFVLIPKKTEVNDPKDARPIALTNTMSKIFFSIVQARMSRFMIKNEYFSRQHQKGFLPGVSGCLEHNTLLAECLKDARKQERQLSVCWIDLENAFGSVQHELLQTALKWYNFPTLIRDIIANYYKNLRFVVTNKDGYTDTLKYNVGLFQGCCLSPVAFNIIINILIDKLKSREKKWGYRFKQNNIYTESVLAFADDLAVITRNPKQCQGLLKIVDDFCSWTKGMRTKPSKCFSLCLARRNTTFTSYDPGLSIAGQRIAPVNETMPFKFLGRRINFQGKTPSLEVVVKQFTDDMNRVTQQPISNVKKAWIYDNYLASRLTWPFLVYDFNKSLLSSLDADVIRTLKSWLGLAQGADSSTFFRGRRNFGMDLKRPSELYKHLRISKYQILTSSQDNTISSLPRDPLVSDMEPRLLFFKKFMTGAQTDKRGIGWKKKESDKEVIKSFLRKDEEHGYRVHAMTLEVQNDWLTLGDFCIPPALKWRTLMYDWSPALLKFYLNAFQMSLPDQSNLVRWGKATEKNCTLCSAAIGTARHTLVGCVTLLEKGYYSRRHDKVLGVIREAVSLSIARARKGLTTNKTLTTFVKEGQSTKTKCKPTSILGAASDWKILMDTFEHHYRIPDELAVSAYRPDILVFSRNLKKVILIELTVPWESNIPKDHNMKSNKYYDLTEEMIRNGFKTQLYAVEVGARGVPAKSLHHLLKELGLSRSAVNTFMERASKTALTESYSIWLGRERSRMVDGERIIAQ

SEQ ID NO: 18583 - protein, 1060 aa, Tinea semifulvella
MDLKCPTCGKIYRRQAWFKKHLKTHEGIEAQMVRPSTSTADRVSPHISHGTPPCEFNQESMTIRTRLSIPTIKETTWKVHDGNLAVMLDCPGTKQDLDSQVRAFQNTVYDYFSEHYPPTTTHAHTNKENTFKLKLRRKKRELRKRLRCAKNIGDKQQCHQVARALRSILKLIQGISLQIKDHSNQYNRARHEVLFDKNPFVYARKIFSEKSGVLSLTRDQIYKYYKETYTEIQKEEQYLDPPSPRPVRPLEDFRCLPPSMEEMEEQIKRKSSKSAPGPDGIPYIVYKKCPHTRKHLYNIYRKIWSTNQVPKAFGEAVFVLIPKKTEVNDPKDARPIALTNTMSKIFFSIVQARMSRFMIKNEYFSRQHQKGFLPGVSGCLEHNTLLAECLKDARKQERQLSVCWIDLENAFGSVQHELLQTTLKWYNFPTLIRDIIANYYKNLRFVVTNKDGYTDTLKYNVGLFQGCCLSPVAFNIIINILIDKLKSREKKWGYRFKQNNIYTESVLAFADDLAVITRNPKQCQGLLKIVDDFCSWTKGMRTKPSKCFSLCLARRNTTFTSYDPGLSIAGQRIAPVNETMPFKFLGRRINFQGKTPSLEVVVKQFTDDMNRVTQQPISNVKKAWIYDNYLASRLTWPFLVYDFNKSLLSSLDADVIRTLKSGLGLAQGADSSTFFRGRRNFGMDLKRPSELYKHLRISKYQILTSSQDNTISSLPRDPLVSDMEPRLLFFKKFMTGAQTDKRGIGWKKKESDKEVIKSFLRKDEEHEYRVHAMTLEVQNDWLTLGDFCIPPALKWRTLMYDWSPALLKFYLNAFQMSLPDQSNLVRWGKATEKNCTLCGAAIGTARHTLVGCVTLLEKGYYSRRHDKVLGVIREAVSLSIARARKGLTTNKTLTTFVKEGQSTKTKCKPTSILGAASDWKILMDTFEHHYRIPDELAVSAYRPDILVFSRNLKKVILIELTVPWESNIPKDHNMKLNKYYDLTEEMIRNGFKTQLYAVEVGARGVPAKSLHHLLKELGLSRSAVNTFMERASKTALTESYSIWLGRERSRMVDGERIIAQ

SEQ ID NO: 18584 - protein, 922 aa, Tinea trinotella
MRRKKRELIKKLRWAKTMGDNHLCHQLARALRSILKLIQGISLQIDDHHNQFNRAKHEVAFDKNPFVYAKKIFSKKSGRLSLTKEQIYQYYSETYAKTHKEESYIEPPTLRPDNPSVDFQCSPPSIEEIEEQIKKKSSGSAPGPDGILYIVFKKCQHVRKHLHNIYGKIWSSKQVPKAFGEAVFVLIPKTANVTHPTDARPIALTNTVSKIFFSVLQVRMSRFMTNNKYFTPQHQKGFLPGISGCLEHNTLLGECLKDAREHERQLTVCWIDLENAFGSVQHQLLQTALKWYNFPSVVMDIIANYYNKLSFVIANKGVYTDPLKYNVGLFQGCCLSPVAFNIIINILIDKLKTKEKKFGYRFKLNNKYSESILAFADDLAVLTRNAKQCQELLKDIDQFCSWTKGLKTKPTKCFCLSLGRKDTKFTSFDPGLNMAGQRIAPVEEAVPFKFLGRRIDFKGKTPSLEVVIEGFIEDIKKIEERPIGNVKKAWIYDNYLTSRLTWPFLVYDFNKSLLFKLDAEVIKTLKSWLGLARGADSSTLFRGQQNFGMSFKKPSELYKHLRITKHQILTNSRDNLIASLPKDPLASEMEPRLQFHKAFMTGAQTSKKGLGWEKKKSDKEVIKSLLKQDEAHAYRVHATTLEVQNEWLTLGEICVPPALKWRTIMYDWSPALVKFYLNAFQMSLPDQSNLVRWGKGTDKTCTLCGLAVGTARHILVGCVTLLDRGCYSRRHDKVLEIIREAVSLSIGRARKGLSTNERHITFVKESHLRKSQNKPFSILRDAPDWKILMDTFEKHYKIPEDLAVSAYRPDILVYSRHLKTIIIVELTVPWETNIPKDHNIKSNKYYDLTNEMTKNGFKTQLYAVEVGARGLPAKTLHHLLKNLGLPRSAVTTFLDRMSKAALVGSYNIWLGRGDSEGREGEC

SEQ ID NO: 18585 - protein, 1108 aa, Tinea semifulvella
MPRVKAQQAIPSYYIAKKSKKNNTPGTVREGGRMNCPLVDNNNDPGDNMDLKCPTCGKIYRRQAWFKKHLKTHEGIEAQMVRPSTSTADRVSPHISHGTPPCEFNQESMTIRTRLSIPTIKETTWKVHDGNLAVMLDCPGTKQDLDSQVRAFQNTVYDYFSEHYPPTTTHAHTNKENTFKLKLRRKKRELRKRLRCAKNIGDKQRCHQVARALRSILKLIQGISLQIKDHSNQYNRARHEVLFDKNPFVYARKIFSEKSGVLSLTRDQIYKYYKETYTEIQNEEQYLDPPSPRPVRPLEDFRCLPPSMEEMEEQIKRKSSKSAPGPDGIPYIVYKKCPHTRKHLYNIYRKIWSTNQVPKAFGEAVFVLIPKKTEVNDPKDARPIALTNTMSKIFFSIVQARMSRFMIKNEYFSRQHQKGFLPGVSGCLEHNTLLAECLKDARKQERQLSVCWIDLENAFGSVQHELLQTALKWYNFPTLIRDIIANYYKNLRFVVTNKDGYIDTLKYNVGLFQGCCLSPVAFNIIINILIDKLKSREKKWGYRFKQNNIYTESVLAFADDLAVITRNPKQCQGLLKIVDDFCSWTKGMRTKPSKCFSLCLARRNTTFTSYDPGLSIAGQRIAPVNETMPFKFLGRRINFQGKTPSLEVVVKQFTDDMNRVTQQPISNVKKAWIYDNYLASRLTWPFLVYDFNKSLLSSLDADVIRTLKSWLGLAQGADSSTFFRGRRNFGMDLKRPSELYKHLRISKYQILTSSQDNTISSLPRDPLVSDMEPRLLFFKKFMTGAQTDKRGIGWKKKESDKEVIKSFLRKDEEHGYRVHAMTLEVQNDWLTLGDFCIPPALKWRTLMYDWSPALLKFYLNAFQMSLPDQSNLVRWGKATEKNCTLCSAAIGTARHTLVGCVTLLEKGYYSRRHDKVLGVIREAVSLSIARARKGLTTNKTLTTFVKEGQSTKTKCKPTSILGAASDWKILMDTFEHHYRIPDELAVSAYRPDILVFSRNLKKVILIELTVPWESNIPKDHNMKSNKYYDLTEEMIRNGFKTQLYAVEVGARGVPAKSLHHLLKELGLSRSAVNTFMERASKTALTESYSIWLGRERSRMVDGERIIAQ

SEQ ID NO: 18586 - protein, 801 aa, Tinea semifulvella
MEEMEEQIKRKSSKSAPGPDGIPYIVYKKCPHTRKHLYNIYRKIWSTNQVPKAFGEAVFVLIPKKTEVNDPKDARPIALTNTMSKIFFSIVQARMSRFMIKNEYFSRQHQKGFLPGVSGCLEHNTLLAECLKDARKQERQLSVCWIDLENAFGSVQHELLQTALKWYNFPTLIRDIIANYYKNLRFVVTNKDGYTDTLKYNVGLFQGCCLSPVAFNIIINILIDKLKSREKKWGYRFKQNNIYTESVLAFADDLAVITRNPKQCHGLLKIVDDFCSWTKGMRTKPSKCFSLCLARRNTTFTSYDPGLSIAGQRIAPVNETMPFKFLGRRINFQGKTPSLEVVVKQFTDDMNRVTQQPISNVKKAWIYDNYLASRLTWPFLVYDFNKSLLSSLDADVIRTLKSWLGLAQGADSSTFFRGRRNFGMDLKRPSELYKHLRISKYQILTSSQDNTISSLPRDPLVSDMEPRLLFFKKFMTGAQTDKRGIGWKKKESDKEVIKSFLRKDEEHEYRVHAMTLEVQNDWLTLGDFCIPPALKWRTLMYDWSPALLKFYLNAFQMSLPDQSNLVRWGKATEKNCTLCGAAIGTARHTLVGCVTLLEKGYYSRRHDKVLGVIREAVSLSIARARKGLTTNKTLTTFVKEGQSTKTKCKPTSILGAASDWKILMDTFEHHYRIPDELAVSAYRPDILVFSRNLKKVILIELTVPWESNIPKDHNMKSNKYYDLTEEMIRNGFKTQLYAVEVGARGVPAKSLHHLLKELGLSRSAVNTFMERASKTALTESYSIWLGRERSRMVDGERIIAQ

SEQ ID NO: 18587 - protein, 801 aa, Tinea semifulvella
MEEMDEQMKRKSSKSAPGPDGIPYIVYKKCPHTRKHLYNIYRKIWSTNQVPKAFGEAVFVLIPKKTEVNDPKDARPIALTNTMSKIFFSIVQARMSRFMIKNEYFSRQHQKGFLPGVSGCLEHNTLLAECLKDARKQERQLSVCWIDLENAFGSVQHELLQTALKWYNFPTLIRDIIANYYKNLRFVVTNKDGYTDTLKYNVGLFQGCCLSPVAFNIIINILIDKLKSREKKWGYRFKQNNIYTESVLAFADDLAVLTRNPKQCQGLLKIVDDFCSWTKGMRTKPSKCFSLCLARRNTTFTSYDPGLTIAGQRIAPVNETMPFKFLGRRINFQGKTPSLEVVVKQFTDDMNRVTQQPISNVKKAWIYDNYLASRLTWPFLVYDFNKSLLSSLDADVIRTLKSWLGLAQGADSSTFFRGRRNFGMDLKRPSELYKHLRISKYQILTSSQDNTISSLPRDPLVSDMEPRLLFFKKFMTGAQTDKRGIGWKKKESDKEVIKSFLRKDEEHEYRVHAMTLEVQNDWLTLGDFCIPPALKWRTLMYDWSPALLKFYLNAFQMSLPDQSNLVRWEKATEKNCTLCGAAIGTARHTLVGCVTLLEKGYYSRRHDKVLGVIREAVSLSIARARKGLTTNKTLTTFVKEGQSTKTKCKPTSILGAASDWKILMDTFEHHYRIPDELAVSAYRPDILVFSRNLKKVILIELTVPWESNIPKDHNMKSNKYYDLTEEMIRNGFKTQLYAVEVGARGVPEKSLHHLLKELGLSRSAVNTFMERASKTALTESYSIWLGRERSRMVDGERIIAQ

SEQ ID NO: 18588 - protein, 1029 aa, Tinea semifulvella
MVRPSTSTADRVSPHISHGTPPCEFNQESMTIRTRLSIPTIKETTWKVHDGNLAVMLDCPGTKQDLDSQVRAFQNTVYDYFSEHYPPTTTHAHTNKENTFKLKLRRKKRELRKRLRCAKNIGDKQQCHQVARALRSILKLIQGISLQIKDNSNQYNRARHEVLFDKNPFVYARKIFSEKSGVLSLTRDQIYKYYKETYTEIQKEEQYLDPPSPRPVRPLEDFRCLPPSMEEMEEQIKRKSSKSAPGPDGIPYIVYKKCPHTRKHLYNIYRKIWSTNQVPKAFGEAVFVLIPKKTEVNDPKDARPIALTNTMSKIFFSIVQARMSRFMIKNEYFSRQHQKGFLPGVSGCLEHNTLLAECLKDARKQERQLSVCWIDLENAFGSVQHELLQTALKWYNFPTLIRDIIANYYKNLRFVVTNKDGYTDTLKYNVGLFQGCCLSPVAFNIIINILIDKLKSREKKWGYRFKQNNIYTESVLAFADDLAVLTRNPKQCQGLLKIVDDFCSWTKGMRTKPSKCFSLCLARRNTTFTSYDPGLSIAGQRIAPVNETMPFKFLGRRINFQGKTPSLEVVVKQFTDDMNRVTQQPISNVKKAWIYDNYLASRLTWPFLVYDFNKSLLSSLDADVIRTLKSWLGLAQGADSSTFFRGRRNFGMDLKRPSELYKHLRISKYQILTSSQDNTISSLPKDPLVSDMEPRLLFFKKFMTGAQTDKRGIGWKKKESDKEVIKSFLRKDEEHEYRVHAMTLEVQNDWLTLGDFCIPPALKWRTLMYDWSPALLKFYLNAFQMSLPDQSNLVRWGKATEKNCTLCGAAIGTARHTLVGCVTLLEKGYYSRRHDKVLGVIREAVSLSIARARKGLTTNKTLTTFVKEGQSTKTKCKPTSILGAASDWKILMDTFEHHYRIPDELAVSAYRPDILVFSRNLKKVILIELTVPWESNIPKDHNMKSNKYYDLTEEMIRNGFKTQLYAVEVGARGVPAKSLHHLLKELGLSRSAVNTFMERASKTALTESYSIWLGRERSRMVDGERIIAK

SEQ ID NO: 18589 - protein, 1075 aa, Tinea semifulvella
MNCPLVDNNNDPGDNMDLKCPTCGKIYRRQAWFKKHLKTHEGIEAQMVRPSTSTADRVSPHISHGTPPCEFNQESMTIRTRLSIPTIKETTWKVHDGNLAVMLDCPGTKQDLDSQVRAFQNTVYDYFSEHYPPTTTHAHTNKENTFKLKLRRKKMELRKRLRCAKNIGDKQQCHQVARALRSILKLIQGISLQIKDNSNQYNRARHEVLFDNNPFVYARKIFSEKSGVLSLTRDQIYKYYKETYTEIQKEEQYLDPPSPRPVRPLEDFRCLPPSMEEMEEQIKKKSSKSAPGPDGIPYIVYKKCPHTRKHLYNIYRKIWSTNQVPKAFGEAVFVLIPKKTEVNDPKDARPIALTNTMSKIFFSIVQARMSRFMIKNEYFSRQHQKGFLPGVSGCLEHNTLLAECLKDARKQERQLSVCWIDLENAFGSVQHELLQTALKWYNFPTLIRDIIANYYKNLRFVVTNKDGYTDTLKYNVGLFQGCCLSPVAFNIIINILIDKLKSREKKWGYRFKQNNIYTESVLAFADDLAVITRNPKQCQGLLKIVDDFCSWTKGMRTKPSKCFSLCLARRNTTFTSYDPGLSIAGQRIAPVNETMPFKFLGRRINFQGKTPSLEVVVKQFTDDMNRVTQQPISNVKKAWIYDNYLASRLTWPFLVYDFNKSLLSSMDADVIRTLKSWLGLAQGADSSTFFRGRRNFGMDLKRPSELYKHLRISKYQILTSSQDNTISSLPRDPLVSDMEPRLLFFKKFMTGAQTDKRGIGWKKKESDKEVIKSFLRKDEEHEYRVHAMTLEVQNDWLTLGDFCIPPALKWRTLMYDWSPALLKFYLNAFQMSLPDQSNLVRWGKATEKNCTLCGAAIGTARHTLVGCVTLLEKGYYSRRHDKVLGVIREAVSLSIARARKGLTTNKTLTTFVKEGQSTKTKCKPTSILGAASDWKILMDTFEHHYRIPDELAVSAYRPDILVFSRNLKKVILIELTVPWESNIPKDHNMKSNKYYDLTEEMIRNGFKTQLYAVEVGARGVPAKSLHHLLKELGLSRSAVNTFMERASKTALTESYSIWLGRERSRMVDGERIIAK

SEQ ID NO: 18590 - protein, 1060 aa, Tinea semifulvella
MDLKCPTCGKIYRRQAWFKKHLKTHEGIEAQMVRPSTSTADRVSPHISHGTPPCEFNQESMTIRTRLSIPTIKETTWKVHDGNLAVMLDCPGTKQDLDSQVRAFQNTVYDYFSEHYPPTTTHAHTNKENTFKLKLRRKKRELRKRLRCAKNIGDKQQCHQVARALRSILKLIQGISLQIKDNSNQYNRARHEVLFDNNPVVYARKIFSEKSGVLSLTRDQIYKYYKETYTEIQKEEQYLDPPSPRPVRPLEDFRCLPPSMEEMEEQIKRKSSKSAPGPDGIPYIVYKKCPHTRKHLYNIYRKIWSTNQVPKAFGEAVLVLIPKKTEVNDPKDARPIALTNTMSKIFFSIVQARMSRFMIKNEYFSRQHQKGFLPGVSGCLEHNTLLAECLKDARKQERQLSVCWIDLENAFGSVQHELLQTALKWYNFPTLIRDIIANYYKNLRFVVTNKDGYTDTLKYNVGLFQGCCLSPVAFNIIINILIDKLKSREKKWGYRFKQNNIYTESVLAFADDLAVITRNPKQCQGLLKIVDDFCSWTKGMRTKPSKCFSLCLARRNTTFTSYDPGLSIAGQRIAPVNETMPFKFLGRRINFQGKTPSLEVVVKQFTDDMNRVTQQPISNVKKAWIYDNYLASRLTWPFLVYDFNKSLLSSLDADVIRTLKSWLGLAQGADSSTFFRGRRNFGMDLKRPSKLYKHLRISKYQILTSSQDNTISSLPRDPLVSDMEPRLLFFKKFMTGAQTDKRGIGWKKKESDKEVIKSFLRKDEEHEYRVHAMTLEVQNDWLTLGDFCIPPALKWRTLMYDWSPALLKFYLNAFQMSLPDQSNLVRWGKATEKNCTLCGAAIGTARHTFVGCVTLLEKGYYSRRHDKVLGVIREAVSLSIARARKGLTTNKTLTTFVKEGQSTKTKCKPTSILGAASDWKILMDTFEHHYRIPDELAVSAYRPDILVFSRNLKKVILIELTVPWESNIPKDHNMKSNKYYDLTEEMIRNGFKTQLYAVEVGARGVPAKSLHHLLKELGLSRSAVNTFMERASKTALTESYSIWLGRERSRMVDGERIIAQ

SEQ ID NO: 18591 - protein, 996 aa, Tinea trinotella
MNIRTRLSIPSIKDTTWKAHDHNLAVRLDCPGNKQDLDSQVKTFQDTIYNYFSEHYPPATAYAHNNKENTFKLKMRRKKRELIKKLRWAKTMGDNHLCHQLARALRSILKLIQGISLQIDDHHNQFNRAKHEVAFDKNPFVYAKKIFSKKSGRLSLTKEQIYQYYSETYAKTHKEESYIEPPTLRPDNPSVDFQCSPPSIEEIEEQIKKKSSGSAPGPDGIPYIVFKKCQHVRKHLHNIYGKIWSSKQVPKAFGEAVFVLIPKTANVTHPTDARPIALTNTVSKIFFSVLQVRMSRFMTNNKYFTPQHQKGFLPGISGCLEHNTLLGECLKDAREHERQLTVCWIDLENAFGSVQHQLLQTALKWYNFPSVVMDIIANYYNKLSFVIANKGVYTDPLKYNVGLFQGCCLSPVAFNIIINILIDKLKTKEKKFGYRFKLNNKYSESILAFADDLAVLTRNAKQCQELLKDIDQFCSWTKGLKTKPTKCFCLSLGRKDTKFTSFDPGLNMAGQRIAPVEEAVPFKFLGRRIDFKGKTPSLEVVIEGFIEDIKKIEERPIGNVKKAWIYDNYLTSRLTWPFLVYDFNKSLLFKLDAEVIKTLKSWLGLARGADSSTLFRGQQNFGMSFKKPSELYKHLRITKHQILTNSRDNLIASLPKDPLASEMEPRLQFHKAFMTGAQTSKKGLGWEKKKSDKEVIKSLLKQDEAHAYRVHATTLEVQNEWLTLGEICVPPALKWRTIMYDWSPALVKFYLNAFQMSLPDQSNLVRWGKGTDKTCTLCGLAVGTARHILVGCVTLLDRGCYSRRHDKVLEIIREAVSLSIGRARKGLSTNERHITFVKESHLRKSQNKPFSILCDAPDWKILMDTFEKHYKIPEDLAVSAYRPDILVYSRHLKTIIIVELTVPWETNIPKDHNIKSNKYYDLTNEMTKNGFKTQLYAVEVGARGLPAKTLHHLLKNLGLPRSAVTTFLDRMSKAALVGSYNIWLGRGDSEGREGEC

SEQ ID NO: 18592 - protein, 996 aa, Tinea trinotella
MNIRTRLSIPSIKDTTWKAHDHNLAVRLDCPGNKQDLDSQVKTFQDTIYNYFSEHYPPATAYAHNNKENTFKLKMRRKKRELIKKLRWAKTMGDNHLCHQLARALRSILKLIQGISLQIDDHHNQFNRAKHEVAFDKNPFVYAKKIFSKKSGRLSLTKEQIYQYYSETYAKTHKEESYIEPPTLRPDNPSVDFQCSPPSIEEIEEQIKKKSSGSAPGPDGIPYIVFKKCQHVRKHLHNIYGKIWSSKQVPKAFGEAVFVLIPKTANVTHPTDARPIALTNTVSKIFFSVLQVRMSRFMTNNKYFTPQHQKGFLPGISGCLEHNTLLGECLKDAREHERQLTVCWIDLENAFGSVQHQLLQTALKWYNFPSVVMDIIANYYNKLSFVIANKGVFTDPLKYNVGLFQGCCLSPVAFNIIINILIDKLKTKEKKFGYRFKLNNKYSESILAFADDLAVLTRNAKQCQELLKDIDQFCSWTKGLKTKPTKCFCLSLGRKDTKFTSFDPGLNMAGQRIAPVEEAVPFKFLGRRIDFKGKTPSLEVVIEGFIEDIKKIEERPIGNVKKAWIYDNYLTSRLTWPFLVYDFNKSLLFKLDAEVIKTLKSWLGLARGADSSTLFRGQQNFGMSFKKPSELYKHLRITKHQILTNSRDNLIASLPKDPLASEMEPRLQFHKAFMTGAQTSKKGLGWEKKKSDKEVIKSLLKQDEAHAYRVHATTLEVQNEWLTLGEICVPPALKWRTIMYDWSPALVKFYLNAFQMSLPDQSNLVRWGKGTDKTCTLCGLAVGTARHILVGCVTLLDRGCYSRRHDKVLEIIREAVSLSIGRARKGLSTNERHITFVKESHLRKSQNKPFSILRDAPDWKILMDTFEKHYKIPEDLAVSAYRPDILVYSRHLKTIIIVELTVPWETNIPKDHNIKSNKYYDLTNEMTKNGFKTQLYAVEVGARGLPAKTLHHLLKNLGLPRSAVTTFLDRMSKAALVGSYNIWLGRGDSEGREGEC

SEQ ID NO: 18593 - protein, 1029 aa, Tinea semifulvella
MVRPSTSTADRVSPHISHGTPPCEFNQESMTIRTRLSIPTIKETTWKVHDGNLAVMLDCPGTKQDLDSQVRAFQNTVYDYFSEHYPPTTTHAHTNKENTFKLKLRRKKRELRKRLRCAKNIGDKQQCHQVARALRSILKLIQGISLQIKDHSNQYNRARHEVLFDKNPFVYARKIFSEKSGVLSLTRDQIYKYYKETYTEIQKEEQYLDPPSPRPVRPLEDFRCLPPSMEEMEEQIKRKSSKSAPGPDGIPYIVYKKCPHTRKHLYNIYRKIWSTNQVPKAFGEAVFVLIPKKTEVNDPKDARPIALTNTMSKIFFSIVQARMSRFMIKNEYFSRQHQKGFLPGVSGCLEHNTLLAECLKDARKQERQLSVCWIDLENAFGSVQHELLQTALKWYNFPTLIRDIIANYYKNLRFVVTNKDGYTDTLKYNVGLFQGCCLSPVAFNIIINILIDKLKSREKKWGYRFKQNNIYTESVLAFADDLAVITRNPKQCQGLLKIVDDFCSWTKGMRTKPSKCFSLCLARRNTTFTSYNPGLSIAGQRIAPVNETMPFKFLGRRINFQGKTPSLEVVVKQFTDDMNRVTQQPISNVKKAWIYDNYLASRLTWPFLVYDFNKSLLSSLDADVIRTLKSWLGLAQGADSSTFFRGRRNFGMDLKRPSELYKHLRISKYQILTSSQDNTISSLPRDPLVSDMEPRLLFFKKFMTGAQTDKRGIGWKKKESDKEVIKSFLRKDEEHGYRVHAMTLEVQNDWLTLGDFCIPPALKWRTLMYDWSPALLKFYLNAFQMSLPDQSNLVRWGKATEKNCTLCSAAIGTARHTLVGCVTLLEKGYYSRRHDKVLGVIREAVSLSIARARKGLTTNKTLTTFVKEGQSTKTKCKPTSILGAASDWKILMDTFEHHYRIPDELAVSAYRPDILVFSRNLKKVILIELTVPWESNIPKDHNMKSNKYYDLTEEMIRNGFKTQLYAVEVGARGVPAKSLHHLLKELGLSRSAVNTFMERASKTALTESYSIWLGREKSRMVDGERIIAQ

SEQ ID NO: 18594 - protein, 1108 aa, Tinea semifulvella
MPRVKAQQAIPSYYIAKKSKKNNTPGTVREGGRMNCPLVDNNNDPGDNMDLKCPTCGKIYRRQAWFKKHLKTHEGIEAQMVRPSTSTADRVSPHISHGTPPCEFNQESMTIRTRLSIPTIKETTWKVHDGNLAVMLDCPGTKQDLDSQVRAFQNTVYDYFSEHYPPTTTHAHTNKENTFKLKLRRKKRELRKRLRCAKNIGDKQQCHQVARALRSILKLIQGISLQIKDNSNQYNRARHEVLFDNNPFVYARKIFSEKSGVLSLTRDQIYKYYKETYTEIQKEEQYLDPPSPRPVRPLEDFRCLPPSMEEMEEQIKRKSSKSAPGPDGIPYIVYKKCPHTRKHLYNIYRKIWSTNQVPKAFGEAVFVLIPKKTEVNDPKDARPIALTNTMSKIFFSIVQARMSRFMIKNEYFSRQHQKGFLPGVSGCLEHNTLLAECLKDARKQERQLSVCWIDLENAFGSVQHELLQTALKWYNFPTLIRDIIANYYKNLRFVVTNKDGYTDTLKYNVGLFQGCCLSPVAFNIIINILIDKLKSREKKWGYRFKQNNIYTESVLAFADDLAVITRNPKQCQGLLKIVDDFCSWTKGMRTKPSKCFSLCLARRNTTFTSYDPGLSIAGQRIAPVNETMPFKFLGRRINFQGKTPSLEVVVKQFTDDMNRVTQQPISNVKKAWIYDNYLASRLTWPFLVYDFNKSLLSSLDADVIRTLKSWLGLAQGADSSTFFRGRRNFGMDLKRPSELYKHLRISKYQILTSSQDNTISSLPRDPLVSDMEPRLLFFKKFMTGAQTDKRGIGWKKKESDKEVIKSFLRKDEEHKYRVHAMTLEVQNDWLTLGDFCIPPALKWRTLMYDWSPALLKFYLNAFQMSLPDQSNLVRWGKATEKNCTLCGAAIGTARHTLVGCVTLLEKGYYSRRHDKVLGVIREAVSLSIARARKGLTTNKTLTTFVKEGQSTKTKCKPTSILGAASDWKILMDTFEHHYRIPDELAVSAYRPDILVFSRNLKKVILIELTVPWESNIPKDHNMKSNKYYDLTEEMIRNGFKTQLYAVEVGARGVPAKSLHHLLKELGLSRSAVNTFMERASKTALTESYSIWLGRERSRMVDGERIIAQ

SEQ ID NO: 18595 - protein, 1108 aa, Tinea semifulvella
MPRVKAQQAIPSYYIAKKSKKNNTPGTVREGGRMNCPLVDNNNDPGDNMDLKCPTCGKIYRRQAWFKKHLKTHEGIEAQMVRPSTSTADRVSPHISHGTPPCEFNQESMTIRTRLSIPTIKETTWKVHDGNLAVMLDCPGTKQDLDSQVRAFQNTVYDYFSEHYPPTTTHAHTNKENTFKLKLRRKKRELRKRLRCAKNIGDKQQCHQVARALRSILKLIQGISLQIKDNSNQYNRARHEVLFDNNPFVYARKIFSEKSGVLSLTRDQIYKYYKETYTEIQKEEQYLDPPSPRPVRPLEDFRCLPLSMEEMEEQIKRKSSKSAPGPDGIPYIVYKKCPHTRKHLYNIYRKIWSTNQVPKAFGEAVFVLIPKKTEVNDPKDARPIALTNTMSKIFFSIVQARMSRFMIKNEYFSRQHQKGFLPGVSGCLEHNTLLAECLKDARKQERQLSVCWIDLENAFGSVQHELLQTALKWYNFPTLIRDIIANYYKNLRFVVTNKDGYTDTLKYNVGLFQGCCLSPVAFNIIINILIDKLKSREKKWGYRFKQNNIYTESVLAFADDLAVITRNPKQCQGLLKIVDDFCSWTKGMRTKPSKCFSLCLARRNTTFTSYDPGLSIAGQRIAPVNETMPFKFLGRRINFQGKTPSLEVVVKQFTDDMNRVTQQPISNVKKAWIYDNYLASRLTWPFLVYDFNKSLLSSLDADVIRTLKSWLGLAQGADSSTFFRGRRNFGMDLKRPSELYKHLRISKYQILTSSQDNTISSLPRDPLVSDMEPRLLFFKKFMTGAQTDKRGIGWKKNESDKEVIKSFLRKDEEHEYRVHAMTLEVQNDWLTLGDFCIPPALKWRTLMYDWSPALLKFYLNAFQMSLPDQSNLVRWGKATEKNCTLCGAAIGTARHTLVGCVTLLEKGYYSRRHDKVLGVIREAVSLSIARARKGLTTNKTLTTFVKEGQSTKTKCKPTSILGAASDWKILMDTFEHHYRIPDELAVSAYRPDILVFSRNLKKVILIELTVPWESNIPKDHNMKSNKYYDLTEEMIRNGFKTQLYAVEVGARGVPAKSLHHLLKELGLSRSAVNTFMERASKTALTESYSIWLGRERSRMVDGERIIAQ

SEQ ID NO: 18596 - protein, 1108 aa, Tinea semifulvella
MPRVKAQQAIPSYYIAKKSKKNNTPGTVREGGRMNCPLVDNNNDPGDNMDLKCPTCGKIYRRQAWFKKHLKTHEGIEAQMVRPSTSTADRVSPHISHGTPPCEFNQESMTIRTRLSIPTIKETTWKVHDGNLAVMLDCPGTKQDLDSQVRAFQNTVYDYFSEHYPPTTTHAHTNKENTFKLKLRRKKRELRKRLRCAKNIGDKQQCHQVARALRSILKLIQGISLQIKDNSNQYNRARHEVLFDKNPFVYARKIFSKKSGVLSLTRDQIYKYYKETYTEIQKEEQYLDPPSPRPVRPLEDFRCLPPSMEEMDEQMKRKSSKSAPGPDGIPYIVYKKCPHTRKHLYNIYRKIWSTNQVPKAFGEAVFVLIPKKTEVNDPKDARPIALTNTMSKIFFSIVQARMSRFMIKNEYFSRQHQKGFLPGVSGCLEHNTLLAECLKDARKQERQLSVCWIDLENAFGSVQHELLQTALKWYNFPTLIRDIIANYYKNLKFVVTNKDGYTDTLKYNVGLFQGCCLSPVAFNIIINILIDKLKSREKKWGYRFKQNNIYTESVLAFADDLAVLTRNPKQCQGLLKIVDDFCSWTKGMRTKPSKCFSLCLARRNTTFTSYDPGLTIAGQRIAPVNETMPFKFLGRRINFQGKTPSLEVVVKQFTDDMNRVTQQPISNVKKAWIYDNYLASRLTWPFLVYDFNKSLLSSLDADVIRTLKSWLGLAQGADSSTFFRGRRNFGMDLKRPSELYKHLRISKYQILTSSQDNTISSLPRDPLVSDMEPRLLFFKKFMTGAQTDKRGIGWKKKESDKEVIKSFLRKDEEHEYRVHAMTLEVQNDWLTLGDFCIPPALKWRTLMYDWSPALLKFYLNAFQMSLPDQSNLVRWGKATEKNCTLCGAAIGTARHTLVGCVTLLEKGYYSRRHDKVLGVIREAVSLSIARARKGLTTNKTLTTFVKEGQSTKTKCKPTSILGAASDWKILMDTFEHHYRIPDELAVSAYRPDILVFSRNLKKVILIELTVPWESNIPKDHNMKSNKYYDLTEEMIRNGFKTQLYAVEVGARGVPAKSLHHLLKELGLSRSAVNTFMERASKTALTESYSIWLGRERSRMVDGERIIAQ

SEQ ID NO: 18597 - protein, 996 aa, Tinea trinotella
MNIRTRLSIPSIKDTTWKAHDHNLAVRLDCPGNKQDLDSQVKTFQDTIYNYFSEHYPPATAYAHNNKENTFKLKMRRKKRELIKKLRWAKTMGDNHLCHQLARALRSILKLIQGISLQIDDHHNQFNRAKHEVAFDKNPFVYAKKIFSKKSGRLSLTKEQIYQYYSETYAKTHKEESYIEPPTLRPDNPSVDFQCSPPSIEEIEEQIKKKSSGSAPGPDGIPYIVFKKCQHVRKHLHNIYGKIWSSKQVPKAFGEAVFVLIPKTANVTHPTDARPIALTNTVSKIFFSVLQVRMSRFMTNNKYFTPQHQKGFLPGISGCLEHNTLLGECLKDAREHERQLTVCWIDLENAFGSVQHQLLQTALKWYNFPSVVMDIIANYYNKLSFVIANKGVYTDPLKYNVGLFQGCCLSPVAFNIIINILIDKLKTKEKKFGYRFKLNNKYSESILAFADDLAVLTRNAKQCQELLKDIDQFCSWTKGLKTKPTKCFCLSLGRKDTKFTSFDPGLNMAGQRIAPVEEAVPFKFLGRRIDFKGKTPSLEVVIEGFIEDIKKIEERPIGNVKKAWIYDNYLTSRLTWPFLVYDFNKSLLFKLDAEVIKTLKSWLGLARGADSSTLFRGQQNFGMSFKKPSELYKHLRITKHQILTNSRDNLIASLPKDPLASEMEPRLQFHKAFMTGAQTSKKGLGWEKKKSDKEVIKSLLKQDEAHAYRVHATTLEVQNEWLTLGEICVPPALKWRTIMYDWSPALVKFYLNAFQMSLPDQSNLVRWGKGTDKTCTLCGLAVGTARHILVGCVTLLDRGCYSRRHDKVLEIIREAVSLSIGRARKGLSTNERHITFVKESHLRKSQNKPFSILRDAPDWKILMDTFEKHYKIPEDLAVSAYRPDILVYSRHLKTIIIVELTVPWETNIPKDHNIKSNKYYDLTNEMTKNGFKTQLYAVEVGARGLPVKTLHHLLKNLGLPRSAVTTFLDRMSKAALVGSYNIWLGRGDSEGREGEC

SEQ ID NO: 18598 - protein, 1108 aa, Tinea semifulvella
MPRVKAQQAIPSYYIAKKSKKNNTPGTVREGGRMNCPLVDNNNDPGDNMDLKCPTCGKIYRRQAWFKKHLKTHEGIEAQMVRPSTSTADRVSPHISHGTPPCEFNQESMTIRTRLSIPTIKETTWKVHDGNLAVMLDCPGTKQDLDSQVRAFQNTVYDYFSEHYPPTTTHAHTNKENTFKLKLRRKKRELRKRLRCAKNIGDKQQGHQVARALRSILKLIQGISLQIKDHSNQYNRARHEVLFDKNPFVYARKIFSEKSGVLSLTRDQIYKYYKETYTEIQKEEQYLDPPSPRPVRPLEDFRCLPPSMEEMEEQIKRKSSKSAPGPDGIPYIVYKKCPHTRKHLYNIYRKIWSTNQVPKAFGEAVFVLIPKKTEVNDPKDARPIALTNTMSKIFFSIVQARMSRFMIKNEYFSRQHQKGFLPGVSGCLEHNTLLAECLKDARKQERQLSVCWIDLENAFGSVQHELLQTALKWYNFPTLIRDIIANYYKNLRFVVTNKDGYTDTLKYNVGLFQGCCLSPVAFNIIINILIDKLKSREKKWGYRFKQNNIYTESVLAFADDLAVITRNPKQCQGLLKIVDDFCSWTKGMRTKPSKCFSLCLARRNTTFTSYDPGLSIAGQRIAPVNETMPFKFLGRRINFQGKTPSLEVVVKQFTDDMNRVTQQPISNVKKAWIYDNYLASRLTWPFLVYDFNKSLLSSLDADVIRTLKSWLGLAQGADSSTFFRGRRNFGMDLKRPSELYKHLRISKYQILTSSQDNTISSLPRDPLASDMEPRLLFFKKFMTGAQTDKRGIGWKKKESDKEVIKSFLRKDEEHGYRVHAMTLEVQNDWLTLGDFCIPPALKWRTLMYDWSPALLKFYLNAFQMSLPDQSNLVRWGKATEKNCTLCSAAIGTARHTLVGCVTLLEKGYYSRRHDKVLGVIREAVSLSIARARKGLTTNKTLTTFVKEGQSTKTKCKPTSILGAASDWKILMDTFEHHYRIPDELAVSAYRPDILVFSRNLKKVILIELTVPWESNIPKDHNMKSNKYYDLTEEMIRNGFKTQLYAVEVGARGVPAKSLHHLLKELGLSRSAVNTFMERASKTALTESYSIWLGRERSRMVDGERIIAQ

SEQ ID NO: 18599 - protein, 1108 aa, Tinea semifulvella
MPRVKAQQAIPSYYIAKKSKKKNTPGTVREGGRMNCPLVDNNNDPGDNMDLKCPTCGKIYRRQAWFKKHLKTHEGIEAQMVRPSTSTADRVSPHISHGTPPCEFNQESMTIRTRLSIPTIKETTWKVHDGNLAVMLDCPGTKQDLDSQVRAFQNTVYDYFSEHYPPTTTHAHTNKENTFKLKLRRKKRELRKRLRCAKNIGDKQQCHQVARALRSILKLIQGISLQIKDNSNQYNRARHEVLFDNNPFVYARKIFSEKSGVLSLTRDQIYKYYKETYTEIQKEEQYLDPPSPRPVRPLEDFRCLPPSMEEMEEQIKRKSSKSAPGPDGIPYIVYKKCPHTRKHLYNIYRKVWSTNQVPKAFGEAVFVLIPKKTEVNDPKDARPIALTNTMSKIFFSIVQARMSRFMIKNEYFSRQHQKGFLPGVSGCLEHNTLLAECLKDARKQERQLSVCWIDLENAFGSVQHELLQTALKWYNFPTLIRDIIANYYKNLRFVVTNKDGYTDTLKYNVGLFQGCCLSPVAFNIIINILIDKLKSREKKWGYRFKQNNIYTESVLAFADDLAVITRNPKQCQGLLKIVDDFCSWTKGMRTKPSKCFSLCLARRNTTFTSYDPGLSIAGQRIAPVNETMPFKFLGRRINFQGKTPSLEVVVKQFTDDMNRVTQQPISNVKKAWIYDNYLASRLTWPFLVYDFNKSLLSSLDADVIRTLKSWLGLAQGADSSTFFRGRRNFGMDLKRPSELYKHLRISKYQILTSSQDNTISSLPRDPLVSDMEPRLLFFKKFMTGAQTDKRGIGWKKKESDKEVIKSFLRKDEEHEYRVHAMTLEVQNDWLTLGDFCIPPALKWRTLMYDWSPALLKFYLNAFQMSLPDQSNLVRWGKATEKNCTLCGAAIGTARHTLVGCVTLLEKGYYSRRHDKVLGVIREAVSLSIARARKGLTTNKTLTTFVKEGQSTKTKCKPTSILGAASDWKILMDTFEHHYRIPDELAVSAYRPDILVFSRNLKKVILIELTVPWESNIPKDHNMKSNKYYDLTEEMIRNGFKTQLYAVEVGARGVPAKSLHHLLKELGLSRSAVNTFMERASKTALTESYSIWLGRERSRMVDGERIIAQ

SEQ ID NO: 18600 - protein, 928 aa, Tinea semifulvella
MKLRRKKRELRKRLRCAKNIGDKQQCHQVARALRSILKLIQGISLQIKDNSNQYNRARHEVLFDKNPFVYARKIFSKKSGVLSLTRDQIYKYYKETYTEIQKEEQYLDPPSPRPVRPLEDFRCLPPSMEEMDEQMKRKSSKSAPGPDGIPYIVYKKCPHTRKHLYNIYRKIWSTNQVPKAFGEAVFVLIPKKTEVNDPKDARPIALTNTMSKIFFSIVQARMSRFMIKNEYFSRQHQKGFLPGVSGCLEHNTLLAECLKDARKQERQLSVCWIDLENAFGSVQHELLQTALKWYNFPTLIRDIIANYYKNLRFVVTNKDGYTDTLKYNVGLFQGCCLSPVAFNIIINILIDKLKSREKKWGYRFKQNNIYTESVLAFADDLAVLTRNPKQCQGLLKIVDDFCSWTKGMRTKPSKCFSLCLARRNTTFTSYDPGLTIAGQRIAPVNETMPFKFLGRRINFQGKTPSLEVVVKQFTDDMNRVTQQPISNVKKAWIYDNYLASRLTWPFLVYDFNKSLLSSLDADVIRTLKSWLGLAQGADSSTFFRGRRNFGMDLKRPSELYKHLRISKYQILTSSQDNTISSLPRDPLVSDMEPRLLFFKKFMTGAQTDKRGIGWKKKESDKEVIKSFLRKDEEHEYRVHAMTLEVQNDWLTLGDFCIPPALKWRTLMYDWSPALLKFYLNAFQMSLPDQSNLVRWGKATEKNCTLCGAAIGTARHTLVGCVTLLEKGYYSRRHDKVLGVIREAVSLSIARARKGLTTNKTLTTFVKEGQSTKTKCKPTSILGAASDWKILMDTFEHHYRIPDELAVSAYRPDILVFSRNLKKVILIELTVPWESNIPKDHNMKSNKYYDLTEEMIRNGFKTQLYAVEVGARGVPAKSLHHLLKELGLSRSAVNTFMERASKTALTESYSIWLGRERSRMVDGERIIAQ

SEQ ID NO: 18601 - protein, 1106 aa, Tinea semifulvella
MPRVKAQQAIPSYYIAKKSKKNNTPGTVREGGRMNCPLVDNNNDPGDNMDLKCPTCGKIYRRQAWFKKHLKTHGGIEAQMVRPSTSTADRVSPHISHGTPPCEFNQESMTIRTRLSIPTIKETTWKVHDGNLAVMLDCPGTKQDLDSQVRAFQNTVYDYFSEHYPPTTTHAHTNKENTFKLKLRRKKRELRKRLRCAKNIGDKQQCHQVARALRSILKLIQGISLQIKDNSNQYNRARHEVLFDKNPFVYARKSEKSGVLSLTRDQIYKYYKETYTEIQKEEQYLDPPSPRPVRPLEDFRCLPPSMEEMDEQMKRKSSKSAPGPDGIPYIVYKKCPHTRKHLYNIYRKIWSTNQVPKAFGEAVFVLIPKKTEVNDPKDARPIALTNTMSKIFFSIVQARMSRFMIKNEYFSRQHQKGFLPGVSGCLEHNTLLAECLKDARKQERQLSVCWIDLENAFGSVQHELLQTALKWYNFPTLIKDIIANYYKNLRFVVTNKDGYTDTLKYNVGLFQGCCLSPVAFNIIINILIDKLKSREKKWGYRFKQNNIYTESVLAFADDLAVLTRNPKQCQGLLKIVDDFCSWTKGMRTKPSKCFSLCLARRNTTFTSYDPGLTIAGQRIAPVNETMPFKFLGRRINFQGKTPSLEEVVKQFTDDMNRVTQQPISNVKKAWIYDNYLASRLTWPFLVYDFNKSLLSSLDADVIRTLKSWLGLAQGADSSTFFRGRRNFGMDLKRPSELYKHLRISKYQILTSSQDNTISSLPRDPLVSDMEPRLLFFKKFMTGAQTDKRGIGWKKKESDKEVIKSFLRKDEEHEYRVHAMTLEVQNDWLTLGDFCIPPALKWRTLMYDWSPALLKFYLNAFQMSLPDQSNLVRWGKATEKNCTLCGAAIGTARHTLVGCVTLLEKGYYSRRHDKVLGVIREAVSLSIARARKGLTTNKTLTTFVKEGQSTKTKCKPTSILGAASDWKILMDTFEHHYRIPDELAVSAYRPDILVFSRNLKKVILIELTVPWESNIPKDHNMKSNKYYDLTEEMIRNGFKTQLYAVEVGARGVPAKSLHHLLKELGLSRSAVNTFMERASKTALTESYSIWLGRERSRMVDGERIIAQ

SEQ ID NO: 18602 - protein, 1077 aa, Tinea semifulvella
MNCPLVDNNNDPGDNMDLKCPTCGKIYRRQAWFKKHLKTHEGIEAQMVRPSTSTADRVSPHISHGTPPCEFNQESMTIRTRLSIPTIKETTWKVHDGNLAVMLDCPGTKQDLDSQVRAFQNTVYDYFSEHYPPTTTHAHTNKENTFKLKLRRKKRELRKRLRCAKNIGDKQQGHQVARALRSILKLIQGISLQIKDHSNQYNRARHEVLFDKNPFVYARKIFSEKSGVLSLTRDQIYKYYKETYTEIQKEEQYLDPPSPRPVRPLEDFRCLPPSMEEMEEQIKRKSSKSAPGPDGIPYIVYKKCPHTRKHLYNIYRKIWSTNQVPKAFGEAVFVLIPKKTEVLVNDPKDARPIALTNTMSKIFFSIVQARMSRFMIKNEYFSRQHQKGFLPGVSGCLEHNTLLAECLKDARKQERQLSVCWIDLENAFGSVQHELLQTALKWYNFPTLIRDIIANYYKNLRFVVTNKDGYTDTLKYNVGLFQGCCLSPVAFNIIINILIDKLKSREKKWGYRFKQNNIYTESVLAFADDLAVITRNPKQCQGLLKIVDDFCSWTKGMRTKPSKCFSLCLARRNTTFTSYDPGLSIAGQRIAPVNETMPFKFLGRRINFQGKTPSLEVVVKQFTDDMNRVTQQPISNVKKAWIYDNYLASRLTWPFLVYDFNKSLLSSLDADVIRTLKSWLGLAQGADSSTFFRGRRNFGMDLKRPSELYKHLRISKYQILTSSQDNTISSLPRDPLVSDMEPRLLFFKKFMTGAQTDKRGIGWKKKESDKEVIKSFLRKDEEHGYRVHAMTLEVQNDWLTLGDFCIPPALKWRTLMYDWSPALLKFYLNAFQMSLPDQSNLVRWGKATEKNCTLCSAAIGTARHTLVGCVTLLEKGYYSRRHDKVLGVIREAVSLSIARARKGLTTNKTLTTFVKEGQSTKTKCKPTSILGAASDWKILMDTFEHHYRIPDELAVSAYRPDILVFSRNLKKVILIELTVPWESNIPKDHNMKSNKYYDLTEEMIRNGFKTQLYAVEVGARGVPAKSLHHLLKELGLSRSAVNTFMERASKTALTESYSIWLGRERSRMVDGERIIAQ

SEQ ID NO: 18603 - protein, 1075 aa, Tinea semifulvella
MNCPLVDNNNDPGDNMDLKCPTCGKIYRRQAWFKKHLKTHEGIEAQMVRPSTSTADRVSPHISHGTPPCEFNQESMTIRTRLSIPTIKETTWKVHDGNLAVMLDCPGTKQDLDSQVRAFQNTVYDYFSEHYPPTTTHAHTNKENTFKLKLRRKKRELRKRLRCAKNIGDKQQCHQVARALRSILKLIQGISLQIKDNSNQYNRARHEVLFDNNPFVYARKIFSEKSGVLSLTRDQIYKYYKETYTEIQKEEQYLDPPSPRPVRPLEDFRCLPPSMEEMEEQIKRKSSKSAPGPDGIPYIVYKKCPHTRKHLYNIYRKIWSTNQVPKAFGEAVFVLIPKKTEVNDPKDARPIALTNTMSKIFFSIVQARMSRFMIKNEYFSRQHQKGFLPGVSGCLEHNTLLAECLKDARKQERQLSVCWIDLENAFGSVQHELLQTALKWYNFPTLIRDIIANYYKNLRFVVTNKDGYTDTLKYNVGLFQGCCLSPVAFNIIINILIDKLKSREKKWGYRFKQNNIYTESVLAFADDLAVITRNPKQCQGLLKIVDDFCSWTKGMRTKPSKCFSLCLARRNTTFTSYDPGLSIAGQRIAPVNETMPFKFLGRRINFQGKTPSLEVVVKQFTDDMNRVTQQPISNVKKAWIYDNYLASRLTWPFLVYDFNKSLLSSLDADVIRTLKSWLGLAQGADSSTFFRGRRNFGMDLKRPSELYKHLRISKYQILTSSQDNTISSLPRDPLVSDMEPRLLFFKKFMTGAQTDKRGIGWKKKESDKEVIKSFLRKDEEHEYRVHAMTLEVQNDWLTLGDFCIPPALKWRTLMYDWSPALLKFYLNAFQMSLPDQSNLVRWGKATEKNCTLCGAAIGTARHTLVGCVTLLEKGYYSRRHDKVLGVIREAVSLSIARARKGLTTNKTLTTFVKEGQSTKTKCKPTSILGAASDWKILMDTFEHHYRIPDELAVSAYRPDILVFSRNLKKVILIELTVPWESNIPKDHNMKSNKYYDLTEEMIRNGFKTQLYAVEVGARGVPAKSLHHLLKELGLSRSAVNTFMERASKTALTESYSIWLGRERSRMVDGERIIAQ

SEQ ID NO: 18604 - protein, 974 aa, Tinea semifulvella
MLDCPGTKQDLDSQVRAFQNTVYDYFSEHYPPTTTHAHTNKENTFKLKLRRKKRELRKRLRCAKNIGDKQQCHQVARALRSILKLIQGISLQIKDNSNQYNRARHEVLFDNNPFVYARKIFSEKSGVLSLTRDQIYKYYKETYTEIQKEEQYLDPPSPRPVRPLEDFRCLPPSMEEMEEQIKRKSSKSAPGPDGIPYIVYKKCPHTRKHLYNIYRKIWSTNQVPKAFGEAVFVLIPKKTEVNDPKDARPIALTNTMSKIFFSIVQARMSRFMIKNEYFSRQHQKGFLPGVSGCLEHNTLLAECLKDARKQERQLSVCWIDLENAFGSVQHELLQTALKWYNFPTLIRDIIANYYKNLRFVVTNKDGYTDTLKYNVGLFQGCCLSPVAFNIIINILIDKLKSREKKWGYRFKQNNIYTESVLAFADDLAVITRNPKQCQGLLKIVDDFCSWTKGMRTKPSKCFSLCLARRNTTFTSYDPGLSIAGQRIAPVNETMPFKFLGRRINFQGKTPSLEVVVKQFTDDMNRVTQQPISNVKKAWIYDNYLASRLTWPFLVYDFNKSLLSSLDADVIRTLKSWLGLAQGADSSTFFRGRRNFGMDLKRPSELYKHLRISKYQILTSSQDNTISSLPRDPLVSDMEPRLLFFKKFMTGAQTDKRGIGWKKKESDKEVIKSFLRKDEEHEYRVHAMTLEVQNDWLTLGDFCIPPALKWRTLMYDWSPALLKFYLNAFQMSLPDQSNLVRWGKATEKNCTLCGAAIGTARHTLVGCVTLLEKGYYSRRHDKVLGVIREAVSLSIARARKGLTTNKTLTTFVKEGQSTKTKCKPTSILGAASDWKILMDTFEHHYRIPDELAVSAYRPDILVFSRNLKKVILIELTVPWESNIPKDHNMKSNKYYDLTEEMIRNGFKTQLYAVEVGARGVPAKSLHHLLKELGLSRSAVNTFMERASKTALTESYSIWLGRERSRMVDGERIIAQ

SEQ ID NO: 18605 - protein, 1075 aa, Tinea semifulvella
MNCPLVDNNNDPGDNMDLKCPTCGKIYKRQAWFKKHLKIHEGIEAQMVRPSTSTADRVSPHISHGTPPCEFNQESMTIRTRLSIPTIKETTWNVHDGNLAVMLDCPGTKQDLDSQVRAFQNTVYDYFSEHYPPTTTHAHTNKENTFKLKLRRKKRELRKRLRCAKNIGDKQQCHQVARALRSILKLIQGISLQIKDNSNQYNRARHEVLFDKNPFVYARKIFSEKSGVLSLTRDQIYKYYKETYTEIQKEEQYLDPPSPRPVRPLEDFRCLPPSMEEMEEQIKRKSSKSAPGPDGIPYIVYKKCPHTRKHLYNIYRKIWSTNQVRKAFGEAVFVLIPKKTEVNDPKDARPIALTNTMSKIFFSIVQARMSRFMIKNEYFSRQHQKGFLPGVSGCLEHNTLLAECLKDARKQERQLSVCWIDLENAFGSVQHELLQTALKWYNFPTLIRDIIANYYKNLRFVVTNKDGYTDTLKYNVGLFQGCCLSPVAFNIIINILIDKLKSREKKWGYRLKQNNIYTESVLAFADDLAVLTRNPKQCQGLLKIVDDFCSWTKGMRTKPSKCFSLCLARRNTTFTSYDPGLSIAGQRIAPVNETMPFKFLGRRINFQGKTPSLEVVVKQFTDDMNRVTQQPISNVKKAWIYDNYLASRLTWPFLVYDFNKSLLSSLDADVIRTLKSWLGLAQGADSSTFFRGRRNFGMDLKRPSELYKHLRISKYQILTSSQDNTISSLPKDPLVSDMEPRLLFFKKFMTGAQTDKRGIGWKKKESDKEVIKSFLRKDEEHEYRVHAMTLEVQNDWLTLGDFCIPPALKWRTLMYDWSPALLKFYLNAFQMSLPDQSNLVRWGKATEKNCTLCGAAIGTARHTLVGCVTLLEKGYYSRRHDKVLGVIREAVSLSIARARKGLTTNKTLTTFVKEGQSTKTKCKPTSILGAASDWKILMDTFEHHYRIPDELAVSAYRPDILVFSRNLKKVILIELTVPWESNIPKDHNMKSNKYYDLTEEMIRNGFKTQLYAVEVGARGVPAKSLHHLLKELGLSRSAVNTFIERASKTALTESYSIWLGRERSRMVDGERIIAK

SEQ ID NO: 18606 - protein, 1108 aa, Tinea semifulvella
MPRVKAQQAIPSYYIAKKSKKNNTPGTVREGGRMNCPLVDNNNDPGDNMDLKCPTCGKIYRRQAWFKKHLKTHEGIEAQMVRPSTSTADRVSPHISHGTPPCEFNQESMTIRTRLSIPTIKETTWKVHDGNLAVMLDCPGTKQDLDSQVRAFQNTVYDYFSEHYPPTTTHAHTNKENTFKLKLRRKKRELRKRLRCAKNIGDKQQCHQVARALRSILKLIQGISLQIKDNSNQYNRARHEVLFDKNPFVYARKIFSEKSGVLSLTRDQIYKYYKETYTEIQKEEQYLDPPSPRPVRPLEDFRCLPPSMEEMDEQMKRKSSKSAPGPDGIPYIVYKKCPHTRKHLYNIYRKIWSTNQVPKAFGEAVFVLIPKKTEVNDPKDARPIALTNTMSKIFFSIVQARMSRFMIKNEYFSRQHQKGFLPGVSGCLEHNTLLAECLKDARKQERQLSVCWIDLENAFGSVQHELLQTALKWYNFPTLIRDIIANYYKNLRFVVTNKDGYTDTLKYNVGLFQGCCLSPVAFNIIINILIDKLKSREKKWGYRFKQNNIYTESVLAFADDLAVLTRNPKQCQGLLKIVDDFCSWTKGMRTKPSKCFSLCLARRNTTFTSYDPGLTIAGQRIAPVNETMPFKFLGRRINFQGKTPSLEVVVKQFTDDMNRVTQQPISNVKKAWIYDNYLASRLTWPFLVYDFNKSLLSSLDADVIRTLKSWLGLAQGADSSTFFRGRRNFGMDLKRPSELYKHLRISKYQILTSSQDNTISSLPRDPLVSDMEPRLLFFKKFMTGAQTDKRGIGWKKKESDKEVIKSFLRKDEEHEYRVHAMTLEVQNDWLTLGDFCIPPALKWRTLMYDWSPALLKFYLNAFQMSLPDQSNLVRWGKATEKNCTLCGAAIGTARHTLVGCVTLLEKGYYSRRHDKVLGVIREAVSLSIARARKGLTTNKTLTTFVKEGQSTKTKCKHTSILGAASDWKILMDTFEHHYRIPDELAVSAYRPDILVFSRNLKKVILIELTVPWESNIPKDHNMKSNKYYDLTEEMIRNGFKTQLYAVEVGARGVPAKSLHHLLKELGLSRSAVNTFMVRASKTALTESYSIWLGRERSRMVDGERIIAQ

SEQ ID NO: 18607 - protein, 1108 aa, Tinea semifulvella
MPRVKAQQAIPSYYIAKKSKKNNTPGTVREGGRMNCPLVDNNNDPGDNMDLKCPTCGKIYRRQAWFKKHLKTHEGIEAQMARPSTSTADRVSPHISHGTPPCEFNQESMTIRTRLSIPTIKETTWKVHDGNLAVMLDCPGTKQDLDSQVRAFQNTVYDYFSEHYPPTTTHAHTNKENTFKLKLRRKKRELRKRLRCAKNIGDKQQGHQVARALRSILKLIQGISLQIKDHSNQYNRARHEVLFDKNPFVYARKIFSEKSGVLSLTRDQIYKYYKETYTEIQKEEQYLDPPSPRPVRPLEDFRCLPPSMEEMEEQIKRKSSKSAPGPDGIPYIVYKKCPHTRKHLYNIYRKIWSTNQVPKAFGEAVFVLIPKKTEVNDPKDARPIALTNTMSKIFFSIVQARISRFMIKNEYFSRQHQKGFLPGVSGCLEHNTLLAECLKDARKQERQLSVCWIDLENAFGSVQHELLQTALKWYNFPTLIRDIIANYYKNLRFVVTNKDGYTDTLKYNVGLFQGCCLSPVAFNIIINILIDKLKSREKKWGYRFKQNNIYTESVLAFADDLAVITRNPKQCQGLLKIVDDFCSWTKGMRTKPSKCFSLCLARRNTTFTSYDPGLSIAGQRIAPVNETMPFKFLGRRINFQGKTPSLEVVVKQFTDDMNRVTQQPISNVKKAWIYDNYLASRLTWPFLVYDFNKSLLSSLDADVIRTLKSWLGLAQGADSSTFFRGRRNFGMDLKRPSELYKHLRISKYQILTSSQDNTISSLPRDPLVSDMEPRLLFFKKFMTGAQTDKRGIGWKKKESDKEVIKSFLRKDEEHGYRVHAMTLEVQNDWLTLGDFCIPPALKWRTLMYDWSPALLKFYLNAFQMSLPDQSNLVRWGKATEKNCTLCSAAIGTARHTLVGCVTLLEKGYYSRRHDKVLGVIREAVSLSIARARKGLTTNKTLTTFVKEGQSTKTKCKPTSILGAASDWKILMDTFEHHYRIPDELAVSAYRPDILVFSRNLKKVILIELTVPWESNIPKDHNMKSNKYYDLTEEMIRNGFKTQLYAVEVGARGVPAKSLHHLLKELGLSRSAVNTFMERASKTALTESYSIWLGRERSRMVDGERIIAQ

SEQ ID NO: 18608 - protein, 1029 aa, Tinea semifulvella
MVRPSTSTADRVSPHISHGTPPCEFNQESMTIRTRLSIPTIKETTWKVHDGNLAVMLDCPGTKQDLDSQVRAFQNTVYDYFSEHYPPTTTHAHTNKENTFKLKLRRKKRELRKRLRCAKNIGDKQQGHQVARALRSILKLIQGISLQIKDHSNQYNRARHEVLFDKNPFVYARKIFSEKSGVLSLTRDQIYKYYKETYTEIQKEEQYLDPPSPRPVRPLEDFRCLPPSMEEMEEQIKRKSSKSAPGPDGIPYIVYKKCPHTRKHLYNIYRKIWSTNQVPKAFGEAVFVLIPKKTEVNDPKDARPIALTNTMSKIFFSIVQARMSRFMIKNEYFSRQHQKGFLPGVSGCLEHNTLLAECLKDARKQERQLSVCWIDLENAFGSVQHELLQTALKWYNFPTLIRDIIANYYKNLRFVVTNKDGYTDTLKYNVGLFQGCCLSPVAFNIIINILIDKLKSREKKWGYRFKQNNIYTESVLAFADDLAVITRNPKQCQGLLKIVDDFCSWTKGMRTKPSKCFSLCLARRNTTFTSYGPGLSIAGQRIAPVNETMPFKFLGRRINFQGKTPSLEVVVKQFTDDMNRVTQQPISNVKKAWIYDNYLASRLTWPFLVYDFNKSLLSSLDADVIRTLKSWLGLAQGADSSTFFRGRRNFGMDLKRPSELYKHLRISKYQILTSSQDNTISSLPRDPLASDMEPRLLFFKKFMTGAQTDKRGIGWKKKESDKEVIKSFLRKDEEHGYRVHAMTLEVQNDWLTLGDFCIPPALKWRTLMYDWSPALLKFYLNAFQMSLPDQSNLVRWGKLTEKNCTLCSAAIGTARHTLVGCVTLLEKGYYSRRHDKVLGVIREAVSLSIARARKGLTTNKTLTTFVKEGQSTKTKCKPTSILGAASDWKILMDTFEHHYRIPDELAVSAYRPDILVFSRNLKKVILIELTVPWESNIPKDHNMKSNKYYDLTEEMIRNGFKTQLYAVEVGARGVPAKSLHHLLKELGLSRSAVNTFMERASKTALTESYSIWLGRERSRMVDGERIIAQ

SEQ ID NO: 18609 - protein, 996 aa, Tinea trinotella
MNIRTRLSIPSIKDTTWKAHDHNLAVRLDCPGNKQDLDSQVKTFQDTIYNYFSEHYPPATAYAHNNKENTFKLKMRRKKRELIKKLRWAKTMGDNHLCHQLARALRSILKLIQGISLQIDDHHNQFNRAKHEVAFDKNPFVYAKKIFSTKSGRLSLTKEQIYQYYSETYAKTHKEESYIEPPTLRPDNPSVDFQCSPPSIEEIEEQIKKKSSGSAPGPDGIPYIVFKKCQHVRKHLHNIYGKIWSSKQVPKAFGEAVFVLIPKTANVTHPTDARPIALTNTVSKIFFSVLQVRMSRFMTNNKYFTPQHQKGFLPGISGCLEHNTLLGECLKDAREHERQLTVCWIDLENAFGSVQHQLLQTALKWYNFPSVVMDIIANYYNKLSFVIANKGVYTDPLKYNVGLFQGCCLSPVAFNIIINILIDKLKTKEKKFGYRFKLNNKYSESILAFADDLAVLTRNAKQCQELLKDIDQFCSWTKGLKTKPTKCFCLSLGRKDTKFTSFDPGLNMAGQRIAPVEEAVPFKFLGRRIDFKGKTPSLEVVIEGFIEDIKKIEERPIGNVKKAWIYDNYLTSRLTWPFLVYDFNKSLLFKLDAEVIKTLKSWLGLARGADSSTLFRGQQNFGMSFKKPSELYKHLRITKHQILTNSRDNLIASLPKDPLASEMEPRLQFHKAFMTGAQTSKKGLGWEKKKSDKEVIKSLLKQDEAHAYRVHATTLEVQNEWLTLGEICVPPALKWRTIMYDWSPALVKFYLNAFQMSLPDQSNLVRWGKGTDKTCTLCGLAVGTARHILVGCVTLLDRGCYSRRHDKVLEIIREAVSLSIGRARKGLSTNERHITFVKESHLRKSQNKPFSILRDAPDWKILMDTFEKHYKIPEDLAVSAYRPDILVYSRHLKTIIIVELTVPWETNIPKDHNIKSNKYYDLTNEMTKNGFKTQFYAVEVGARGLPAKTLHHLLKNLGLPRSAVTTFLDRMSKAALVGSYNIWLGRGDSEGREGEC

SEQ ID NO: 18610 - protein, 1060 aa, Tinea semifulvella
MDLKCPTCGKIYRRQAWFKKHLKIHEGIEAQMVRPSTSTADRVSPHISHGTPPCEFNQESMTIRTRLSIPTIKETTWKVHDGNLAVMLDCPGTKQDLDSQVRAFQNTVYDYFSEHYPPTTTHAHTNKENTFKLKLRRKKRELRKRLRCAKNIGDKQQCHQVARALRSILKLIQGISLQIKDNSNQYNRARHEVLFDKNPFVYARKIFSEKSGVLSLTRDQIYKYYKETYTEIQKEEQYLDPPSPRPVRPLEDFRCLPPSMEEMEEQIKRKSSKSAPGPDGIPYIVYKKCPHTRKHLYNIYRKIWSTNQVPKAFGEAVFVLIPKKTEVNDPKDARPIALTNTMSKIFFSIVQARMSRFMIKNEYFSRQHQKGFLPGVSGCLEHNTLLAECLKDARKQERQLSVCWIDLENAFGSVQHELLQTALKWYNFPTLIRDIIANYYKNLRFVVTNKDGYTDTLKYNVGLFQGCCLSPVAFNIIINILIDKLKSREKKWGYRFKQNNIYTESVLAFADDLAVLTRNPKQCQGLLKIVDDFCSWTKGMRTKPSKCFSLCLARRNTTFTSYDPGLSITGQRIAPVNETMPFKFLGRRINFQGKTPSLEVVVKQFTDDMNRVTQQPISNVKKAWIYDNYLASRLTWPFLVYDFNKSLLSSLDADVIRTLKSWLGLAQGADSSTFFRGRRNFGMDLKRPSELYKHLRISKYQILTSSQDNTISSLPKDPLVSDMEPRLLFFKKFMTGAQTDKRGIGWKKKESDKEVIKSFLRKDEEHEYRVHAMTLEVQNDWLTLGDFCIPPALKWRTLMYDWSPALLKFYLNAFQMSLPDQSNLVRWGKATEKNCTLCGAAIGTARHTLVGCVTLLEKGYYSRRHDKVLGVIREAVSLSIARARKGLTTNKTLTTFVKEGQSTKTKCKPTSILGAASDWKILMDTFEHHYRIPDELAVSAYRPDILVFSRNFKKVILIELTVPWESNIPKDHNMKSNKYYDLTEEMIRNGFKTQLYAVEVGARGVPAKSLHHLLKELGLSRSAVNTFMERASKTALTESYSIWLGRERSRMVDGERIIAK

SEQ ID NO: 18611 - protein, 1108 aa, Tinea semifulvella
MPRVKAQQAIPSYYIAKKSKKNNTPGTVREGGRMNCPLVDNNNDPGDNMDLKCPTCGKIYRRQAWFKKHLKTHEGIEAQMVRPSTSTADRVSPHISHGTPPCEFNQESMTIRTRLSIPTIKETTWKVHDGNLAVMLDCPGTKQDLDSQVRAFQNTVYDYFSEHYPPTTTHAHTNKENTFKLKLRRKKRELRKRLRCAKNIGDKQQCHQVARALRSILKLIQGISLQIKDNSNQYNRARHEVLFDNNPFVYARKIFSEKSGVLSLTRDQIYKYYKETYTEIQKEEQYLDPPSPRPVRPLEDFRCLPPSMEEMEEQIKRKSSKSAPGLDGIQYIVYKKCPHTRTHLYNIYRKIWSTNQVPKAFGEAVFVLIPKKTEVNDPKDARPIALTNTMSKIFFSIVQARMSRFMIKNEYFSRQHQKGFLPGVSGCLEHNTLLAECLKDARKQERQLSVCWIDLENAFGSVQHELLQTALKWYNFPTLIRDIIANYYKNLRFVVTNKDGYTDTLKYNVGLFQGCCLSPVAFNIIINILIDKLKSREKKWGYRFKQNNIYTESVLAFADDLAVITRNPKQCQGLLKIVDDFCSWTKGMRTKPSKCFSLCRARRNTTFTSYGPGLSIAGQRIAPVNETMPFKFLGRRINFQGKTPSLEVVVKQFTDDMNRVSQQPISNVKKAWIYDNYLASRLTWPFLVYDFNKSLLSSLDADVIRTLKSWLGLAQGADSSTFFRGRRNFGMDLKRPSELYKHLRISKYQILTSSQDNTISSLPRDPLVSDMEPRLLFFKKFMTDAQTDKRGIGWKKKESDKEVIKSFLRKDEEHEYRVHAMTLEVQNDWLTLGDFCIPPALKWRTLMYDWSPALLKFYLNAFQMSLPDQSNLVRWGKATEKNCTLCGAAIGTARHTLVGCVTLLEKGYYSRRHDKVLGVIREAVSLSIARARKGLTTNKTLTTFVKEGQSTKTKCKPTSILGAASDWKILMDTFEHHYRIPDELAVSAYRPDILVFSRNLKKVILIELTVPWESNIPKDHNMKSNKYYDLTEEMIRNGFKTQLYAVEVGARGVPAKSLHHLLKELGLSRSAVNTFMERASKTALTESYSIWLGRERSRMVDGERIIAQ

SEQ ID NO: 18612 - protein, 1108 aa, Tinea semifulvella
MPRVKAQQAIPSYYIAKKSKKNNTPGTVREGGRMNCPLVDNNNDPGDNMDLKCPTCGKIYRRQAWFKKHLKTHEGIEAQMVRPSTSTADRVSPHISHGTPPCEFNQESMTIRTRLSIPTIKETTWKVHDGNLAVMLDCPGTKQDLDSQVRAFQNTVYDYFSEHYPPTTTHAHTNKENTFKLKLRRKKRELRKRLRCAKNIGDKQQCHQVARALRSILKLIQGISLQIKDNSNQYNRARHEVLFDNNPFVYARKIFSEKSGVLSLTRDQIYKYYKETYTEIQKEEQYLDPPSPRPVRPLEDFRCLPPSMEEMEEQIKRKSSKSAPGPDGIPYIVYKKCPHTRKHLYNIYRKIWSTNQVPKAFGEAVFVLIPKKTEVNDPKDARPIALTNTMSKIFFSIVQARMSRFMIKNEYFSRQHQKGFLPGVSGCLEHNTLLAECLKDARKQERQLSVCWIDLENAFGSVQHELLQTALKWYNFPTLIRDIIANYYKNLRFVVTNKDGYTDTLKYNVGLFQGCCLSPVAFNIIINILIDKLKSREKKWGYRFKQNNIYTESVLAFADDLAVITRNPKQCQGLLKIVDDFCSWTKGMRTKPSKCFSLCLARRNTTFTSYDPGLSIAGQRIAPVNETMPFKFLGRRINFQGKTPSLEVVVKQFTDDMNRVTQQPISNVKKAWIYDNYLASRLTWPFLVYDFNKSLLSSLDADVIRTLKSWLGLAQGADSSTFFRGRRNFGMDLKRPSELYKHLRISKYQILTSSQDNTISSLPRDPLVSDMEPRLLFFKKFMTGAQTDKRGIGWKKKESDKEVIKSFLRKDEEHEYRVHAMTLEVQNDWLTLGDFCIPPALKWRTLMYDWSPALLKFYLNAFQMSLPDQSNLVRWGKATEKNCTLCGAAIGTARHTLVGCVTLLEKGYYSRRHDKVLGVIREAVSLSIARARKGLTTNKTLTTFVKEGQSTKTKCKPTSILGAASDWKILMDTFEHHYRIPDELAVSAYRPDILVFSQNLKKVILIELTVPWESNIPKDHNMKSNKYYDLTEEMIRNGFKTQLYAVEVGARGVPAKSLHHLLKELGLSRSAVNTFMERASKTALTESYSIWLGRERSRMVDGERIIAQ

SEQ ID NO: 18613 - protein, 1110 aa, Tinea semifulvella
MPRVKAQQAIPSYYIAKKSKKNNTPGTVREGGRMNCPLVDNNNDLGDNMDLKCPTCGKIYRRQAWFKKHLKIHEGIEAQMARPSTSTADRVSPHISHGTPPCEFNQESMTIRTRLSIPTIKETTWKVHDGNLAVMLDCPGTKQDLDSQVRAFQNTVYDYFSEHYPPTTTHAHTNKENTFKLKLRRKKRELRKRLRCAKNIGDKQQCHQVARALRSILKLIQGISLQIKDNSNQYNRARHEVLFDKNPFVYARKIFSEKSGVLSLTRDQIYKYYKETYSYTEIQKEEQYLDPPSPRPVRPLEDFRCLPPSMEEMEEQIKRKSSKSAPGPDGIPYIVYKKCPHTRKHLYNIYRKIWSTNQVPKAFGEAVFVLIPKKTEVNDPKDARPIALTNTMSKIFFSIVQAIMSRFMIKNEYFSRQHQKGFLPGVSGCLEHNTLLAECLKDARKQERQLSVCWIDLENAFGSVQHELLQTALKWYNFPTLIRDIIANYYKNLRFVVTNKDGYTDTLKYNVGLFQGCCLSPVAFNIIINILIDKLKSREKKWGYRFKQNNIYTESVLAFADDLAVLTRNPKQCQGLLKIVDDFCSWTKGMRTKPSKCFSLCLARRNTTFTSYDPGLSIAGQRIAPVNETMPFKFLGRRINFQGKTPSLEVVVKQFTDDMNRVTQQPISNVKKAWIYDNYLASRLTWPFLVYDFNKSLLSSLDADVIRTLKSWLGLAQGADSSTFFRGRRNFGMDLKRPSELYKHLRISKYQILTSSQDNTISSLPKDPLVSDMEPRLLFFKKFMTGAQSDKRGIGWKKKESDKEVIKSFLRKDEEHEYRVHAMTLEVQNDWLTLGDFCIPPALKWRTLMYDWSPALLKFYLNAFQMSLPDQSNLVRWGKATEKNCTLCGAAIGTARHTLVGCVTLLEKGYYSRRHDKVLGVIREAVSLSIARARKGLTTNKTLTTFVKEGQSTKTKCKPTSILGAASDWKILMDTFEHHYRIPDELAVSAYRPDILVFSRNLKKVILIELTVPWESNIPKDHNMKSNKYYDLTEEMIRNGFKTQLYAVEVGARGVPAKSLHHLLKELGLSRSAVNTFMERASKTALTESYSIWLGRERSRMVDGERIIAK

SEQ ID NO: 18614 - protein, 1088 aa, Tinea semifulvella
MNNTPGTVREGGRMNCPLVDNNNDPGDNMDLKCPTCGKIYRRQAWFKKHLKTHEGIEAQMVRPSTSTADRVSPHISHGTPPCEFNQESMTIRTRLSIPTIKETTWKVHDGNLAVMLDCPGSKQDLDSQVRAFQNTVYDYFSEHYPPTTTHAHTDKENTFKLKLRRKKRELRKRLRCAINIGDKQQCHQVARALRSILKLIQGISLQIKDHSNQYNRARHEVLFDKNPFVYARKIFSEKSGVLSLTRDQIYKYYKETYTEIQKEEQYLDPPSPRPVRPLEDFRCLPPSMEEMEEQIKRKSSKSAPGPDGIPYIVYKKCPHTRKHLYNIYRKIWSTNQVPKAFGEAVFVLIPKKTEVNDPKDARPIALTNTMSKIFFSISQARMSRFMIKNEYFSRQHQKGFLPGVSGCLEHNTLLAECLKDARKQERQLSVCWIDLENAFGSVQHKLLQTALKWYNFPTLIRDIIANYYKNLRFVVTNKDGYTDTLKYNVGLFQGCCLSPVAFNIIINILIDKLKSREKKWGYRFKQNNIYTESVLAFADDLAVLTRNPKQCQGLLKIVDDFCSWTKGMRTKPSKCFSLCLARRNTTFTSYDPGLSIAGQRIAPVNETMPFKFLGRRINFQGKTPSLEVVVKQFTDDMNRVTQQPISNVKKAWIYDNYLASRLTWPFLVYDFNKSLLSSLDADVIRTLKSWLGLAQGADSSTFFRGRRNFGMDLKRPSELYKHLRISKYQILTSSQDNTISSLPRDPLVSDMEPRLLFFKKFMTGAQTDKRGIGWKKKESDKEVIKSFLRKDEEHEYRVHAMTLEVQNDWLTLGDFCIPPALKWRTLMYDWSPALLKFYLNAFQMSLPDQSNLVRWGKATEKNCTLCGAAIGTARHTLVGCVTLLEKGYYSRRHDKVLGVIREAVSLSIARARKGLTTNKTLTTFVKEGQSTKTKCKPTSILGAASDWKILMDTFEHHYRIPDELAVSAYRPDILVFSRNLKKVILIELTVPWESNIPKDHNMKSNKYYDLTEEMIRNGFKTQLYAVEVGARGVPAKSLHHLLKELGLSRSAVNTFMERASKTALTESYSIWLGRERSRMVDGERIIAQ

SEQ ID NO: 18615 - protein, 1108 aa, Tinea semifulvella
MPRVKAQQAIPSYYIAKKSKKNNTPGTVREGGRMNCPLVDNNNDPGDNMDLKCPTCGKIYRRQAWFKKHLKTHEGIEAQMVRPSTSTADRVSPHISHGTPPCEFNQESMTIRTRLSIPTIKETTWKVHDGNLSVMLDCPGTKQDLDSQVRAFQNTVYDYFSEHYPPTTTHAHTNKENTFKLKLRRKKRELRKRLRCAKNIGDKQQCHQVARALRSILKLIQGISLQIKDYSNQYNRARHEVLFDKNPFVYARKIFSEKSGVLSLTRDQIYKYYKETYTEIQKEEQYLDPPSPRPVRPLEDFRCLPPSMEEMDEQMKRKSSKSAPGPDGIPYIVYKKCPHTRKHLYNIYRKIWSTNQVPKAFGEAVFVLIPKKTEVNDPKDARPIALTNTMSKIFFSIVQARMSRFMIKNEYFSRQHQKGFLPGVSGCLEHNTLLAECLKDARKQERQLSVCWIDLENAFGSVQHELLQTALKWYNFPTLIRDIIANYYKNLRFVVTNKDGYTDTLKYNVGLFQGCCLSPVAFNIIINILIDKLKSREKKWGYRFKQNNIYTESVLAFADDLAVLTRNPKQCQGLLKIVDDFCSWTKGMRTKPSKCFSLCLARRNTTFTSYDPGLTIAGQRIAPVNETMPFKFLGRRINFQGKTPSLEVVVKQFTDDMNRVTQQPISNVKKAWIYDNYLASRLTWPFLVYDFNKSLLSSLDADVIRTLKSWLGLAQGADSSTFFRGRRNFGMDLKRPSELYKHLRISKYQILTSSQDNTISSLPRDPLVSDMEPRLLFFKKFMTGAQTDKRGIGWKKKESDKEVIKSFLRKDEEHEYRVHAMTLEVQNDWLTLGDFCIPPALKWRTLMYDWSPALLKFYLNAFQMSLPDQSNLVRWGKATEKNCTLCGAAIGTARHTLVGCVTLLEKGYYSRRHDKVLGVIREAVSLSIARARKGLTTNKTLTTFVKEGQSTKTKCKPTSILGAASDWKILMDTFEHHYRIPDELAVSAYRPDILVFSRNLKKVILIELTVPWESNIPKDHNMKSNKYYDLTEEMIRNGFKTQLYAVEVGARGVPAKSLHHLLKELGLSRSAVNTFMERASKTALTESYSIWLGRERSRMVDGERIIAQ

SEQ ID NO: 18616 - protein, 1029 aa, Tinea semifulvella
MVRPSTSTADRVSPHISHGTPPCEFNQESMTIRTRLSIPTIKETTWKVHDGNLAVMLDCPGTKQDLDSQVRAFQNTVYDYFSEHYPPTTTHAHTNKENTFKLKLRRKKRELRKRLRCAKNIGDKQQCHQVARALRSILKLIQGISLQIKDHSNQYNRARHEVLFDKNPFVYARKIFSEKSGVLSLTRDQIYKYYKETYTEIQKEEQYLDPPSPRPVRPLEDFRCLPPSMEEMEEQIKRKSSKSAPGPDGIPYIVYKKCPHTRKHLYNIYRKIWSTNQVPKAFGEAVFVLIPKKTEVNDPKDARPIALTNTMSKIFFSIVQARMSRFMIKNEYFSRQHQKGFLPGVSGCLEHNTLLAECLKDARKQEWQLSVCWIDLENAFGSVQHELLQTALKWYNFPTLIRDIIANYYKNLRFVVTNKDGYTDTLKYNVGLFQGCCLSPVAFNIIINILIDKLKSREKKWGYRFKQNNIYTESVLAFADDLAVITRNPKQCQGLLKIVDDFCSWTKGMRTKPSKCFSLCLARRNTTFTSYDPGLSIAGQRIAPVNETMPFKFLGRRINFQGKTPSLEVVVKQFTDDMNRVTQQPISNVKKAWIYDNYLASRLTWPFLVYDFNKSLLSSLDADVIRTLKSWLGLAQGADSSTFFRGRRNFGMDLKRPSELYKHLRISKYQILTSSQDNTISSLPRDPLVSDMEPRLLFFKKFMTGAQTDKRGIGWKKKESDKEVIKSFLRKDEEHEYRVHAMTLEVQNDWLTLGDFCIPPALKWRTLMYDWSPALLKFYLNAFQMSPPDQSNLVRWGKATEKNCTLCSAAIGTARHTLVGCVTLLEKGYYSRRHDKVLGVIREAVSLSITRARKGLTTNKTLTTFVKEGQSTKTKCKPTSILGAASDWKILMDTFEHHYRIPDELAVSAYRPDILVFSRNLKKVILIELTVPWESNIPKDHNMKLNKYYDLTEEMIRNGFKTQLYAVEVGARGVPAKSLHHLLKELGLSRSAVNTFMERASKTALTESYSIWLGRERSRMVDGERIIAQ

SEQ ID NO: 18617 - protein, 1075 aa, Tinea semifulvella
MNCPLVDNNNDPGDNMDLKCPTCGKIYRRQAWFKKHLKIHEGIEAQMVRPSTSTADRVSPHISHGTPPCEFNQESMTIRTRLSIPTIKETTWKVHDGNLAVMLDCPGTKQDLDSQVRAFQNTVYDYFSEHYPPTTTHAHTNKENTFKLKLRRKKRELRKRLRCAKNIGDKQQCHQVARALRSILKLIQGISLQIKDNSNQYNRARHEVLFDKNPFVYARKIFSEKSGVLSLTRDQIYKYYKETYTEIQKEEQYLDPPSPRPVRPLEDFRCLPPSMEEMEEQIKRKSSKSAPGPDGIPYIVYKKCPHTRKHLYNIYRKIWSTNQVPKAFGEAVFVLIPKKTEVNDPKDARPIALTNTMSKIFFSIVQARMSRFMIKNEYFSRQHQKGFLPGVSGCLEHNTLLAECLKDARKQERQLSVCWIDLENAFGSVQHELLQTALKWYNFPTLIRDIIANYYKNLRFVVTNKDGYTDTLKYNVGLFQGCCLSPVAFNIIINILIDKLKSREKKWGYRFKQNNIYTESVLAFADDLAVLTRNPKQCQGLLKIVDDFCSWTKGMRTKPSKCFSLCLARRNTTFTSYDPGLSIAGQRIAPVNETMPFKFLGRRINFQGKTPSLEVVVKQFTDDMNRVTQQPISNVKKAWIYDNYLASRLTWPFLVYDFNKSLLSSLDADVIRTLKSWLGLAQGADSSTFFRGRRNFGMDLKRPSELYKHLRISKYQILTSSQDNTISSLPKDPLVSDMEPRLLFFKKFMTGAQTDKRGIGWKKKESDKEVIKSFLRKDEEHEYRVHAMTLEVQNDWLTLGDFCIPPALKWRTLMYDWSPALLKFYLNAFQMSLPDQSNLVRWGKATEKNCTLCGAAIGTARHTLVGCVTLLEKGYYSRRHDKVLGVIREAVSLSIARARKGLTTNKTLTTFVKEGQSTKTKCKPTSILGAASDWKILMDTFEHHYRIPDELAVSAYRPDILVFSRNLKKVILIELTVPWESNIPKDHNMKSNKYYDLTEEMIRNGFKTQLYAVEVGARGVPAKSLHHLLKELGLSRSAVNTFMERASKTALTESYSIWLGRERSRMVDGERIIAK

SEQ ID NO: 18618 - protein, 1108 aa, Tinea semifulvella
MPRVKAQQAIPSYYISKKSKKNNTPGTVREGGRMNCPLVDNNNDPGDNMDLKCPTCGKIYRRQAWFKKHLKTHEGIEAQMVRPSTSTADRVSPHISHGTPPCEFNQESMTIRTRLSIPTIKETTWKVHDGNLAVMLDCPGTKQDLDSQVRAFQNTVYDYFSEHYPPTTTHAHTNKENTFKLKLRRKKRELRKRLRCAKNIGDKQQCHQVARALRSILKLIQGISLQIKDNSNQYNRARHEVLFDNNPFVYARKIFSEKSGVLSLTRDQIYKYYKETYTEIQKEEQYLDPPSPRPVRPLEDFRCLPPSMEEMEEQIKRKSSKSAPGPDGIPYIVYKKCPHTRKHLYNIYRKIWSTNQVPKAFGEAVFVLIPKKTEVNDPKDARPIALTNTMSKIFFSIVQARMSRFMIKNEYFSRQHQKGFLPGVSGCLEHNTLLAECLKDARKQERQLSVCWIDLENAFGSVQHELLQTALKWYNFPTLIRDIIANYYKNLRFVVTNKDGYTDTLKYNVGLFQGCCLSPVAFNIIINILIDKLKSREKKWGYRFKQNNIYTESVLAFADDLAVITRNPKQCQGLLKIVDDFCSWTKGMRTKPSKCFSLCLARRNTTFTSYDPGLSIAGQRIAPVNETMPFKFLGRRINFQGKTPSLEVVVKQFTDDMNRVTQQPISNVKKAWIYDNYLASRLTWPFLVYDFNKSLLSSLDADVIRTLKSWLGLAQGADSSTFFRGRRNFGMDLKRPSELYKHLRISKYQILTSSQDNTISSLPRDPLVSDMEPRLLFFKKFMTGAQTDKRGIGWKKKESDKEVIKSFLRKDEEHEYRVHAMTLEVQNDWLTLGDFCIPPALKWRTLMYDWSPALLKFYLNAFQMSLPDQSNLVRWGKATEKNCTLCGAAIGTARHTLVGCVTLLEKGYYSRRHDKVLGVIREAVSLSIARARKGLTTNKTLTTFVKEGQSTKTKCKPTSILGAASDWKILMDTFEHHYRIPDELAVSAYRPDILVFSRNLKKVILIELTVPWESNIPKDHNMKSNKYYDLTEEMIRNGFKTQLYAVEVGARGVPAKSLHHLLKELGLSRSAVNTFMERASKTALTESYSIWLGRERSRMVDGERIIAK

SEQ ID NO: 18619 - protein, 1075 aa, Tinea semifulvella
MNCPLVDNNNDPGDNMDLKCPTCGKIYRRQAWFKKHLKTHEGIEAQMVRPSTSTADRVSPHISHGTPPCEFNQESMTTRTRLSIPTIKETTWKVHDGNLAVMLDCPGTKQDLDSQVRAFQNTVYDYFSEHYPPTTTHAHTNKENTFKLKLRRKKRELRKRLRCAKNIGDKQQCHQVARALRSILKLIQGISLQIKDHSNQYNRARHEVLFDKNPFVYARKIFSEKSGVLSLTRDQIYKYYKETYTEIQKEEQYLDPPSPRPVRPLEDFRCLPPSMEEMEEQIKRKSSKSAPGPDGIPYIVYKKCPHTRKHLYNIYRKIWSTNQVPKAFGEAVFVLIPKKTEVNDPKDARPIALTNTMSKIFFSIVQARMSRFMIKNEYFSRQHQKGFLPGVSGCLEHNTLLAECLKDARKQERQLSVCWIDLENAFGSVQHELLQTALKWYNFPTLIRDIIANYYKNLRFVVTNKDGYTDTLKYNVGLFQGCCLSPVAFNIIINILIDKLKSREKKWGYRFKQNNIYTESVLAFADDLAVITRNPKQCQGLMKIVDDFCSWTKGMRTKPSKCFSLCLARRNTTFTSYDPGLSIAGQRIAPVNETMPFKFLGRRINFQGKTPSLEVVVKQFTDDMNRVTQQPISNVKKAWIYDNYLASRLTWPFLVYDFNKSLLSSLDADVIRTLKSWLGLAQGADSSTFFRGRRNFGMDLKRPSELYKHLRISKYQILTSSQDNTISSLPRDPLVSDMEPRLLFFKKFMTGAQTDKRGIGWKKKESDKEVIKSFLRKDEEHGYRVHAMTLEVQNDWLTLGDFCIPPALKWRTLMYDWSPALLKFYLNAFQMSLPDQSNLVRWGKATEKNCTLCSAAIGTARHTLVGCVTLLEKGYYSRRHDKVLGVIREAVSLSIARARKGLTTNKTLTTFVKEGQSTKTKCKPTSILGAASDWKILMDTFEHHYRIPDELAVSAYRPDILVFSRNLKKVILIELTVPWESNIPKDHNIKSNKYYDLTEEMIRNGFKTQLYAVEVGARGVPAKSLHHLLKELGLSRSAVNTFMERASKTALTESYSIWLGRERSRMVDGERIIAQ

SEQ ID NO: 18620 - protein, 1000 aa, Tinea semifulvella
MTIRTRLSIPTIKETTWKVHDGNLAVMLDCPGTKQDLDSQVCAFQNTVYDYFSEHYPPTTTHAHTNKENTFKLKLRRKKRELRKRLRCAKNIGDKQQCHQVARALRSILKLIQGISLQIKDHSNQYNRARHEVLFDKNPFVYARKIFSEKSGVLSLTRDQIYKYYKETYTEIQKEEQYLDPPSPRPVRPLEDFRCLPPSMEEMEEQIKRKSSKSAPGPDGIPYIVYKKCPHTRKHLYNIYRKIWSTNQVPKAFGEAVFVLIPKKTEVNDPKDARPIALTNTMSKIFFSIVQARMSRFMIKNEYFSRQHQKGFLPGVSGCLEHNTLLAECLKDARKQERQLSVCWIDLENAFGSVQHELLQTALKWYNFPTLIRDIIANYYKNLRFVVTNKDGYTDTLKYNVGLFQGCCLSPVAFNIIINILIDKLKSREKKWGYRFKQNNIYTESVLAFADDLAVITRNPKQCQGLLKIVDDFCSWTKGMRTKPSKCFSLCLARRNTTFTSYDPGLSIAGQRIAPVNETMPFKFLGRRINFQGKTPSLEVVVKQFTDDMNRVTQQPISNVKKAWIYDNYLASRLTWPFLVYDFNKSLLSSLDADVIRTLKSWLGLAQGADSSTFFRGRRNFGMDLKRPSELYKHLRISKYQILTSSQDNTISSLPRDPLVSDMEPRLLFFKKFMTGAQTDKRGIGWKKKESDKEVIKSFLRKDEEHGYRVHAMTLEVQNDWLTLGDFCIPPALKWRTLMYDWSPALLKFYLNAFQMSLPDQSNLVRWGKATEKNCTLCSAAIGTARHTLVGCVTLLEKGYYSRRHDKVLGVIREAVSLSIARARKGLTTNKTLTTFVKEGQSTKTKCKPTSILGAASDWKILMDTFEHHYRIPDELAVSAYRPDILVFSRNLKKVILIELTVPWESNIPKDHNMKSNKYYDLTEEMIRNGFKTQLYAVEVGARGVPAKSLHHLLKELGLSRSAVNTFMERASKTALTESYSIWLGRERSRMVDGERIIAQ

SEQ ID NO: 18621 - protein, 1108 aa, Tinea semifulvella
MPRVKAQQAIPSYYIAKKSKKNNTPGTVREGGRMNCPLVDNNNDPGDNMDLKCPTCGKIYRRQAWFKKHLKIHEGIEAQMVRPSTSTADRVSPHISHGTPPCEFNQESMTIRTRLSIPTIKETTWKVHDGNLAVMLDCPGTKQDLDSQVRAFQNTVYDYFSEHYPPTTTHAHTNKENTFKLKLRRKKRELRKRLRCAKNIGDKQQCHQVARALRSILKLIQGISLQIKDNSNQYNRARHEVLFNKNPFVYARKIFSEKSGVLSLTRDQIYKYYKETYTEIQKEEQYLDPPSPRPVRPLEDFRCLPPSMEEMEEQIKRKSSKSAPGPDGIPYIVYKKCPHTRKHLYNIYRKIWSTNQVPKAFGEAVFVLIPKKTEVNDPKDARPIALTNTMSKIFFSIVQARMSRFMIKNEYFSRQHQKGFLPGVSGCLEHNTLLAECLKDARKQERQLSVCWIDLENAFGSVQHELLQTALKWYNFPTLIRDIIANYYKNLRFVVTNKDGYTDTLKYNVGLFQGCCLSPVAFNIIINILIDKLKSREKKWGYRFKQNNIYTESVLAFADDLAVLTRNPKQCQGLLKIVDDFCSWTKGMRTKPSKCFSLCLARRNTTFTSYDPGLSIAGQRIAPVNETMPFKFLGRRINFQGKTPSLEVVVKQFTDDMNRVTQQPISNVKKAWIYDNYLASRLTWPFLVYDFNKSLLSSLDADVIRTLKSWLGLAQGADSSTFFRGRRNFGMDLKRPSELYKHLRISKYQILTSSQDNTISSLPKDPLVSDMEPRLLFFKKFMTGAQTDKRGIGWKKKESDKEVIKSFLRKDEEHEYRVHAMTLEVQNDWLTLGDFCIPPALKWRTLMYDWSPALLKFYLNAFQMSLPDQSNLVRWGKATEKNCTLCGAAIGTARHTLVGCVTLLEKGYYSRRHDKVLGVIREAVSLSIARARKGLTTNKTLTTFVKEGQSTKTKCKPTSILGAASDWKILMDTFEHQYRIPDELAVSAYRPDILVFSRNLKKVILIELTVPWESNIPKDHNMKSNKYYDLTEEMIRNGFKTQLYAVEVGARGVPAKSLHHLLKELGLSRSAVNTFMERASKTALTESYSIWLGRERSRMVDGERIIAK

SEQ ID NO: 18622 - protein, 1108 aa, Tinea semifulvella
MPRVKAQQAIPSYYIAKKSKKNNTPGTVREGGRMNCPLVDNNNDPGDNMDLKCPTCGKIYRRQAWFKKHLKIHEGIEAQMVRPSTSTADRVSPHISHGTPPCEFNQESMTIRTRLSIPTIKETTWKVHDGNLAVMLDCPGTKQDLDSQVRAFQNTVYDYFSEHYPPTTTHAHTNKENTFKLKLRRKKRELRKRLRCAKNIGDKQQCHQVARALRSILKLIQGISLQIKDNSNQYNRARHEVLFDKNPFVYARKIFSEKSGVLSLTRDQIYKYYKETYTEIQKEEQYLDPPSPRPVRPLEDFRCLPPSMEEMEEQIKRKSSKSAPGPDGIPYIVYKKCPHTRKHLYNIYRKIWSTNQVPKAFGEAVFVLIPKKTEVNDPKDARPIALTNTMSKIFFSIVQARMSRFMIKNEYFSRQHQKGFLPGVSGCLEHNTLLAECLKDARKQERQLSVCWIDLENAFGSVQHELLQTALKWYNFPTLIRDIIANYYKNLRFVVTNKDGYTDTLKYNVGLVQGCCLSPVAFNIIINILIDKLKSREKKWGYRFKQNNIYTESVLAFADDLAVLTRNPKQCQGLLKIVDDFCSWTKGMRTKPSKCFSLCLARRNTTFTSYDPGLSIAGQRIAPVNETMPFKFLGRRINFQGKTPSLEVVVKQFTDDMNRVTQQPISNVKKAWIYDNYLASRLTWPFLVYDFNKSLLSSLDADVIRTLKSWLGLAQGADSSTFFRGRRNFGMDLKRPSELYKHLRISKYQILTSSQDNTISSLPKDPLVSDMEPRLLFFKKFMTGAQTDKRGIGWKKKESDKEVIKSFLRKDEEHEYRVHAMTLEVQNDWLTLGDFCIPPALKWRTLMYDWSPALLKFYLNAFQMSLPDQSNLVRWGKATEKNCTLCGAAIGTARHTLVGCVTLLEKGYYSRRHDKVLGVIREAVSLSIARARKGLTTNKTLTTFVKEGQSTKTKCKPTSILGAASDWKILMDTFEHHYRIPDELAVSAYRPDILVFSRNLKKVILIELTVPWESNIPKDHNMKSNKYYDLTEEMIRNGFKTQLYAVEVGARGVPAKSLHHLLKELGLSRSAVNTFMERASKTALTESYSIWLGRERSRMVDGERIIAK

SEQ ID NO: 18623 - protein, 1108 aa, Tinea semifulvella
MPRVKAQQAIPSYYIAKKSKKNNTPGTVREGGRMNCPLVDNNNDPGDNMDLKCPTCGKIYRRQAWFKKHLKIHEGIEAQMVRPSTSTADRVSPHISHGTPPCEFNQESMTIRTRLSIPTIKETTWKVHDGNLAVMLDCPGTKQDLDSQVRAFQNTVYDYFSEHYPPTTTHAHTNKENTFKLKLRRKKRELRKRLRCAKNIGDKQQCHQVARALRSILKLIQGISLQIKDNSNQYNRARHEVLFDKNPFVYARKIFSEKSGVLSLTRDQIYKYYKETYTEIQKEEQYLDPPSPRPVRPLEDFRCLPPSMEEMEEQIKRKSSKSAPGPDGIPYIVYKKCPHTRKHLYNIYRKIWSTNQVPKAFGEAVFVLIPKKTEVNDPKDARPIALTNTMSKIFFSIVQARMSRFMIKNEYFSRQHQKGFLPGVSGCLEHNTLLAECLKDARKQERQLSVCWIDLENAFGSVQHELLQTALKWYNFPTLIRDIIANYYKNLRFVVTNKDGYTDTLKYNVGLFQGCCLSPVAFNIIINILIDKLKSREKKWGYRFKQNNIYTESVLAFADDLAVLTRNPKQCQGLLKIVDDFCSWTKGMRTKPSKCFSLCLARRNTTFTSYDPGLSIAGQRIAPVNETMPFKFLGRRINFQGKTPSLEVVVKQFTDDMNRVTQQPISNVKKAWIYDNYLASRLTWPFLVYDFNKSLLSSLDADVIRTLKSWLGLAQGADSSTFFRGRRNFGMDLKRPSELYKHLRISKYQILTSSQDNTISSLPKDPLVSDMEPRLLFFKKFMTGAQTDKRGIGWKKKESDKEVIKSFLRKDEEHEYRVHAMTLEVQNDWLTLGDFCIPPALKWRTLMYDWSPALLKFYLNAFQMSLPDQSNLVRWGKATEKNCTLCGAAIGTARHTLVGCVTLLEKGYYSRRHDKVLGVIREAVSLSIARARKGLTTNKTLTTFVKEGQSTKTKCKPTSILGAASDWKILMDTFEHHYRIPDELAVSAYRPDILVFSRNLKKVILIELTVPWESNIPKDHNMKSNKYYDLTEEMIRNGFKTQLYAVEVGARGVPAKSLHHLLKELGLSRSAVNTFMERASKTALTESYSIWLGRERSRMVDGERIIAK

SEQ ID NO: 18624 - protein, 1108 aa, Tinea semifulvella
MPRVKAQQAIPLYYIAKKSKKNNTPGTVREGGRMNCPLVDNNNDPGDNMDLKCPTCGKIYRRQAWFKKHLKTHEGIEAQMVRPSTSTADRVSPHISHGTPPCEFNQESMTIRTRLSIPTIKETTWKVHDGNLAVMLDCPGTKQDLDSQVRAFQNTVYDYFSEHYPPTTTHAHTNKENTFKLKLRRKKRELRKRLRCAKNIGDKQQCHQVARALRSILKLIQGISLQIKDNSNQYNRARHEVLFDNNPFVYARKIFSEKSGVLSLTRDQIYKYYKETYTEIQKEEQYLDPPSPRPVRPLEDFRCLPPSMEEMEEQIKRKSSKSAPGPDGIPYIVYKKCPHTRKHLYNIYRKIWSTNQVPKAFGEAVFVLIPKKTEVNDPKDARPIALTNTMSKIFFSIVQARMSRFMIKNEYFSRQHQKGFLPGVSGCLEHNTLLAECLKDARKQERQLSVCWIDLENAFGSVQHELLQTALKWYNFPTLIRDIIANYYKNLRFVVTNKDGYTDTLKYNVGLFQGCCLSPVAFNIIINILIDKLKSREKKWGYRFKQNNIYTESVLAFADDLAVITRNPKQCQGLLKIVDDFCSWTKGMRTKPSKCFSLCLARRNTTFTSYDPGLSIAGQRIAPVNETMPFKFLGRRINFQGKTPSLEVVVKQFTDDMNRVTQQPISNVKKAWIYDNYLASRLTWPFLVYDFNKSLLSSLDADVIRTLKSWLGLAQGADSSTFFRGRRNFGMDLKRPSELYKHLRISKYQILTSSQDNTISSLPRDPLVSDMEPRLLFFKKFMTGAQTDKRGIGWKKKESDKEVIKSFLRKDEEHEYRVHAMTLEVQNDWLTLGDFCIPPALKWRTLMYDWSPALLKFYLNAFQMSLPDQSNLVRWGKATEKNCTLCGAAIGTARHTLVGCVTLLEKGYYSRRHDKVLGVIREAVSLSIARARKGLTTNKTLTTFVKEGQSTKTKCKPTSILGAASDWKILMDTFEHHYRIPDELAVSAYRPDILVFSRNLKKVILIELTVPWESNIPKDHNMKSNKYYDLTEEMIRNGFKTQLYAVEVGARGVPAKSLHHLLKELGLSRSAVNTFMERASKTALTESYSIWLGRERSRMVDGERIIAQ

SEQ ID NO: 18625 - protein, 801 aa, Tinea semifulvella
MEEMEEQIKRKSSKSAPGPDGIPYIVYKKCPHTRKHLYNIYRKIWSTNQVPKAFGEAVFVLIPKKTEVNDPKDARPIALTNTMSKIFFSIVQARMSRFMIKNEYFSRQHQKGFLPGVSGCLEHNTLLAECLKDARKQERQLSVCWIDLENAFGSVQHELLQTALKWYNFPTLIRDIIANYYKNLRFVVTNKDGYTDTLKYNVGLFQGCCLSPVAFNIIINILIDKLKSREKKWGYRFKQNNIYTESVLAFADDLAVITRNPKQCQGLLKIVDDFCSWTKGMRTKPSKCFSLCLARRNTTFTSYDPGLSIAGQRIAPVNETMPFKFLGRRINFQGKTPSLEVVVKQFTDDMNRVTQQPISNVKKAWIYDNYLASRLTWPFLVYDFNKSLLSSLDADVIRTLKSWLGLAQGADSSTFFRGRRNFGMDLKRPSELYKHLRISKYQILTSSQDNTISSLPRDPLVSDMEPRLLFFKKFMTGAQTDKRGIGWKKKESDKEVIKSFLRKDEEHEYRVHAMTLEVQNDWLTLGDFCIPPALKWRTLMYDWSPALLKFYLNAFQMSLPDQSNLVRWGKATEKNCTLCGAAIGTARHTLVGCVTLLEKGYYSRRHDKVLGVIREAVSLSIARARKGLTTNKTLTTFVKEGQSTKTKCKPTSILGAASDWKILMDTFEHHYRIPDELAVSAYRPDILVFSRNLKKVILIELTIPWESNIPKDHNMKSNKYYDLTEEMIRNGFKTQLYAVEVGARGVPAKSLHHLLKELGLSRSAVNTFMERASKTALTESYSIWLGRERSRMVDGERIIAQ

SEQ ID NO: 18626 - protein, 803 aa, Tinea semifulvella
MEEMEEQIKRKSSKSAPGPDGIPYIVYKKCPHTRKHLYNIYRKIWSTNQVPKAFGEAVFVLIPKKTEVNDPKDARPIALTNTMSKIFFSIVQARMSRFMIKNEYFSRQHQKGFLPGVSGCLEHNTLLAECLKDARKQERQLSVCWIDLENAFGSVQHELLQTALKWYNFPTLIRDIIANYEYYKNLRFVVTNKDGYTDTLKYNVGLFQGCCLSPVAFNIIINILIDKLKSREKKWGYRFKQNNIYTESVLAFADDLAVITRNPKQCQGLLKIVDDFCSWTKGMRTKPSKCFSLCLARRNTTFTSYDPGLNIAGQRIAPVNETMPFKFLGRRINFQGKTPSLEVVVKQFTDDMNRVTQQPISNVKKAWIYDNYLASRLTWPFLVYDFNKSLLSSLDADVIRTLKSWLGLAQGADSSTFFRGRRSFGMDLKRPSELYKHLRISKYQILTSSQDNTISSLPRDPLVSDMEPRLLFFKKFMTGAQTDKRGIGWKKKESDKEVIKSFLRKDEEHEYRVHAMTLEVQNDWLTLGDFCIPPALKWRTLMYDWSPALLKFYLNAFQMSLPDQSNLVRWGKATEKNCTLCGAAIGTARHTLVGCVTLLEKGYYSRRHDKVLGVIREAVSLSIARARKGLTTNKTLTTFVKEGQSTKTKCKPTSILGAASDWKILMDTFEHHYRIPDELAVSAYRPDILVFSRNLKKVILIELTVPWESNIPKDHNMKSNKYYDLTEEMIRNGFKTQLYAVEVGARGVPAKSLHHLLKELGLSRSALNTFMERASKTALTESYSIWLGRERSRMVDGERIIAQ

SEQ ID NO: 18627 - protein, 974 aa, Tinea semifulvella
MLDCPGTKQDLDSQVRAFQNTVYDYFSEHYPPTTTHAHTNKENTFKLKLRRKKRELRKRLRCAKNIGDKQQCHQVARALRSILKLIQGISLQIKDNSNQYNRARHEVLFDKNPFVYARKIFSEKSGVLSLTRDQIYKYYKETYTEIQKEEQYLDPPSPRPVRPLEDFRCLPPSMEEMEEQIKRKSSKSAPGPDGIPYIVYKKCPHTRKHLYNIYRKIWSTNQVPKAFGEAVFVLIPKKTEVNDPKDARPIALTNTMSKIFFSIVQARMSRFMIKNEYFSRQHQKGFLPGVSGCLEHNTLLAECLKDARKQERQLSVCWIDLENAFGSVQHELLQTALKWYNFPTLIRDIIANYYKNLRFVVTNKDGYTDTLKYNVGLFQGCCLSPVAFNIIINILIDKLKSREKKWGYRFKQNNIYTESVLAFADDLAVLTRNPKQCQGLLKIVDDFCSWTKGMRTKPSKCFSLCLARRNTTFTSYDPGLSIAGQRIAPVNETMPFKFLGRRINFQGKTPSLEVVVKQFTDDMNRVTQQPISNVKKAWIYDNYLASRLTWPFLVYDFNKSLLSSLDADVIRTLKSWLGLAQGADSSTFFRGRRNFGMDLKRPSELYKHLRISKYQILTSSQDNTISSLPKDPLVSDMEPRLLFFKKFMTGAQTDKRGIGWKKKESDKEVIKSFLRKDEEHEYRVHAMTLEVQNDWLTLGDFCIPPALKWRTLMYDWSPALLKFYLNAFQMSLPDQSNLVRWGKATEKNCTLCGAAIGTARHTLVGCVTLLEKGYYSRRHDKVLGVIREAVSLSIARARKGLTTNKTLTTFVKEGQSTKTKCKPTSILGAASDWKILMDTFEHHYRIPDELAVSAYRPDILVFSRNLKKVILIELTVPWESNIPKDHNMKSNKYYDLTEEMIRNGFKTQLYAVEVGARGVPAKSLHHLLKELGLSRSAVNTFMERASKTALTESYSIWLGRERSRMVDGERIIAK

SEQ ID NO: 18628 - protein, 1038 aa, Tinea semifulvella
MCIYVYLFTCGKIYRRQAWFKKHLKTHEGIEAQMVRPSTSTADRVSPHISHGTPPCEFNQESMTIRTRLSIPTIKETTWKVHDGNLAVMLDCPGTKQDLDSQVRAFQNTVYDYFSEHYPPTTTHAHTNKENTFKLKLRRKKRELRKRLRCAKNIGDKQQCHQVARALRSILKLIQGISLQIKDNSNQYNRARHEVLFDNNPFVYARKIFSEKSGVLSLTRDQIYKYYKETYTEIQKEEQYLDPPSPRPVRPLEDFRCLPPSMEEMEEQIKRKSSKSAPGPDGIPYIVYKKCPHTRKHLYNIYRKIWSTNQVPKAFGEAVFVVIPKKTEVNDPKDARPIALTNTMSKIFFSIVQARMSRFMIKNEYFSRQHQKGFLPGVSGCLEHNTLLAECLKDARKQERQLSVCWIDLENAFGSVQHELLQTALKWYNFPTLIRDIIANYYKNLRFVVTNKDGYTDTLKYNVGLFQGCCLSPVAFNIIINILIDKHKSREKKCGYRFKQNNIYTESVLAFADDLAVITRNPKQCQGLLKIVDDFCSWTKGMRTKPSKCFSLCLARRNTTFTSYDPGLSIAGQRIAPVNETMPFKFLGRRINFQGKTPSLEVVVKQFTDDMNRVTQQPISNVKKAWIYDNYLASRLTWPFLVYDFNKSLLSSLDADVIRTLKSWLGLAQGADSSTFFRGRRNLGMDLKRPSELYKHLRISKYQILTSSQDNTISSLPRDPLVSDMEPRLLFFKKFMTGAQTDKRGIGWKKKESDKEVIKSFLRKDEEHEYRVHAMTLEVQNDWLTLGDFCIPPALKWRTLMYDWSPALLKFYLNAFQMSLPDQSNLVRWGKATEKNCTLCGAAIGTARHTLVGCVTLLEKGYYSRRHDKVLGVIREAVSLSIARARKGLTTNKTLTTFVKEGQSTKTKCKPTSILGAASDWKILMDTFEHHYRIPDELAVSAYRPDILVFSRNLKKVILIELTVPWESNIPKDHNMKSNKYYDLTEQTLRSGSWCKRSSSKIFASLTERIGPKQVCRQYIYGTSFQDGINGIIQYLVG

SEQ ID NO: 18629 - protein, 951 aa, Tinea semifulvella
MTTSVSTIHQRPLMLTPIRKTFKLKLRRKKRELRKRLRCAKNIGDKQQCHQVARALRSILKLIQGISLQIKDNSNQYNRARHEVLFDKNPFVYARKIFSEKSGVLSLTRDQIYKYYKETYTEIQKEEQYLDPPSPRPVRPLEDFRCLPPSMEEMEEQIKRKSSKSAPGPDGIPYIVYKKCPHTRKHLYNIYRKIWSTNQVPKAFGEAVFVLIPKKTEVNDPKDARPIALTNTMSKIFFSIVQARMSRFMIKNEYFSRQHQKGFLPGVSGCLEHNTLLAECLKDARKQERQLSVCWIDLENAFGSVQHELLQTALKWYNFPTLIRDIIANYYKNLRFVVTNKDGYTDTLKYNVGLFQGCCLSPVAFNIIINILIDKLKSREKKWGYRFKQNNIYTESVLAFADDLAVLTRNPKQCQGLLKIVDDFCSWTKGMRTKPSKCFSLCLARRNTTFTSYDPGLSIAGQRIAPVNETMPFKFLGRRINFQGITPSLEVVVKQFTDDMNRVTQQPISNVKKAWIYDNYLASRLTWPFLVYDFNKSLLSSLDADVIRTLKSWLGLAQGADSSTFFRGRRNFGMDLKRPSELYKHLRISKYQILTSSQDNTISSLPKDPLVSDMEPRLLFFKKFMTGAQTDKRGIGWKKKESDKEVIKSFLRKDEEHEYRVHAMTLEVQNDWLTLGDFCIPPALKWRTLMYDWSPALLKFYLNAFQMSLPDQSNLVRWGKATEKNCTLCGAAIGTARHTLVGCVTLLEKGYYSRRHDKVLGVIREAVSLSIARARKGLTTNKTLTTFVKEGQSTKTKCKPTSILGAASDWKILMDTFEHHYRIPDELAVSAYRPDILVFSRNLKKVILIELTVPWESNIPKDHNMKSNKYYDLTEEMIRNGFKTQLYAVEVGARGVPAKSLHHLLKELGLSRSAVNTFMERASKTALTESYSIWLGRERSRMVDGERIIAK

SEQ ID NO: 18630 - protein, 1056 aa, Tinea semifulvella
MDLKCPTCGKIYRRQAWFKKHLKTHEGIEAQMVRPSTSTADRVSPHISHGTPPCEFNQESMTIRTRLSIPTIKETTWKVHDGNLAVMLDCPGTKQDLDSQVRAFQNTVYDYFSEHYPPTTTHAHTNKENTFKLKLRRKKRELRKRLRCAKNIGDKQQCHQVARALRSILKLIQGISLQIKDHSNQYNRARHEVLFDKNPFVYARKIFSEKSGVLSLTRDQIYKYYKETYTEIQKEEQYLDPPSPRPVRPLEDFRCLPPSMEEMEEQIKRKSSKSAPGPDGIPYIVYKKCPHTRKHLYNIYRKIWSTNQVPKAFGEAVFVLIPKKTEVNDPKDARPIALTNTMSKIFFSIVQARMSRFMIKNEYFSRQHQKGFLPGVSGCLEHNTLLAECLKDARKQERQLSVCWIDLENAFGSVQHELLQTALKWYNFPTLIRDIIANYYKNLRFVVTNKDGYTDTLKYNVGLFQGCCLSPVAFNIIINILIDKLKSREKKWGYRFKQNNIYTESVLAFADDLAVITRNPKQCQGLLKIVDDFCSWTQGMRTKPSKCFSLCLARRNTTFTSYDPGLSIAGQRIAPVNETMPFKFLGRRINFQGKTPSLEVVVKQFTDDMNRVTQQPISNVKKAWIYDNYLASRLTWPFLVYDFNKSLLSSLDADVIRTLKSWLGLAQGADSSTFFRGRRNFGMDLKRPSELYKHLRISKYQILTSSQDNTISSLPRDPLVSDMEPRLLFFKKFMTGAQTDKRGIGWKKKESDKEVIKSFLRKDEEHEYRVHAMTLEVQNDWLTLGDFCIPPALKWRTLMYDWSPALLKFYLNAFQMSLPDQSNLVRWGKATEKNCTLCSAAIGTARHTLVGCVTLLEKGYYSRRHDKVLGVIREAVSLSIARARKGLTTNKTLTTFVKEGQSTKTKCKPTSILGAASDWKILMDTFEHHYRIPDELAVSAYRPDILVFSRNLKKVILIELTVPWESNIPKDHNMKSNKYYDLTEEMIRNGFKTQLYAVEVGARGVPAKSLHHLLKELGLSRSAVNTFMERASKTALTESYSIWLGRERSRMVDGVA

SEQ ID NO: 18631 - protein, 801 aa, Tinea semifulvella
MEEMEEQIKRKSSKSAPGPDGIPYIVYKKCPHTRKHLYNIYRKIWSTNQVPKAFGEAVFVLIPKKTEVNDPKDARPIALTNTMSKIFFSIVQARMSRFMIKNEYFSRQHQKGFLPGVSGCLEHNTLLAECLKDARKQERQLSVCWIDLENAFGSVQHELLQTALKWYNFPTLIRDIIANYYKNLRFVVTNKDGYTDTLKYNVGLFQGCCLSPVAFNIIINILIDKLKSREKKWGYRFKQNNIYTESVLAFADDLAVITRNPKQCQGLLKIVDDFCSWTKGMRTKPSKCFSLCLARRNTTFTSYDPGLSIAGQRIAPVNETMPFKFLGRRINFQGKTPSLEVVVKQFTDDMNRVTQQPISNVKKAWIYDNYLASRLTWPFLVYDFNKSLLSSLDADVIRTLKSWLGLAQGADSSTFFRGRRNFGMDLKRPSELYKHLRISKYQILTSSQDNTISSLPRDPLVSDMEPRLLFFKKFMTGAQTDKRGIGWKKKESDKEVIKSFLRKDEEHGYRVHAMTLEVQNDWLTLGDFCIPPALKWRTLMYDWSPALLKFYLNAFQMSLPDQSNLVRWGKATEKNCTLCSAAIGTARHTLVGCVTLLEKGYYSRRHDKVLGVIREAVSLSIARARKGLTTNKTLTTFVKEGQSTKTKCKPTSILGAASDWKILMDTFEHHYRIPDELAVSAYRPDILVFSRNLKKVILIELTVPWESNIPKDHNMKSNKYYDLTEEMIRNGFKTQLYAVEVGARGVPAKSLHHLLKELGLSRSAVNTFMERASKTALTESYSIWLGRERSRMVDGERIIAQ

SEQ ID NO: 18632 - protein, 1108 aa, Tinea semifulvella
MPRVKAQQAIPSYYIAKKSKKNNTPGTVREGGRMNCPLVDNNNDPGDNMDLKCPTCGKIYRRQAWFKKHLKTHEGIEAQMVRPSTSTADRVSPHISHGTPPCEFNQESMTIRTRLSIPTIKETTWKVHDGNLAVMLDCPGTKQDLDSQVRAFQNTVYDYFSEHYPPTTTHAHTNKENTFKLKLRRKKRELRKRLRCAKNIGDKQQCHQVARALRSILKLIQGISLQIKDNSNQYNRARHEVLFDNNPFVYARKIFSEKSGVLSLTRDQIYKYYKETYTEIQKEEQYLDPPSPRPVRPLEDFRCLPPSMEEMEEQIKRKSSKSAPGPDGIPYIVYKKCPHTRKHLYNIYRKIWSTNQVPKAFGEAVFVLIPKKTEVNDPKDARPIALTNTMSKIFFSIVQARMSRFMIKNEYFSRQHQKGFLPGVSGCLEHNTLLAECLKDARKQERQLSVCWIDLENAFGSVQHELLQTALKWYNFPTLIRDIIANYYKNLRFVVTNKDGYTDTLKYNVGLFQGCCLSPVAFNIIINILIDKLKSREKKWGYRFKQNNIYTESVLAFADDLAVITRNPKQCQGLLKIVDDFCSWTKGMRTKPSKCFSLCLARRNTTFTSYDPGLSIAGQRIAPVNETMPFKFLGRRINFQGKTPSLEVVVKQFTEDMNRVTQQPISNVKKAWIYDNYLASRLTWPFLVYDFNKSLLSSLDADVIRTLKSWLGLAQGADSSTFFRGRRNFGMDLKRPSELYKHLRISKYQILTSSQDNTISSLPRDPLVSDMEPRLLFFKKFMTGAQTDKRGIGWKKKESDKEVIKSFLRKDEEHEYRVHAMTLEVQNDWLTLGDFCIPPALKWRTLMYDWSPALLKFYLNAFQMSLPDQSNLVRWGKATEKNCTLCGAAIGTARHTLVGCVTLLEKGYYSRRHDKVLGVIREAVSLSIARARKGLTTNKTLTTFVKEGQSTKTKCKPTSILGAASDWKILMDTFEHHYRIPDELAVSAYRPDILVFSRNLKKVILIELTVPWESNIPKDHNMKSNKYYDLTEEMIRNGFKTQLYAVEVGARGVPAKSLHHLLKELGLSRSAVNTFMERASKTALTESYSIWLGRERSRMVDGERIIAQ

SEQ ID NO: 18633 - protein, 1029 aa, Tinea semifulvella
MVRPSTSTADRVSPHISHGTTPCEFNQESMTIRTRLSIPTIKETTWKVHDGNLAVMLDCPGTKQDLDSQVRAFQNTVYDYFSEHYPPTTTHAHTNKENTFKLKLRRKKRELRKRLRCAKNIGDKQQCHQVARALRSILKLIQGISLQIKDNSNQYNRARHEVLFDKNPFVYARKIFSEKSGVLSLTRDQIYKYYKETYTEIQKEEQYLDPPSPRPVRPLEDFRCLPPSMEEMDEQMKRKSSKSAPGPDGIPYIVYKKCPYTRKHLYNIYRKIWSTNQVPKAFGEAVFVLIPKKTEVNDPKDARPIALTNTMSKIFFSIVQARMSQFMIKNEYFSRQHQKGFLPGVSGCLEHNTLLAECLKDARKQERQLSVCWIDLENAFGSVQHELLQTALKWYNLPTLIRDIIANYYKNLRFVVTNKDGYTDTLKYNVGLFQGCCLSPVAFNIIINILIDKLKSREKKWGYRFKQNNIYTESVLAFADDLAVLTRNPKQCQGLLKIVDDFCSWTKGMRTKPSKCFSLCLARRNTTFTSYDPGLTIAGQRIAPVNETMPFKFLGRRIIFQGKTPSLEVVVKQFTDDMNRVTQQPISNVKKAWIYDNYLASRLTWPFLVYDFNKSLLSSLDADVIRTLKSWLGLAQGADSSTFFRGRRNFGMDLKRPSELYKHLRISKYQILTSSQDNTISSLPRDPLVSDMEPRLLFFKKFMTGAQTDKRGIGWKKKESDKEVIKSFLRKDEEHEYRVHAMTLEVQNDWLTLGDFCIPPALKWRTLMYDWSPALLKFYLNAFQMSLPDQSNLVRWGKATEKNCTLCGAAIGTARHTLVGCVTLLEKGYYSRRHDKVLGVIREAVSLSIARARKGLTTNKTLTTFVKEGQSTKTKCKPTSILGAASDWKILMDTFEHHYRIPDELAVSAYRPDILVFSRNLKKVILIELTVPWESNIPKDHNMKSNKYYDLTEEMIRNGFKTQLYAVEVGARGVPAKSLHHLLKELGLSRSAVNTFMERASKTALTESYSIWLGRERSRMVDGERIIAQ

SEQ ID NO: 18634 - protein, 801 aa, Tinea semifulvella
MEEMDEQMKRKSSKSAPGPDGIPYIVYKKCPHTRKHLYNIYRKIWSTNQVPKAFGEAVFVLIPKKTEVNDPKDARPIALTNTMSKIFFSIVQARMSRFMIKNEYFSRQHQKGFLPGVSGCLEHNTLLAECLKDARKQERQLSVCWIDLENAFGSVQHELLQTALKWYNFPTLIRDILANYYKNLRFVVTNKDGYTDTLKYNVGLFQGCCLSPVAFNIIINILIDKLKSREKKWGYRFKQNNIYTESVLAFADDLAVLTRNPKQCQGLLKIVDDFCSWTKGMRTKPSKCFSLCLARRNTTFTSYDPGLTIAGQRIAPVNETMPFKFLGRRINFQGKTPSLEVVVKQFTDDMNRVTQQPISNVKKAWIYDNYLASRLTWPFLVYDFNKSLLSSLDADVIRTLKSWLGLAQGADSSTFFRGRRNFGMDLKRPSELYKHLRISKYQILTSSQDNTISSLPRDPLVSDMEPRLLFFKKFMTGAQTDKRGIGWKKKESDKEVIKSFLRKDEEHEYRVHAMTLEVQNDWLTLGDFCIPPALKWRTLMYDWSPALLKFYLNAFQMSLPDQSNLVRWGKATEKNCTLCGAAIGTARHTLVGCVTLLEKGYYSRRHDKVLGVIREAVSLSIARARKGLTTNKTLTTFVKEGQSTKTKCKPTSIFGAASDWKILMDTFEHHYRIPDELAVSAYRPDILVFSRNLKKVILIELTVPWESNIPKDHNMKSNKYYDLTEEMIRNGFKTQLYAVEVGARGVPAKSLHHLLKELGLSRSAVNTFMERASKTALTESYSIWLGRERSRMVDGERIIAQ

SEQ ID NO: 18635 - protein, 1108 aa, Tinea semifulvella
MPRVKAQQAIPSYYIAKKSKKNNTPGTVREGGRMNCPLVDNNNDPGDNMDLKCPTCGKIYRRQAWFKKHLKIHEGIEAQMVRPSTSTADRVSPHISHGTPPCEFNQESMTIRTRLSIPTIKETTWKVHDGNLAVMLDCPGTKQDLDSQVRAFQNTVYDYFSEHYPPTTTHAHTNKENTFKLKLRRKKRELRKRLRCAKNIGDKQQCHQVARALRSILKLIQGISLQIKDNSNQYNRARHEVLFDKNPFIYARKIFSEKSGVLSLTRDQIYKYYKETYTEIQKEEQYLDPPSPRPVRPLEDFRCLPPSMEEMEEQIKRKSSKSAPGPDGIPYIVYKKCPHTRKHLYNIYRKIWSTNQVPKAFGEAVFVLIPKKTEVNDPKDARPIALTNTMSKIFFSIVQARMSRFMIKNEYFSRQHQKGFLPGVSGCLEHNTLLAECLKDARKQERQLSVCWIDLENAFGSVQHELLQTALKWYNFPTLIRDIIANYYKNLRFVVTNKDGYTDTLKYNVGLFQGCCLSPVAFNIIINILIDKLKSREKKWGYRFKQNNIYTESVLAFADDLAVLTRNPKQCQGLLEIVDDFCSWTKGMRTKPSKCFSLCLARRNTTFTSYDPGLSIAGQRIAPVNETMPFKFLGRRINFQGKTPSLEVVVKQFTDDMNRVTQQPISNVKKAWIYDNYLASRLTWPFLVYDFNKSLLSSLDADVIRTLKSWLGLAQGADSSTFFRGRRNFGMDLKRPSELYKHLRISKYQILTSSQDNTISSLPKDPLVSDMEPRLLFFKKFMTGAQTDKRGIGWKKKESDKEVIKSFLRKDEEHEYRVHAMTLEVQNDWLTLGDFCIPPALKWRTLMYDWSPALLKFYLNAFQMSLPDQSNLVRWGKATEKNCTLCGAAIGTARHTLVGCVTLLEKGYYSRRHDKVLGVIREAVSLSIARARKGLTTNKTLTTFVKEGQSTKTKCKPTSILGAASDWKILMDTFEHHYRIPDELAVSAYRPDILVFSRNLKKVILIELTVLWESNIPKDHNMKSNKYYDLTEEMIRNGFKTQLYAVEVGARGVPAKSLHHLLKELGLSRSAVNTFMERASKTALTESYSIWLGRERSRMVDGERIIAK

SEQ ID NO: 18636 - protein, 1029 aa, Tinea semifulvella
MVRPSTSTADRVSPHISHGTPPCEFNQEPMTIRTRLSIPTIKETTWKVHDGNLAVMLDCPGTKQDLDSQVRAFQNTVYDYFSEHYPPTTTHAHTNKENTFKLKLRRKKRELRKRLRCAKNIGDKQQCHQVARALRSILKLIQGISLQIKDNSNQYNRARHEVLFDNNPFVYARKIFSEKSGVLSLTRDQIYKYYKETYTEIQKEDQYLDPPSPRPVRPLEDFRCLPPSMEEMEEQIKRKSSKSAPGPDGIPYIVYKKCPHTRKHLYNIYRKIWSTNQVPKAFGEAVFVLIPKKTEVNDPKDARPIALTNTMSKIFFSIVQARMSRFMIKNEYFSRQHQKGFLPGVSGCLEHNTLLAECLKDARKQERQLSVCWIDLENAFGSVQHELLQTALKWYNFPTLIRDIIANYYKNLRFVVTNKDGYTDTLKYNVGLFQGCCLSPVAFNIIINILIDKLKSREKKWGYRFKQNNIYTESVLAFADDLAVITRNPKQCQGLLKIVDDFCSWTKGMRTKPSKCFSLCLARRHTTFTSYDPGLSTAGQRIAPVNETMPFKFLGRRINFQGKTPSLEVVVKQFTDDMNRVTQQPISNVKKAWIYDNYLASRLTWPFLVYDFNKSLLSSLDADVIRTLKSWLGLAQGADSSTFFRGRRNFGMDLKRPSELYKHLRISKYQILTSSKDNTISSLPRDPLVSDMEPRLLFFKKFMTGAQTDKRGIGWKKKESDKEVIKSFLRKDEEHEYRVHAMTLEVQNDWLTLGDFCIPLALKWRTLMYDWSPALLKFYLNAFQMSLPDQSNLVRWGKATEKNCTLCGAAIGTARHTLVGCVTLLEKGYYSRRHDKVLGVIREAVSLSIARARKGLTTNKTLTTFVKEGQSTKTKCKPTSILGAASDWKILMDTFEHHYRIPDELAVSAYRPDILVFSRNLKKVILIELTVPWESNIPKDHNMKSNKYYDLTEEMIRNGFKTQLYAVEVGARGVPAKSLHHLLKELGLSRSAVNTFMERASKTALTESYSIWLGRERSRMVDGERIIAQ

SEQ ID NO: 18637 - protein, 801 aa, Tinea semifulvella
MEEMEEQIKRKSSKSAPGPDGIPYIVYKKCPHTRKHLYNIYRKIWSTNQVPKAFGEAVFVLIPKKTEVNDPKDARPIALTNTMSKIFFSIVQARMSRFMIKNEYFSRQHQKGFLPGVSGCLEHNTLLAECLKDARKQERQLSVCWIDLENAFGSVQHELLQTALKWYNFPTLIRDIIANYYKNLRFVVTNKDGYTDTLKYNVGLFQGCCLSPVAFNIIINILIDKLKSREKKWGYRFKQNNIYTESVLAFADDLAVITRNPKQCQGLLKIVDDFCSWTKGMRTKTSKCFSLCLARRNTTFTSYDPGLSIAGQRIAPVNETMPFKFLGRRINFQGKTPSLEVVVKQFTDDMNRVTQQPISNVKKAWIYDNYLASRLTWPFLVYDFNKSLLSSLDADVIRTLKSWLGLAQGADSSTFFRGRRNFGMDLKRPSELYKHLRISKYQILTSSQDNTISSLPRDPLVSDMEPRLLFFKKFMTGAQTDKRGIGWKKKESDKEVIKSFLRKDEEHEYRVHAMTLEVQNDWLTLGDFCIPPALKWRTLMYDWSPALLKFYLNAFQMSLPDQSNLVRWGKATEKNCTLCGAAIGTARHTLVGCVTLLEKGYYSRRHDKVLGVIREAVSLSIARARKGLTTNKTLTTFVKEGQSTKTKCKPTSILGAASDWKILMDTFEHHYRIPDELAVSAYRPDILVFSRNLKKVILIELTVPWESNIPKDHNMKLNKYYDLTEEMIRNGFKTQLYAVEVGARGVPAKSLHHLLKELGLSRSAVNTFMERASKTALTESYSIWLGRERSRMVDGERIIAQ

SEQ ID NO: 18638 - protein, 974 aa, Tinea semifulvella
MLDCPGTKQDLDSQVRAFQNTVYDYFSEHYPPTTTHAHTNKENTFKLKLRRKKRELRKRLRCAKNIGDKQQCHQVARALRSILKLIQGISLQIKDHSNQYNRARHEVLFDKNPFVYARKIFSEKSGVLSLTREQIYKYYKETYTEIQKEEQYLDPPSPRPVRPLEDFRCLPPSMEEMEEQIKRKSSKSAPGPDGIPYIVYKKCPHTRKHLYNIYRKIWSTNQVPKAFGEAVFVLIPKKTEVNDPKDARPIALTNTMSKIFFSIVQARMSRFMIKNEYFSRQHQKGFLPGVSGCLEHNTLLAECLKDARKQERQLSVCWIDLENAFGSVQHELLQTALKWYNFPTLIRDIIANYYKNLRFVVTNKDGYTDTLKYNVGLFQGCCLSPVAFNIIINILIDKLKSREKKCGYRFKQNNIYTESVLAFADDLAVLTRNPKQCQGLLKIVDDFCSWTKGMRTKPSKCFSLCLARRNTTFTSYDPGLSIAGQRIAPVNETMPFKFLGRRINFQGKTPSLEVVVKQFTDDMNRVTQQPISNVKKAWIYDNYLASRLTWPFLVYDFNKSLLSSLDADVIRTLKSWLGLAQGADSSTFFRGRRNFGMDLKRPSELYKHLRISKYQILTSSQDNTISSLPRDPLVSDIEPRLLFFKKFMTGAQTDKRGIGWKKKESDKEVIKSFLRKDEEHEYRVHAMTLEVQNDWLTLGDFCIPPALKWRTLMYDWSPALLKFYLNAFQMSLPDQSNLVRCGKATEKNCTLCGAAIGTARHTLVGCVTLLEKGYYSRRHDKVLGVIREAVSLSIARARKGLTTNKTLTTFVKEGQSTKTKCKPTSILGAASDWKILMDTFEHHYRIPDELAVSAYRPDILVFSWNLKKVILIELTVPWESNIPKDHNMKSNKYYDLTEEMIRNGFKTQLYAVEVGARGVPAKSLHHLLKELGLSRSAVNTFMERASKTALTESYSIWLGRERSRMVDGECIIAQ

SEQ ID NO: 18639 - protein, 1108 aa, Tinea semifulvella
MPRVKAQQAIPSYYIAKKSKKNNTPGTVREGGRINCPLVDNNNDPGDNMDLKCPTCGKIYRRHAWFKKHLKIHEGIEAQVVRPSTSTADRVSPHISHGTPPCEFNQESMTIRTRLSIPTIKETTWKVHDGNLAVMLDCPGTKQDLDSQVRAFQNTVYDYFSEHYPPTTTHAHTNKENTFKLKLRRKKRELRKRLRCAKNIGDKQQCHQVARALRSILKLIQGISLQIKDNSNQYNRARHEVLFDKNPFVYARKIFSEKSGVLSLTRDQIYKYYKETYTEIQKEEQYLDPPSPRPVRPLEDFRCLPPSMEEMEEQIKRKSSKSAPGPDGIPYIVYKKCPHTRKHLYNIYRKIWSTNQVPKAFGEAVFVLIPKKTEVNDPKDARPIALTNTMSKIFFSIVQARMSRFMIKNEYFSRQHQKGFLPGVSGCLEHNTLLAECLKDARKQERQLSVCWIDLENAFGSVQHELLQTALKWYNFPTLIRDIIANYYKNLRFVVTNKDGYTDTLKYNVGLFQGCCLSPVAFNIIINILIDKLKSREKKWGYRFKQNNIYTESVLAFADDLAVLTRNPKQCQGLLKIVDDFCSWTKGMRTKPSKCFSLFLARRNTTFTSYDPGLSIAGQRIAPVNETMPFKFLGRRINFQGKTPSLEVVVKQFTDDMNRVTQQPISNVKKAWIYDNYLASRLTWPFLVYDFNKSLLSSLDADVIRTLKSWLGLAQGADSSTFFRGRRNFGMDLKRPSELYKHLRISKYQILTSSQDNTISSLPKDPLVSDMEPRLLFFKKFMTGAQTDKRGIGWKKKESDKEVIKSFLRKDEEHEYRVHAMTLEVQNDWLTLGDFCIPPALKWRTLMYDWSPALLKFYLNAFQMSLPDQSNLVRWGKATEKNCTLCGAAIGTARHTLVGCVTLLEKGYYSRRHDKVLGVIREAVSLSIARARKGLTTNKTLTTFVKEGQSTKTKCKPTSILGAASDWKILMDTFEHHYRIPDELAVSAYRPDILVFSRNLKKVILIELTVPWESNIPKDHNMKSNKYYDLTEEMIRNGFKTQLYAVEVGARGVPAKSLHHLLKELGLSRSAVNTFMERASKTALTESYSIWLGRERSRMVDGERIIAK

SEQ ID NO: 18640 - protein, 1075 aa, Tinea semifulvella
MNCPLVDNNKDPGDNMDLKCPTCGKIYRRQAWFKKHLKTHEGIEAQMVRPSTSTADRVSPHISHGTPPCEFNQESMTIRTRLSIPTIKETTWKVHDGNLAVMLDCPGTKQDLDSQVRAFQNTVYDYFSEHYPPMTTHAHTNKENTFKLKLRRKKRELRKRLRCAKNIGDKQQCHQVARALRSILKLIQGISLQIKDNSNQYNRARHEVLFDNNPFVYARKIFSEKSGVLSLTRDQIYKYYKETYTEIQKEEQYLDPPSPRPVRPLEDFRCLPPSMEEMEEQIKRKSSKSAPGPDGIPYIVYKKCPHTRKHLYNIYRKIWSTNQVPKAFGEAVFVLIPKKTEVNDPKDARPIALTNTMSKIFFSIVQARMSRFMIKNEYFSRQHQKGFLPGVSGCLEHNTLLAECLKDARKQERQLSVCWIDLENAFGSVQHELLQTALKWYNFPTLIRDIIANYYKNLRFVVTNKDGYTDTLKYNVGLFQGCCLSPVAFNIIINILIDKLKSREKKWGYRFKQNNIYTESVLAFADDLAVITRNPKQCQGLLKIVDDFCSWTKGMRTKPSKCFSLCLARRNTTFTSYDPGLSIAGQRIAPVNETMPFKFLGRRINFQGKTPSLEVVVKQFTDDMNRVTQQPISNVKKAWIYDNYLASRLTWPFLVYDFNKSLLSSLDADVIRTLKSWLGLAQGADSSTFFRGRRNFGMDLKRPSELYKHLRISKYQILTSSQDNTISSLPRDPLVSDMEPRLLFFKKFMTGAQTDKRGIGWKKKESDKEVIKSFLRKDEEHEYRVHAMTLEVQNDWLTLGDFCIPPALKWRTLMYDWSPALLKFYLNAFQMSLPDQSNLVRWGKATEKNCTLCGAAIGTARHTLVGCVTLLEKGYYSRRHDKVLGVIREAVSLSIARARKGLTTNKTLTTFVKEGQSTKTKCKPTSILGAASDWKILMDTFEHHYRIPDELAVSAYRPDILVFSRNLKKVILIELTVPWESNIPKDHNMKSNKYYDLTEEMIRNGFKTQLYAVEVGARGVPAKSLHHLLKELGLSRSAVNTFMERASKTALTESYSIWLGRERSRMVDGERIIAQ

SEQ ID NO: 18641 - protein, 1108 aa, Tinea semifulvella
MPRVKAQQAIPSYYIAKKSKKNNTPGTVREGGRMNCPLVDNNNDPGDNMDLKCPTCGKIYRRQAWFKKHLKTHEGIEAQMVRPSTSTADRVSPHISHGTPPCEFNQESMTIRTRLSIPTIKETTWKVHDGNLAVMLDCPGTKQDLDSQVRAFQNTVYDYFSEHYPPTTTHAHTNKENTFKLKLRRKKRELRKRLRCAKNIGDKQQCHQVARALRSILKLIQGISLQIKDNSNQYNRARHEVLFDKNPFVYARKIFSEKSGVLSLTRDQIYKYYKETYTEIQKEEQYLDPPSPRPVRPLEDFRCLPPSMEEMEEQIKRKSSKSAPGPDGIPYIVYKKCPHTRKHLYNIYRKIWSTNQVPKAFGEAVFVLIPKKTEVNDPKDARPIALTNTMSKIFFSIVQARMSRFMIKNEYFSRQHQKGFLPGVSGCLEHNTLLAECLKDARKQERQLSVCWIDLENAFGSVQHELLQTALKWYNFPTLIRDIIANYYKNLRFVVTNKDGYTDTLKYNVGLFQGCCLSPVAFNIIINILIDKLKSREKKWGYRFKQNNIYTESVLAFADDLAVITRNPKQCQGLLKIVDDFCSWTKGMRTKPSKCFSLCLARRNTTFTSYDPGLSIAGQRIAPVNETMPFKFLGRRINFQGKTPSLEVVVKQFTDDMNRVTQQPISNVKKAWIYDNYLASRLTWPFLVYDFNKSLLSSLDADVIRTLKSWLGLAQGADSSTFFRGRRNFGMDLKRPSELYKHLRISKYQILTSSQDNTISSLPRDPLVSDMEPRLLFFKKFMTGAQTDKRGIGWKKKESDKEVIKSFLRKDEEHEYRVHAMALEVQNDWLTLGDFCIPPALKWRTLMYDWSPALLKFYLNAFQMSLPDQSNLVRWGKATEKNCTLCGAAIGTARHTLVGCVTLLEKGYYSRRHDKVLGVIREAVSLSIARARKGLTTNKTLTTFVKEGQSTKTKCKPTSLLGAASDCKILMDTFEHHYRIPDELAVSAYRPDILVFSRNLKKVILIELTVPWESNIPKDHNMKSNKYYDLTEEMIRNGFKTQLYAVEVGARGVPAKSLHHLLKELGLSRSAVNTFMERASKTALTESYSIWLGRERSRMVDGERIIAQ

SEQ ID NO: 18642 - protein, 1108 aa, Tinea semifulvella
MPRVKAQQAILSYYIAKKSKKNNTPGTVREGGRMNCPLVDNNNDPGDNMDLKCPTCGKIYRRQAWFKKHLKTHEGIEAQMVRPSTSTADRVSPHISHGTPPCEFNQESMTIRTRLSIPTIKETTWKVHDGNLAVMLDCPGTKQDLDSQVRAFQNTVYDYFSEHYPPTTTHAHTNKENTFKLKLRRKKRELRKRLRCAKNIGDKQQCHQVARALRSILKLIQGISLQIKDNSNQYNRARHEVLFDNNPFVYARKIFSEKSGVLSLTRDQIYKYYKETYTEIQKEEQYLDPPSPRPVRPLEDFRCLPPSMEEMEEQIKRKSSKSAPGPDGIPYIVYKKCPHTRKHLYNIYRKIWSTNQVPKAFGEAVFVLIPKKTEVNDPKDARPIALTNTMSKIFFSIVQARMSRFMIKNEYFSRQHQKGFLPGVSGCLEHNTLLAECLKDARKQERQLSVCWIDLENAFGSVQHELLQTALKWYNFPTLIRDIIANYYKNLRFVVTNKDGYTDTLKYNVGLFQGCCLSPVAFNIIINILIDKLKSREKKWGYRFKQNNIYTESVLAFADDLAVITRNPKQCQGLLKIVDDFCSWTKGMRTKPSKCFSLCLARRNTTFTSYDPGLSIAGQRIAPVNETMPFKFLGRRINFQGKTPSLEVVVKQFTDDMNRVTQQPISNVKKAWIYDNYLASRLTWPFLVYDFNKSLLSSLDADVIRTLKSWLGLAQGADSSTFFRGRRNFGMDLKRPSELYKHLRISKYQILTSSQDNTISSLPRDPLVSDMEPRLLFFKKFMTGAQTDKRGIGWKKKESDKEVIKSFLRKDEEHEYRVHAMTLEVQNDWLTLGDFCIPPALKWRTLMYDWSPALLKFYLNAFQMSLPDQSNLVRWGKATEKNCTLCGAAIGTARHTLVGCVTLLEKGYYSRRHDKVLGVIREAVSLSIARARKGLTTNKTLTTFVKEGQSTKTKCKPTSILGAASDWKILMDTFEHHYRIPDELAVSAYRPDILVFSRNLKKVILIELTVPWESNIPKDHNMKSNKYYDLTEEMIRNGFKTQLYAVEVGARGVPAKSLHHLLKELGLSRSAVNTFMERASKTALTESYSIWLGRERSRMVDGERIIAQ

SEQ ID NO: 18643 - protein, 801 aa, Tinea semifulvella
MEEMEEQIKRKSSKSAPGPDGIPYIVYKKCPHTRKHLYNIYRKIWSTNQVPKAFGEAVFVLIPKKTEVNDPKDARPIALTNTMSKIFFSIVQARMSRFMIKNEYFSRQHQKGFLPGVSGCLEHNTLLAECLKDARKQERQLSVCWIDLENAFGSVQHELLQTALKWYNFPTLIRDIIANYYKNLRFVVTNKDGYTDTLKYNVGLFQGCCLSPVAFNIIINILIDKLKSREKKWGYRFKQNNIYTESVLAFADDLAVLTRNPKQCQGLLKIVDDFCSWTKGMRTKPSKCFSLCLARRNTTFTSYDPGLSIAGQRIAPVNETMPFKFLGRRINFQGKTPSLEVVVKQFTDDMNRVTQQPISNVKKAWIYDNYLASRLTWPFLVYDFNKSLLSSLDADVIRTLKSWLGLAQGADSSTFFRGRRNFGMDLKRPSELYKHLRISKYQILTSSQDNTISSLPKDPLVSDMEPRLLFFKKFMTGAQTDKRGIGWKKKESDKEVIKSFLRKDEEHEYRVHAMTLEVQNDWLTLGDFCIPPALKWRTLMYDWSPALLKFYLNAFQMSLPDQSNLVRWGKATEKNCTLCGAAIGTARHTLVGCVTLLEKGYYSRRHDKVLGVIREAVSLSIARARKGLTTNKTLTTFVKEGQSTKTKCKPTSILGAASDWKILMDTFEHHYRIPDELAVSAYRPDILVFSRNLKKVILIELTVPWESNIPKDHNMKSNKYYDLTEEMIRNGFKTQLYAVEVGARGVPAKSLHHLLKELGLSRSAVNTFMERASKTALTESYSIWLGRERSRMVDGERIIAK

SEQ ID NO: 18644 - protein, 1075 aa, Tinea semifulvella
MNCPLVDNNNDPGDNMDLKCPTCGKIYRRQAWFKKHLKTHEGIEAQMVRPSTSTADRVSPHISHGTPPCEFNQESMTIRTRLSIPTIKETTWKVHDGNLAVMLDCPGTKQDLDSQVRAFQNTVYDYFSEHYPPTTTHAHTNKENTFKLKLRRKKRELRKRLRCAKNIGDKQQCHQVARALRSILKLIQGISLQIKDHSNQYNRARHEVLFDKNPFVYARKIFSEKSGVLSLTRDQIYKYYKETYTEIQKEEQYLDPPSPRPVRPLEDFRCLPPSMEEMEEQIKRKSSKSAPGPDGIPYIVYKKCPHTRKHLYNIYRKIWSTNQVPKAFGEAVFVLIPKKTEVNDPKDARPIALTNTMSKIFFSIVQARMSRFMIKNEYFSRQHQKGFLPGVSGCLEHNTLLAECLKDARKQERQLSVCWIDLENAFGSVQHELLQTALKWYNFPTLIRDIIANYYKNLRFVVTNKDGYTDTLKYNVGLFQGCCLSPVAFNIIINILIDKLKSREKKCGYRFKQNNIYTESVLAFADDLAVLTRNPKQCQGLLKIVDDFCSWTKGMRTKPSKCFSLCLARRNTTFTSYDPGLSIAGQRIAPVNETMPFKFLGRRINFQGKTPSLEVVVKQFTDDMNRVTQQPISNVKKAWIYDNYLASRLTWPFLVYDFNKSLLSSLDADVIRTLKSWLGLAQGADSSTFFRGRRNFGMDLKRPSELYKHLRISKYQILTSSQDNTISSLPRDPLVSDMEPRLLFFKKFMTGAQTDKRGIGWKKKESDKEVIKSFLRKDEEHEYRVHAMTLEVQNDWLTLGDFCIPPALKWRTLMYDWSPALLKFYLNAFQMSLPDQSNLVRWGKATEKNCTLCGAAIGTARHTLVGCVTLLEKGYYSRRHDKVLGVIREAVSLSIARARKGLTTNKTLTTFVKEGQSTKTKCKPTSILGAASDWKILMDTFEHHYRIPDELAVSAYRPDILVFSRNLKKVILIELTVPWESNIPKDHNMKSNKYYDLTEEMIRNGFKTQLYAVEVGARGVPAKSLHHLLKELGLSRSAVNTFMERASKTALTESYSIWLGRERSRMVDGERIIAQ

SEQ ID NO: 18645 - protein, 1105 aa, Tinea semifulvella
MPRVKAQQAIPSYYIAKKSKKNNTPGTVREGGRMNCPLVDNNNDPGDNMDLKCPTCGKIYRRQAWFKKHLKTHEGIEAQMVRPSTSTADRVSPHISHGTPPCEFNQESMTIRTRLSIPTIKETTWKVHDGNLAVMLDCPGTKQDLDSQVRAFQNTVYDYFSEHYPPTTTHAHTNKENTFKLKLRRKKRELRKRLRCAKNIGDKQQCHQVARALRSILKLIQGISLQIKDHSNQYNRARHEVLFDKNPFVYARKIFSEKSGVLSLTRDQIYKYYKETYTEIQKEEQYLDPPSPRPVRPLEDFRCLPPSMEEMEEQFKRKSSKSAPGPDGIPYIVYKKCPHTRKHLYNIYRKIWSTNQVPKAFGEAVFVLIPKKTEVNDPKDARPIALTNTMSKIFFSIVQARMSRFMIKNEYFSRQHQKGFLPGVSGCLEHNTLLAECLKDARKQERQLSVCWIDLENAFGSVQHELLQTALKWYNFPTLIRDIIANYYKNLRFVVTNKDGYTDTLKYNVGLFQGCCLSPVAFNIIINILIDKLKSREKKCGYRFKQNNIYTESVLAFADDLAVLTRNPKQCQGLLKIVDDFCSWTKGMRTKPSKCFSLCLARRNTTFTSYDPGLSIAGQRIAPVNETMPFKFLGRRINFQGKTPSLEVVVKQFTDDMNRVTQQPISNVKKAWIYDNYLASRLTWPFLVYDFNKSLLSSLDADVIRTLKSWLGLAQGADSSTFFRGRRNFGMDLKRPSELYKHLRISKYQILTSSQDNTISSLPRDPLVSDMEPRLLFFKKFMTGAQTDKRGIGWKKKESDKEVIKSFLRKDEEHEYRVHAMTLEVQNDWLTLGDFCIPPALKWRTLMYDWSPALLKFYLNVFQMSLPDQSNLVRWGKATEKNCTLCGAAIGTARHTLVGCVTLLEKGYYSRRHDKVLGVIREAVSFSIARARKGLTTNKTLTTFVKEGQSTKTKCKPTSILGAASDWKILMDTYYRIPDELAVSAYRPDILVFSRNLKKVILIELTVPWESNIPKDHNMKSNNYYDLTEEMIRNGFKTQLYAVEVGARGVPAKSLHHLLKELGLSRSAVNTFMERASKTALTESYSIWLGRERSRMVDGERIIAQ

SEQ ID NO: 18646 - protein, 1108 aa, Tinea semifulvella
MPRVKAQQAIPSYYIAKKSKKNNTPGTVREGGRMNCPLVDNNNDPGDNMDLKCPTCGKIYRRQAWFKKHLKIHEGIEAQMVRPSTSTADRVSPHISHGTPPCEFNQESMTIRTRLSIPTIKETTWKVHDGNLAVMLDCPGTKQDLDSQVRAFQNTVYDYFSEHYPPTTTHAHTNKENTFKLKLRRKKRELRKRLRCAKNIGDKQQCHQVARALRSILKLIQGISLQIKDNSNQYNRARHKVLFDKNPFVYARKIFSEKSGVLSLTRDQIYKYYKETYTEIQKEEQYLDPPSPRPVRPLEDFRCLPPSMEEMEEQIKRKSSKSAPGPDGIPYIVYKKCPHTRKHLYNIYRKIWSTNQVPKAFGEAVFVLIPKKTEVNDPKDARPIALTNTMSKIFFSIVQARMSRFMIKNEYFSRQHQKGFLPGVSGCLEHNTLLAECLKDARKQERQLSVCWIDLENAFGSVQHELLQTALKWYNFPTLIRDIIANYYKNLRFVVTNKDGYTDTLKYNVGLFQGCCLSPVAFNIIINILIDKLKSREKKWGYRFKQNNIYTESVLAFADDLAVLTRNPKQCQGLLKIVDDFCSWTKGMRTKPSKCFSLCLARRNTTFTSYDPGLSIAGQRIAPVNETMPFKFLGRRINFQGKTPSLEVVVKQFTDDMNRVTQQPISNVKKAWIYDNYLASRLTWPFLVYDFNKSLLSSLDADVIRTLKSWLGLAQGADSSTFFRGRRNFGMDLKRPSELYKHLRISKYQILTSSQDNTISSLPKDPLVSDMEPRLLFFKKFMTGAQTDKRGIGWKKKESDKEVIKSFLRKDEEHEYRVHAMTLEVQNDWLTLGDFCIPPALKWRTLMYDWSPALLKFYLNAFQMSLPDQSNLVRWGKATEKNCTLCGAAIGTARHTLVGCVTLLEKGYYSRRHDKVLGVIREAVSLSIARARKGLTTNKTLTTFVKEGQSTKTKCKPTSILGAASDWKILMDTFEHHYRIPDELAVSAYRPDILVFSRNLKKVILIELTVPWESNIPKDHNMKSNKYYDLTEEMIRNGFKTQLYAVEVGARGVPAKSLHHLLKELGLSRSAVNTFMERASKTALTESYSIWLGRERSRMVDGERIIAK

SEQ ID NO: 18647 - protein, 1056 aa, Tinea semifulvella
MPNVRKIYRRQAWFKKHLKTHEGIEAQMVRPSTSTADRVSPHISHGTPPCEFNQESMTIRTRLSIPTIKETTWKVHDGNLAVMLDCPGTKQDLDSQVRAFQNTVYDYFSEHYPPTTTHAHTNKENTFKLKLRRKKRELRKRLRCAKNIGDKQQCHQVARALRSILKLIQGISLQIKDNSNQYNRARHEVLFDKNPFVYARKIFSEKSGVLSLTRDQIYKYYKETYTEIQKEEQYLDPPSPRPVRPLEDFRCLPPSMEEMDEQMKRKSSKSAPGPDGIPYIVYKKCPHTRKHLYNIYRKIWSTNQVPKAFGEAVFVLIPKKTEVNDPKDARPIALTNTMSKIFFSIVQARMSRFMIKNEYFSRQHQKGFLPGVSGCLEHNTLLAECLKDARKQERQLSVCWIDLENAFGSVQHELLQTALKWYNFPTLIRDIIANYYKNLRFVVTNKDGYTDTLKYNVGLFQGCCLSPVAFNIIINILIDKLKSREKKWGYRFKQNNIYTESVLAFADDLAVLTRNPKQCQGLLKIVDDFCSWTKGMRTKPSKCFSLCLARRNTTFTSYDPGLTIAGQRIAPVNETMPFKFLGRRINFQGKTPSLEVVVKQFTDDMNRVTQQPISNVKKAWIYDNYLASRLTWPFLVYDFNKSLLSSLDADVIRTLKSWLGLAQGADSSTFFRGRRNFGMDLKRPSELYKHLRISKYQILTSSQDNTISSLPRDPLVSDMEPRLLFFKKFMTGAQTDKRGIGWKKKESDKEVIKSFLRKDEEHEYRVHAMTLEVQNDWLTLGDFCIPPALKWRTLMYDWSPALLKFYLNAFQMSLPDQSNLVRWGKATEKNCTLCGAAIGTARHTLVGCVTLLEKGYYSRRHDKVLGVIREAVSLSIARARKGLTTNKTLTTFVKEGQSTKTKCKPTSILGAASDWKILMDTFEHHYRIPDELAVSAYRPDILVFSRNLKKVILIELTVPWESNIPKDHNMKSNKYYDLTEEMIRNGFKTQLYAVEVGARGVPAKSLHHLLKELGLSRSAVNTFMERASKTALTESYSIWLGRERSRMVDGERIIAQ

SEQ ID NO: 18648 - protein, 1108 aa, Tinea semifulvella
MPRVKAQQAIPSYYIAKKSKKNNTPGTVREGGRMNCPLVDNNNDPGDNMDLKCPTCGKIYRRQAWFKKHLKTHEGIEAQMVRPSTSTADRVSPHISHGTPPCEFNQESMTIRTRLSIPTIKETTWKVHDGNLAVMLDCPGTKQDLDSQVRAFQNTVYDYFSEHYPPTTIHAHTNKENTFKLKLRRKKRELRKRLRCAKNIGDKQQCHQVARALRSILKLIQGISLQIKDNSNQYNRARHEVLFDNNPFVYARKIFSEKSGVLSLTRDQIYKYYKETYTEIQKEEQYLDPPSPRPVRPLEDFRCLPPSMEEMEEQIKRKSSKSAPGPDGIPYIVYKKCPHTRKHLYNIYRKIWSTNQVPKAFGEAVFVLIPKKTEVNDPKDARPIALTNTMSKIFFSIVQARMSRFMIKNEYFSRQHQKGFLPGVSGCLEHNTLLAECLKDARKQERQLSVCWIDLENAFGSVQHELLQTALKWYNFPTLIRDIIANYYKNLRFVVTNKDGYTDTLKYNVGLFQGCCLSPVAFNIIINTLIDKFKSREKKWGYRFKQNNIYTESVLAFADDLAVITRNPKQCQGLLKIVDDFCSWTKGMRTKPSKCFSLCLARRNTTFTSYDPGLSIAGQRIAPVNETMPFKFLGRRINFQGKTPSLEVVVKQFTDDMNRVTQQPISNVKKAWIYDNYLASRLTWPFLVYDFNKSLLSSLDADVIRTLKSWLGLAQGADSSTFFRGRRNFGMDLKRPSELYKHLRISKYQILTSSQDNTISSLPRDPLVSDMEPRLLFFKKFMTGAQTDKRGIGWKKKESDKEVIKSFLRKDEEHEYRVHAMTLEVQNDWLTLGDFCIPPALKWRTLMYDWSPALLKFYLNAFQMSLPDQSNLVRWGKATEKNCTLCGAAIGTARHTLVGCVTLLEKGYYSRRHDKVLGVIREAVSLSIARARKGLTTNKTLTTFVKEGQSTKTKCKPTSILGAASDWKILMDTFEHHYRIPDELAVSAYRPDILVFSRNLKKVILIELTVPWESNIPKDHNMKSNKYYDLTEEMIRNGFKTQLYAVEVGARGVPAKSLHHLLKELGLSRSAVNTFMERASKTALTESYSIWLGRERSRMVDGERIIAQ

SEQ ID NO: 18649 - protein, 884 aa, Tinea semifulvella
MARALRSILKLIQGISLQIKDNSNQYNRARHEVLFDKNPFVYARKIFSEKSGVLSLTRDQIYKYYKETYTEIQKEEQYLDPPSPRPVRPLEDFRCLPPSMEEMEEQIKRKSSKSAPGPDGIPYIVYKKCPHTRKHLYNIYRKIWSTNQVPKAFGEAVFVLIPKKTEVNDPKDARPIALTNTMSKIFFSIVQARMSRFMIKNEYFSRQHQKGFLPGVSGCLEHNTLLAECLKDARKQERQLSVCWIDLENAFGSVQHELLQTALKWYNFPTLIRDIIANYYKNLRFVVTNKDGYTDTLKYNVGLFQGCCLSPVAFNIIINILIDKLKSREKKWGYRFKQNNIYTESVLAFADDLAVLTRNPKQCQGLLKIVDDFCSWTKGMRTKPSKCFSLCLARRNTTFTSYDPGLSIAGQRIAPVNETMPFKFLGRRINFQGKTPSLEVVVKQFTDDMNRVTQQPISNVKKAWIYDNYLASRLTWPFLVYDFNKSLLSSLDADVIRTLKSWLGLAQGADSSTFFRGRRNFGMDLKRPSELYKHLRISKYQILTSSQDNTISSLPKDPLVSDMEPRLLFFKKFMTGAQTDKRGIGWKKKESDKEVIKSFLRKDEEHEYRVHAMTLEVQNDWLTLGDFCIPPALKWRTLMYDWSPALLKFYLNAFQMSLPDQSNLVRWGKATEKNCTLSGAAIGTARHTLVGCVTLLEKGYYSRRHDKVLGVIREAVSLSIARARKGLTTNKTLTTFVKEGQSTKTKCKPTSILGAASDWKILMDTFEHHYRIPDELAVSAYRPDILVFSRNLKKVILIELTVPWESNIPKDHNIKSNKYYDLTEEMIRNGFKTQLYAVEVGARGVPAKSASLTERIGPKQVCRQYIYGTSFQDGTNGIIQYLVG

SEQ ID NO: 18650 - protein, 1075 aa, Tinea semifulvella
MNCPLVDNNNDPGDNMDLKCPTCGKIYRRQAWFKKHLKTHEGIEAQMVRPSTSTADRVSPHISHGTPPCEFNQESITIRTRLSIPTIKETTWKVHDGNLAVMLDCPGTKQDLDSQVRAFQNTVYDYFSEHYPPTTTHAHTNKENTFKLKLRRKKRELRKRLRCAKNIGDKQQCHQVARALRSILKLIQGISLQIKDNSNQYNRARHEVLFDNNPFVYARKIFSEKSGVLSLTRDQIYKYYKETYTEIQKEEQYLDPPSPRPVRPLEDFRCLPPSMEEMEEQIKRKSSKSAPGPDGIPYIVYKKCPHTRKHLYNIYRKIWSTNQVPKAFGEAVFVLIPKKTEVNDPKDARPIALTNTMSKIFFSIVQARMSRFMIKNEYFSRQHQKGFLPGVSGCLEHNTLLAECLKDARKQERQLSVCWIDLENAFGSVQHELLQTALKWYNFPTLIRDIIANYYKNLRFVVTNKDGYTDTLKYNVGLFQGCCLSPVAFNIIINILIDKLKSREKKWGYRFKQNNIYTESVLAFADDLAVITRNPKQCQGLLKIVDDFCSWTKGMRTKPSKCFSLCLARRNTTFTSYDPGLSIAGQRIAPVNETMPFKFLGRRINFQGKTPSLEVVVKQFTDDMNRVTQQPISNVKKAWIYDNYLASRLTWPFLVYDFNKSLLSSLDADVIRTLKSWLGLAQGADSSTFFRGRRNFGMDLKRPSELYKHLRISKYQILTSSQDNTISSLPRDPLVSDMEPRLLFFKKFMTGAQTDKRGIGWKKKESDKEVIKSFLRKDEEHEYRVHAMTLEVQNDWLTLGDFCIPPALKWRTLMYDWSPALLKFYLNAFQMSLPDQSNLVRWGKATEKNCTLCGAAIGTARHTLVGCVTLLEKGYYSRRHDKVLGVIREAVSLSIARARKGLTTNKTLTTFVKEGQSTKTKCKPTSILGAASDWKILMDTFEHHYRIPDELAVSAYRPDILVFSRNLKKVILIELTVPWESNIPKDHNMKSNKYYDLTEEMIRNGFKTQLYAVEVGARGVPAKSLHHLLKELGLSRSAVNTFMERASKTALTESYSIWLGRERSRMVDGERIIAQ

SEQ ID NO: 18651 - protein, 1108 aa, Tinea semifulvella
MPRVKAQQAIPSYYIAKKSKKNNTPGTVREGGRMNCPLVDNNNDPGDNMDLKCPTCGKIYRRQAWFKKHLKTHEGIEAQMVRPSTSTADRVSPHISHGTPPCEFNQESMTIRTCLSIPTIKETTWKVHDGNLAVMLDCPGTKQDLDSQVRAFQNTVYDYFSEHYPPTTTHAHTNKENTFKLKLRRKKRELRKRLRCAKNIGDKQQCHQVARALRSILKLIQGILLQIKDNSNQYNRARHEVLFDNNPFVYARKIFSEKSGVLSLTRDQIYKYYKETYTEIQKEEQYLDPPSPRPVRPLEDFRCLPPSMEEMEEQIKRKSSKSAPGPDGIPYIVYKKCPHTRKHLYNIYRKIWSTNQVPKAFGEAVFVLIPKKTEVNDPKDARPIALTNTMSKIFFSIVQARMSRFMIKNEYFSRQHQKGFLPGVSGCLEHNTLLAECLKDARKQERQLSVCWIDLENAFGSVQHELLQTALKWYNFPTLIRDIISNYYKNLRFVVTNKDGYTDTLKYNVGLFQGCCLSPVAFNIIINILIDKLKSREKKWGYRFKQNNIYTESVLAFADDLAVITRNPKQCQGLLKIVDDFCSWTKGMRTKPSKCFSLCLARRNTTFTSYDPGLSIAGQRIAPVNETMPFKFLGRRINFQGKTPSLEVVVKQFTDDMNRVTQQPISNVKKAWIYDNYLASRLTWPFLVYDFNKSLLSSLDADVIRTLKSWLGLAQGADSSTFFRGRRNFGMDLKRPSELYKHLRISKYQILTSSQDNTIASLPRDPLVSDMEPRLLFFKKFMTGAQTDKRGIGWKKKESDKEVIKSFLRKDEEHEYRVHAMTLEVQNDWLTLGDFCIPPALKWRTLMYDWSPALLKFYLNAFQMSLPDQSNLVRWGKATEKNCTLCGAAIGTARHTLVGCVTLLEKGYYSRRHDKVLGVIREAVSLSIARARKGLTTNKTLTTFVKEGQSTKTKCKPTSILGAASDWKILMDTFEHHYRIPDELAVSAYRPDILVFSRNLKKVILIELTVPWESNIPKDHNMKSNKYYDLTEEMIRNGFKTQLYAVEVGARGVPAKSLHHLLKELGLSRSAVNTFMERASKTALTESYSIWLGRERSRMVDGERIIAQ

SEQ ID NO: 18652 - protein, 1029 aa, Tinea semifulvella
MVRPSTSTADRVSPHISHGTPPCEFNQESMTIRTRLSIPTIKETTWKVHNGNLAVMLDCPGTKQDLDSQVHAFQNTVYDYFSDHYPPTTTHAHTNKENTFKLKLRRKKRELRKRLRCAKNIGDKQQCHQVARALRSILKLIQGISLQIKDNSNQYNRARHEVLFDNNPFVYARKIFSEKSGVLSLTRDQIYKYYKETYTEIQKEEQYLDPPSPRPVRPLEDFRCLPPSMEEMEEQIKRKSSKSAPGPDGIPYIVYKKCPHTRKHLYNIYRKIWSTNQVPKAFGEAVFVLIPKKTEVNDPKDARPIALTNTMSKIFFSIVQARMSRFMIKNEYFSRQHQKGFLLGVSGCLEHNTLLAECLKDARKQERQLSVCWIDLENAFGSVQHELLQTALKWYNFPTLIRDIIANYYKNLRFVVTNKDGYTDTLKYNVGLFQGCCLSPVAFNIIINILIDKLKSREKKWGYRFKQNNIYTESVLAFADDLAVITRNPKQCQGLLKIVDDFCSWTKGMRTKPSKCFSLCLARRNTTFTSYDPGLSIAGQRIAPVNETMPFKFLGRRINFQGKTPSLEVVVKQFTYDMNRVTQQPISNVKKAWIYDNYLASRLTWPFLVYDFNKSLLSSLDADVIRTLKSWLGLAQGADSSTFFRGRRNFGMDLKRPSELYKHLRISKYQILTSSQDNTISSLPRDPLVSDMEPRLLFFKKFMTGAQTDKRGIGWKKKESDKEVIKSFLRKDEEHEYRVHAMTLEVQNDWLTLGDFCIPPALKWRTLMYDWSPALLKFYLNAFQMSLPDQSNLVRWGKATEKNCTLCGAAIGTARHTLVGCVTLLEKGYYSRRHDKVLGVIREAVSLSIARARKGLTTNKTLTTFVKEGQSTKTKCKPTSILGAASDWKILMDTFEHHYRIPDELAVSAYRPDILVFSRNLKKVILIELTVPWESNIPKDHNMKSNKYYDLTEEMIRNGFKTQLYAVEVGARGVPAKSLHHLLKELGLSRSAVNTFMERASKTALTESYSIWLGRERSRMVDGERIIAQ

SEQ ID NO: 18653 - protein, 1060 aa, Tinea semifulvella
MPRVKAQQAIPSYYIAKKSKKNNTPGTVREGGRMNCPLVDNNNDPGDNMDLKCPTCGKIYRRQAWFKKHLKIHEGIEAQMVRPSTSTADRVSPHISHGTPPCEFNQESMTIRTRLSIPTIKETTWKVHDGNLAVMLDCPGTKQDLDSQVRAFQNTVYDYFSEHYPPTTTHAHTNKENTFKLKLRRKKRELRKRLRCAKNIGDKQQCHQVARALRSILKLIQGISLQIKDNSNQYNRARHEVLFDKNPFVYARKIFSEKSGVLSLTRDQIYKYYKATYTEIQKEEQYLDPPSPRPVRPLEDFRCLPPSMEEMEEQIKRKSSKSAPGPDGIPYIVYKKCPHTRKHLYNIYRKIWSTNQVSKAFGEAVFVLIPKKTEVNDPKDARPIALTNTMSKIFFSIVQARMSRFMIKNEYFSRQHQKGFLPGVSGCLEHNTLLAECLKDARKQERQLSVCWIDLENAFGSVQHELLQTALKWYNFPTLIRDIIANYYKNLRFVVTNKDGYTDTLKYNVGLFQGCCLSPVAFNIIINILIDKLKSREKKWGYRFKQNNIYTESVLAFADDLAVLTRNPKQCQGLLKIVDDFCSWTKGMRTKPSKCFSLCLARRNTTFTSYDPGLSVAGQRIAPVNVTMPFKFLGRRINFQGKTPSLEVVVKQFTDDMNRVTQQPISNVKKAWIYDNYLASRLTWPFLVYDFNKSLLSSLDADVIRTLKSWLGLAQGADSSTFFRGRRNFGMDLKRPSELYKHLRISKYQILTSSQDNTISSLPKDPLVSDMEPRLLFFKKFMTGAQTDKRGIGWKKKESDKEVIKSFLRKDEEHEYRVHAMTLEVQNDWLTLGDFCIPPALKWRTLMYDWSPALLKFYLNAFQMSLPDQSNLVRWGKATEKNCTLCGAAIGTARHTLVGCVTLLEKGYYSRRHDKVLGVIREAVSLSIARARKGLTTNKTLTTFVKEGQSTKTKCKPTSILGAASDWKILMDTFEHHYRIPDELAVSAYRPDILVFSRNLKKVILIELTVPWESNIPKDHNMKSNKYYDLTEEMIRNGFKTQLYAVEVGARGVPAKSLHL

SEQ ID NO: 18654 - protein, 1108 aa, Tinea semifulvella
MPRVKAQQAIPSYYIAKKSKKNNTPGTVREGGRMNCPLVDNNNDPGDNMDLKCPTCGKIYRRQAWFKKHLKTHEGIEAQMVRPSTSTADRVSPHISHGTPPCEFNQESMTIRTRLSIPTIKETTWKVHDGNLAVMLDCPGTKQDLDSQVRAFQNTVYDYFSEHYPPTTTHAHTNKENTFKLKLRRKKRELRKRLRCAKNIGDKQQCHQVARALRSILKLIQGISLQIKDNSNQYNRARHEVLFDNNPFVYARKIFSEKSGVLSLTRDQIYKYYKETYTEIQKEDQYLDPPSPRPVRPLEDFRCLPPSMEEMEEQIKRKSSKSAPGPDGIPYIVYKKCPHTRKHLYNIYRKIWSTNQVPKAFGEAVFVLIPKKTEVNDPKDARPIALTNTMSKIFFSIVQARMSRFMIKNEYFSRQHQKGFLPGVSGCLEYNTLLAECLKDARKQERQLSVCWIDLENAFGSVQHELLQTALKWYNFPTLIRDIIANYYKNLRFVVTNKDGYTDTLKYNVGLFQGCCLSPVAFNIIINILIDKLKSREKKWGYRFKQNNIYTESVLAFADDLAVITRNPKQCQGLLKIVDDFCSWTKGMRTKPSKCFSLCLARRNTTFTSYDPGLSIAGQRIAPVNETMPFKFLGRRINFQGKTPSLEVVVKQFTDDMNRVTQQPISNVKKAWIYDNYLASRLTWPFLVYDFNKSLLSSLDADVIRTLKSWLGLAQGADSSTFFRGRRNFGMDLKRPSELYKHLRISKYQILASSQDNTISSLPRDPLVSDMEPRLLFFKKFMTGAQTDKRGIGWKKKESDKEVIKSFLRKDEEHEYRVHAMTLEVQNDWLTLGDFCIPPALKWRTLMYDWSPALLKFYLNAFQMSLPDQSNLVRWGKATEKNCTLCGAAIGTARHTLVGCVTLLEKGYYSRRHDKVLGVIREAVSLSIARARKGLTTNKTLTTFVKEGQSTKTKCKPTSILGAASDWKILMDTFEHHYRIPDELAVSAYRPDILVFSRNLKKVILIELTVPWESNIPKDHNMKSNKYYDLTEEMIRNGFKTQLYAVEVGARGVPAKSLHHLLKELGLSRSAVNTFMERASKTALTESYSIWLGRERSRMVDGERIIAQ

SEQ ID NO: 18655 - protein, 1107 aa, Tinea semifulvella
MPRVKAQQAIPSYYIAKKSKKNNTPGTVREGGRMNCPLDNNNDPGDNMDLKCPTCGKIYRRQAWFKKHLKIHEGIEAQMVRPSTSTADRVSPHISHGTPPCEFNQESMTIRTRLSIPTIKETTWKVHDGNLAVMLDCPGTKQDLDSQVRAFQNTVYDYFSEHYPPTTTHAHTNKENTFKLKLRRKKRELRKRLRCAKNIGDKQQCHQVARALRSILKLIQGISLQIKDNSNQYNRARHEVLFDKNPFVYARKIFSEKSGVLSLTRDQIYKYYKETYTEIQKEEQYLDPPSPRPVRPLEDFRCLPPSMEEMEEQIKRKSSKSAPGPDGIPYIVYKKCPHTRKHLYNIYRKIWSTNQVPKAFGEAVFVLIPKKTEVNDPKDARPIALTNTMSKIFFSIVQARMSRFMIKNEYFSRQHQKGFLPGVSGCLEHNTLLAECLKDARKQERQLSVCWIDLENAFGSVQHELLQTALKWYNFPTLIRDIIANYYKNLRFVVTNKDGYTDTLKYNVGLFQGCCLSPVAFNIIINILIDKLKSREKKWGYRFKQNNIYTESVLAFADDLAVLTRNPKQCQGLLKIVDDFCSWTKGMRTKPSKCFSLCLARRNTTFTSYDPGLSIAGQRIAPVNETMPFKFLGRRINFQGKTPSLEVVVKQFTDDMNRVTQQPISNVKKAWIYDNYLASRLTWPFLVYDFNKSLLSSLDADVIRTLKSWLGLAQGADSSTFFRGRRNFGMDLKRPSELYKHLRISKYQILTSSQDNTISSLPKDPLVSDMEPRLLFFKKFMTGAQTDKRGIGWKKKESDKEVIKSFLRKDEEHEYRVHAMTLEVQNDWLTLGDFCIPPALKWRTLMYDWSPALLKFYLNAFQMSLPDQSNLVRWGKATEKNCTLCGAAIGTARHTLVGCVTLLEKGYYSRRHDKVLGVIREAVSLSIARARKGLTTNKTLTTFVKEGQSTKTKCKPTSILGAASDWKILMDTFEHHYRIPDELAVSAYRPDILVFSRNLKKVILIELTVPWESNIPKDHNMKSNKYYDLTEEMIRNGFKTQLYAVEVGARGVPAKSLHHLLKELGLSRSAVNTFMERASKTALTESYSIWLGRERSRMVDGERIIAK

SEQ ID NO: 18656 - protein, 1060 aa, Tinea semifulvella
MPRVKAQQAIPSYYIAKKSKKNNTPGTVREGGRMNCPLVDNNNDPGDNMDLKCPTCGKIYRRQAWFKKHLKIHEGIEAQMVRPSTSTADRVSPHISHGTPPCEFNQESMTIRTRLSIPTIKETTWKVHDGNLAVMLDCPGTKQDLDSQVRAFQNTVYDYFSEHYPPTTTHAHTNKENTFKLKLRRKKRELRKRLRCAKNIGDKQQCHQVARALRSILKLIQGISLQIKDNSNQYNRARHEVLFDKNPFVYARKIFSEKSGVLSLTRDQIYKYYKETYTEIQKEEQYLDPPSPRPVRPLEDFRCLPPSMEEMEEQIKRKSSKSAPGPDGIPYIVYKKCPHTRKHLYNIYRKIWSTNQVSKAFGEAVFVLIPKKTEVNDPKDARPIALTNTMSKIFFSIVQARMSRFMIKNEYFSRQHQKGFLPGVSGCLEHNTLLAECLKDARKQERQLSVCWIDLENAFGSVQHELLQTALKWYNFPTLIRDIIANYYKNLRFVVTNKDGYTDTLKYNVGLFQGCCLSPVAFNIIINILIDKLKSREKKWGYRFKQNNIYTESVLAFADDLAVLTRNPKQCQGLLKIVDDFCSWTKGMRTKPSKCFSLCLARRNTTFTSYDPGLSIAGQRIAPVNETMPFKFLGRRINFQGKTPSLEVVVKQFTDDMNRVTQQPISNVKKAWIYDNYLASRLTWPFLVYDFNKSLLSSLDADVIRTLKSWLGLAQGADSSTFFRGRRNFGMDLKRPSELYKHLRISKYQILTSSQDNTISSLPKDPLVSDMEPRLLFFKKFMTGAQTDKRGIGWKKKESDKEVIKSFLRKDEEHEYRVHAMTLEVQNDWLTLGDFCIPPALKWRTLMYDWSPALLKFYLNAFQMSLPDQSNLVRWGKATEKNCTLCGAAIGTARHTLVGCVTLLEKGYYSRRHDKVLGVIREAVSLSIARARKGLTTNKTLTTFVKEGQSTKTKCKPTSILGAASDWKILMDTFEHHYRIPDELAVSAYRPDILVFSRNLKKVILIELTVPWESNIPKDHNMKSNKYYDLTEEMIRNGFKTQLYAVEVGARGVPAKSLHL

SEQ ID NO: 18657 - protein, 1075 aa, Tinea semifulvella
MNCPLVDNNNDPGDNMDLKCPTCGKIYRRQAWFKKHLKTHEGIEAQMVRPSTSTADRVSPHISHGTPPCEFNQESMTIRTRLSIPTIKETTWKVHDGNLAVMLDCPGTKQDLDSQVRAFQNTVYDYFSEHYPPTTTHAHTNKENTFKLKLRRKKRELRKRLRCAKNIGDKQQCHQVARALRSILKLIQGISLQIKDHSNQYNRARHEVLFDKNPFVYARKIFSEKSGVLSLTRDQIYKYYKETYTEIQKEEQYLDLPSPRPVRPLEDFRCLPPSMEEMEEQIKRKSSKSAPGPDGIPYIVYKKCPHTRKHLYNIYRKIWSTNQVPKAFGEAVFVLIPKKTEVNDPKDARPIALTNTMSKIFFSIVQARMSRFMIKNEYFSRQHQKGFLPGVSGCLEHNTLLAECLKDARKQERQLSVCWIDLENAFGSVQHELLQTALKWYNFPTLIRDIIANYYKNLRFVVTNKDGYTDTLKYNVGLFQGCCLSPVAFNIIINILIDKLKSREKKWGYRFKQNNIYTESVLAFADDLAVITRNPKQCQGLLKIVDDFCSWTKGMRTKPSKCFSLCLARRNTTFTSYDPGLSIAGQRIAPVNETMPFKFLGRRINFQGKTPSLEVVVKQFTDDMNRVTQQPISNVKKAWIYDNYLASRLTWPFLVYDFNKSLLSSLDADVIRTLKSWLGLAQGADSSTFFRGRRNFGMDLKRPSELYKHLRISKYQILTSSQDNTISSLPRDPLVSDMEPRLLFFKKFMTGAQTDKRGIGWKKKESDKEVIKSFLRKDEEHEYRVHAMTLEVQNDWLTLGDFCIPPALKWRTLMYDWSPALLKFYLNAFQMSLPDQSNLVRWGKATEKNCTLCSAAIGTARHTLVGCVTLLEKGYYSRRHDKVLGVIREAVSLSIARARKGLTTNKTLTTFVKEGQSTKTKCKPTSILGAASDWKILMDTFEHHYRIPDKLAVSAYRPDILVFSRNLKKVILIELTVPWESNIPKDHNMKSNKYYDLTEEMIRNGFKTQLYAVEVGARGVPAKSLHHLLKELGLSRSAVNTFMERASKTALTESYSIWLGRERSRMVDGERIIAQ

SEQ ID NO: 18658 - protein, 1108 aa, Tinea semifulvella
MPRAKAQQAIPSYYIAKKSKKNNTPGTVREGGRMNCPLVDNNNDPGDNMDLKCPTCGKIYRRQAWFKKHLKTHEGIEAQMVRPSTSTADRVSPHISHGTPPCEFNQESMTIRTRLSIPTIKETTWKVHDGNLAVMLDCPGTKQDLDSQVRAFQNTVYDYFSEHYPPTTTHAHTNKENTFKLKLRRKKRELRKRLRCAKNIGDKQQCHQVARALRSILKLIQGISLQIKDNSNQYNRARHEVLFDNNPFVYARKIFSEKSGVLSLTRDQIYKYYKETYTEIQKEEQYLDPPSPRPVRPLEDFRCLPPSMEEMEEQIKRKSSKSAPGPDGIPYIVYKKCPHTRKHLYNIYRKIWSTNQVPKAFGEAVFVLIPKKTEVNDPKDARPIALTNTMSKIFFSIVQARMSRFMIKNEYFSRQHQKGFLPGVSGCLEHNTLLAECLKDARKQERQLSVCWIDLENAFGSVQHELLQTALKWYNFPTLIRDIIANYYKNLRFVVTNKDGYTDTLKYNVGLFQGCCLSPVAFNIIINILIDKLKSREKKWGYRFKQNNIYTESVLAFADDLAVITRNPKQCQGLLKIVDDFCSWTKGMRTKPSKCFSLCLARRNTTFTSYDPGLSIAGQRIAPVNETMPFKFLGRRINFQGKTPSLEVVVKQFTDDMNRVTQQPISNVKKAWIYDNYLASRLTWPFLVYDFNKSLLSSLDADVIRTLKSWLGLAQGADSSTFFRGRRNFGMDLKRPSELYKHLRISKYQILTSSQDNTISSLPRDPLVSDMEPRLLFFKKFMTGAQTDKRGIGWKKKENDKEVIKSFLRKDEEHEYRVHAMTLEVQNDWLTLGDFCIPPALKWRTLMYDWSPALLKFYLNAFQMSLPDQSNLVRWGKATEKNCTLCGAAIGTARHTLVGCVTLLEKGYYSRRHDKVLGVIREAVSLSIARARKGLTTNKTLTTFVKEGQSTKTKCKPTSILGAASDWKILMDTFEHHYRIPDELAVSAYRPDILVFSRNLKKVILIELTVPWESNIPKDHNMKSNKYYDLTEEMIRNGFKTQLYAVEVGARGVPAKSLHHLLKELGLSRSAVNTFMERASKTALTESYSVWLGRERSRMVDGERIIAQ

SEQ ID NO: 18659 - protein, 1108 aa, Tinea semifulvella
MPRVKAQQAIPSYYIAKKSKKNNTPGTVREGGRMNCPLVDNNNDPGDNMDLKCPTCGKIYRRQAWFKKHLKTHEGIEAQMVRPSTSTADRVSPHISHGTPPCEFNQESMTIRTRLSIPTIKETTWKVHDGNLAVMLDCPGTKQDLDSQVRAFQNTVYDYFSEHYPPTTTHAHTNKENTFKLKLRRKKRELRKRLRCAKNIGDKQQCHQVARALRSILKLIQGISLQIKDNSNQYNRARHEVLFDNNPFVYARKIFSEKSGVLSLTRDQIYKYYKETYTEIQKEEQYLDPPSPRPVRPLEDFRCLPPSMEEMEEQIKRKSSKSAPGPDGIPYIVYKKCPHTRKHLYNIYRKIWSTNQVPKAFGEAVFVLIPKKTEVNDPKDARPITLTNTMSKIFFSIVQARMSRFMIKNEYFSRQHQKGFLPGVSGCLEHNTLLAECLKDARKQERQLSVCWIDLENAFGSVQHELLQTALKWYNFPTLIRDIIANYYKNLRFVVTNKDGYTDTLKYNVGLFQGCCLSPVAFNIIINILIDKLKSREKKWGYRFKQNNIYTESVLAFADDLAVITRNPKQCQGLLKIVDDFCSWTKGMRTKPSKCFSLCLARRNTTFTSYDPGLSIAGQRIAPVNETMPFKFLGRRINFQGKTPSLEVVVKQFTDDMNRVTQQPISNVKKAWIYDNYLASRLTWPFLVYDFNKSLLSSLDADVIRTLKSWLGLAQGADSSTFFRGRRNFGMDLKRPSELYKHLRISKYQILTSSQDNTISSLPRDPLVSDMEPRLLFFKKFMTGAQTDKRGIGWKKKESDKEVIKSFLRKDEEHAYRVHAMTLEVQNDWLTLGDFCIPPALKWRTLMYDWSPALLKFYLNAFQMSLPDQSNLVRWGKATEKNCTLCGAAIGTARHTLVGCVTLLEKGYYSRRHDKVLGVIREAVSLSIARARKGLTTNKTLTTFVKEGQSTKTKCKPTSILGAASDWKILMDTFEHHYRIPDELAVSAYRPDILVLSRNLKKVILIELTVPWESNIPKDHNMKSNKYYDLTEEMIRNGFKTQLYAVEVGARGVPAKSLHHLLKELGLSRSAVNTFMERASKTALTESYSIWLGRERSRMVDGERIIAQ

SEQ ID NO: 18660 - protein, 1003 aa, Tinea semifulvella
MESMTIRTRLSIPTIKETTWKVHDGNLAVMLDCPGTKQDLDSQVRAFQNTVYDYFSEHYPPTTTHAHTNKENTFKLKLRRKKRELRKRLRCAKNIGDKQQCHQVARALRSILKLIQGISLQIKDHSNQYNRARHEVLFDKNPFVYARKIFSEKSGVLLLTRDQIYKYYKETYTEIQKEEQYLDPPSPRPVRPLEDFRCLPPSMEEMEEQIKRKSSKSAPGPDGIPYIVYKKCPHTRKHLYNIYRKIWSTNQVPKAFGEAVFVLIPKKTEVNDPKDARPIALTNTMSKIFFSIVQARMSRFMIKNEYFSRQHQKGFLPGVSGCLEHNTLLAECLKDARKQERQLSVCWIDLENAFGSVQHELLQTALKWYNFPTLIRDIIANYYKNLRFVVTNKDGYTDTLKYNVGLFQGCCLSPVAFNIIINILIDKLKSREKKCGYRFKQNNIYTESVLAFADDLAVLTRNPKQCQGLLKIVDDFCSWTKGMRTKPSKCFSLCLARRNTTFTSYDPGLSIAGQRIAPVNETMPFKFLGRRINFQGKTPSLEVVVKQFTDDMNRVTQQPISNVKKAWIYDNYLASRLTWPFLVYDFNKSLLSSLDADVIRTLKSWLGLAQGADSSTFFRGRRNFGMDLKRPSELYKHLRISKYQILTSSQDNTISSLPRDPLVSDMEPRLLFFKKFMTGAQTDKRGIGWKKKESDKEVIKSFLRKDEEHEYRVHAMTLEVQNDWLTLGDFCIPPALKWRTLMYDWSPALLKFYLNAFQMSLPDQSNLVRWGKATEKNCTLCGAAIGTARHTLVGCVTLLEKGYYSRRHDKVLGVIREAVSLSIARARKGLTTNKTLTTFVKEGQSTKTKCKPTSILGAASDWKILMDTFEHHYRIPDELAVSAYRPDILVFSRNLKKVILIELTVPWESNIPKDHNMKSNKYYDLTEEMIRNGFKTQLYAVEVGARGVPAKSLHHLLKELGLSRSAVNTFMERASKTALTESYSIWLGRERSRMVDGERIIAQ

SEQ ID NO: 18661 - protein, 1108 aa, Tinea semifulvella
MPRVKAQQAIPSYYIAKKSKKNNTPGTVREGGRMNCPLVDNNNDPGDNMDLKCPTCGKIYRRQAWFKKHLKTHEGIEAQMVRPSTSTADRVSPHISHGTPPCEFNQESMTIRTRLSIPTIKETTWKVHDGNLAVMLDCPGTKQDLDSQVRAFQNTVYDYFSEHYPPTTTHAHTNKENTFKLKLRRKKRELRKRLRCAKNIGDKQQCHQVARALRSILKLIQGISLQIKDHSNQYNRARHEVLFDKNPFVYARKIFSEKSGVLSLTRDQIYKYYKETYTEIQKEEQYLDPPSPRPVRPLEDFRCLPPSMEEMEEQIKRKSSKSAPGPDGIPYIVYKKCPHTRKHLYNIYRKIWSTNQVPKAFGEAVFVLIPKKTEVNDPKDARPIALTNTMSKIFFSIVQARMSRFMIKNEYFSRQHQKGFLPGVSGCLEHNTLLAECLKDARKQERQLSVCWIDLENAFGSVQHELLQTALKWYNFPTLIRDIIANYYKNLRFVVTNKDGYTDTLKYNVGLFQGCCLSPVAFNIIINILIDKLKSREKKWGYRFKQNNIYTESVLAFADDLAVITRNPKQCQGLLKIVDDFCSWTKGMRTKPSKCFSLCLARRNTTFTSYDPGLSIAGQRIAPVNETMPFKFLGRRINFQGKTPSLEVVVKQFTDDMNRVTQQPISNVKKAWIYDNYLASRLTWPFLVYDFNKSLLSSLDADVIRTLKSWLGLAQGADSSTFFRGRRNFGMDLKRPSELYKHLRISKYQILTSSQDNTISSLPRDPLVSDMEPRLLFFKKFMTGAQTDKRGIGWKKKESDKEVIKSFLRKDEEHEYRVHAMTLEVQNDWLTLGDFCIPPALKWRTLMYDWSPALLKFYLNAFQMSLPDQSNLVRWGKATEKNCTLCGAAIGTARHTLVGCVTLLEKGYYSRRHDKVLGVIREAVSLSIARARKGLTTNKTLTTFVKEGQSTKTKCKPTSILGAASDWKILMDTFEHHYRIPDELAVSAYRPDILVFSRNLKKVILIELTVPWESNIPKDHNMKLNKYYDLTEEMIRNGFKTQLYAVEVGARGVPAKSLHHLLKELGLSRSAVNTFMERASKTALTESYSIWLGRERSRMVDGERIIAQ

SEQ ID NO: 18662 - protein, 1029 aa, Tinea semifulvella
MVRPSTSTADRVSPHISHGTPPCEFNQESMTIRTRLSIPTIKETTWKVHDGNLAVMLDCPGTKQDLDSQVRAFQNTVYDYFSEHYPPTTTHAHTNKENTFKLKLRRKKRELRKRLRCAKNIGDKQQCHQVARALRSILKLIQGISLQIKDNSNQYNRARHEVLFDNNPFVYARKIFSEKSGVLSLTRDQIYKYYKETYTEIQKEEQYLDPPSPRPVRPLEDFRCLPPSMEEMEEQIKRKSSKSAPGPDGIPYIVYKKCPHTRKHLYNIYRKIWSTNQVPKAFGEAVFVLIPKKTEVNDPKDARPIALTNTMSKIFFSIVQARMSRFMIKNEYFSRQHQKGFLPGVSGCLEHNTLLAECLKDARKQERQLSVCWIDLENAFGSVQHELLQTALKWYNFPTLIRDIIANYYKNLRFVVTNKDGYTDTLKYNVGLFQGCCLSPVAFNIIINILIDKLKSREKKWGYRFKQNNIYTESVLAFADDLAVITRNPKQCQGLLKIVDDFCSWTKGMRTKPSKCFSLCLARRNTTFTSYDPGLSIAGQRIAPVNETMPFKFLGRRINFQGKTPSLEVVVKQFTDDMNRVTQQPISNVKKAWIYDNYLASRLTWPFLVYDFNKSLLSSLDADVIRTLKSWLGLAQGADSSTFFRGRRNFGMDLKRPSELYKHLRISKYQILTSSQDNTISSLPRDPLVSDMEPRLLFFKKFMTGAQTDKRGIGWKKKESDKEVIKSFLRKDEEHEYRVHAMTLEVQNDWLTLGDFCIPPALKWRTLMYDWSPALLKFYLNAFQMSLPDQSNLVRWGKATEKNCTLCGAAIGTARHTLVGCVTLLEKGYYSRRHDKVLGVIREAVSLSIARARKGLTTNKTLTTFVKEGQSTKTKCKPTSILGAASDWKILMDTFEHHYRIPDELAVSAYRPDILVFSRNLKKVILIELTVPWESNIPKDHNMKSNKYYDLTEEMIRNGFKTQLYAVEVGARGVPAKSLHHLLKELGLSRSAVNTFMERASKTALTESYSIWLGRERSRMVDGERIIAQ

SEQ ID NO: 18663 - protein, 1108 aa, Tinea semifulvella
MPRVKAQQAIPSYYIAKKSKKNNTPGTVREGGRMNCPLVDNNNDPGDNMDLKCPTCGKIYRRQAWFKKHLKIHEGIEAQMVRPSTSTADRVSPHISHGTPPCEFNQESMTIRTRLSIPTIKETTWKVHDENLAVMLDCPGTKQDLDSQVRAFQNTVYDYFSEHYPPTTTHAHTNKENTFKLKLRRKKRELRKRLRCAKNIGDKQQCHQVARALRSILKLIQGISLQIKDNSNQYNRARHEVLFDKNPFVYARKIFSEKSGVLSLTRDQIYKYYKETYTEIQKEEQYLDPPSPRPVRPLEDFRCLPPSMEEMEEQIKRKSSKSAPGPDGIPYIVYKKCPHTRKHLYNIYRKIWSTNQVPKAFGEAVFVLIPKKTEVNDPKDARPIALTNTMSKIFFSIVQARMSRFMIKNEYFSRQHQKGFLPGVSGCLEHNTLLAECLKDARKQERQLSVCWIDLENAFGSVQHELLQTALKWYNFPTLIRDIIANYYKNLRFVVTNKDGYTDTLKYNVGLFQGCCLSPVAFNIIINILIDKLKSREKKWGYRFKQNNIYTESVLAFADDLAVLTRNPKQCQGLLKIVDDFCSWTKGMRTKPSKCFSLCLARRNTTFTSYDPGLSIAGQRIAPVNETMPFKFLGRRINFQGKTPSLEVVVKQFTDDMNRVTQQPISNVKKAWIYDNYLASRLTWPFLVYDFNKSLLSSLDADVIRTLKSWLGLAQGADSSTFFRGRRNFGMDLKRPSELYKHLRISKYQILTSSQDNTIASLPKDHLVSDMEPRLLFFKKFMTGAQTDKRGIGWKKKESDKEVIKSFLRKDEEHEYRVHAMTLEVQNDWLTLGDFCIPPALKWRTLMYDWSPALLKFYLNAFQMSLPDQSNLVRWGKATEKNCTLCGAAIGTARHTLVGCVTLLEKGYYSRRHDKVLGVIREAVSLSIARARKGLTTNKTLTTFVKEGQSTKTKCKPTSILGAASDWKILMDTFEHHYRIPDELAVSAYRPDILVFSRNLKKVILIELTVPWESNIPKDHNMKSNKYYDLTEEMIRNGFKTQLYAVEVGARGVPAKSLHHLLKELGLSRSAVNTFMERASKTALTESYSIWLGRERSRMVDGERIIAK

SEQ ID NO: 18664 - protein, 1102 aa, Tinea semifulvella
MPRVKAQQAIPSYYIAKKSKKNNTPGTVREGGRMNCPLVDNNNDPGDNMDLKCPTCGKIYRRQAWFKKHLKTHEGIEAQMVRPSTSTADRVSPHISHGTPPCEFNQESMTIRTRLSIPTIKETTWKVHDGNLAVMLDCPGTKQDLDSQVRAFQNTVYDYFSEHYPPMTTHAHTNKENTFKLKLRRKKRELRKRLRCAKNIGDKQQCHQVARALRSILKLIQGISLQIKDNSNQYNRARHEVLFDNNPFVYARKIFSEKSGVLSLTRDQIYKYYKETYTEIQKEEQYLDPPSPRPVRPLEDFRCLPPSMEEMEEQIKRKSSKSAPGPDGIPYIVYKKCPHTRKHLYNIYRKIWSTNQVPKAFGEAVFVLIPKKTEVNDPKDARPIALTNTMSKIFFSIVQARMSRFMIKNEYFSRQHQKGFLPGVSGCLEHNTLLAECLKDARKQERQLSVCWIDLENAFGSVQHELLQTALKWYNFPTLIRDIIANYYKNLRFVVTNKDGYTDTLKYNVGLFQGCCLSPVAFNIIINILIDKLKSREKKWGYRFKQNNIYTESVLAFADDLAVITRNPKQCQGLLKIVDDFCSWTKGMRTKPSKCFSLCLARRNTTFTSYDPGLSIAGQRIAPVNETMPFKFLGRRINFQGKTPSLEVVVKQFTDDMNRVTQQPISNVKKAWIYDNYLASRLTWPFLVYDFNKSLLSSLDADVIRTLKSWLGLAQGADSSTFFRGRRNFGMDLKRPSELYKHLRISKYQILTSSQDNTISSLPRDPISDMEPRLLFFKNFMTGAQTDKRGIGWKKKESDKEVIKSFLRKDEEHEYRVHAMTLEVQNDWLTLGDFCIPPALKWRTLMYDWSPALLKFYLNAFQMSLPDQSNLVRWGKATEKNCTLCGAAIGTARHTLVGCVTLLEKGYYSRRRDKVLGVIREAVSLSIARARKGLTTNKTLTTFVKEGQSTKTKCKPTSILGAASDWKILMDTFEHHYRIPDELAVSAYRPDILVFSRNLKKVILIELTVPWESNIPKDHNMKSNKYYDLTEEMIRNGFKTQLYAVEVGARGVPAKSLHHLLKELGLSRSAVNTFMERASKTALTESYSIWLGRVDGERIIAQ

SEQ ID NO: 18665 - protein, 997 aa, Tinea trinotella
MNIRTRLSIPSIKDTTWKAHDHNLAVRLDCPGNKQDLDSQVKTFQDTIYNYFSEHYPPATAYAHNNKENTFKLKMRRKKRELIKKLRWAKTMGDNHLCHQLARALRSILKLIQGISLQIDDHHNQFNRAKHEVAFDKNPFVYAKKIFSTKSGRLSLTKEQIYQYYSETYAKTHKEESYIEPLTLRPDNPSVDFQCSPPSIEEIEEQIKKKNSGSAPGPDGIPYIVFKKCQHVRKHLHNIYGKIWSSKQVPKAFGEAVFVLIPKTANVTHPTDARSIALTNTVSKIFFSVLQVRMSRFMTNNKYFTPQHQKGFLPGISGCLEHNTLLGECLKDAREHERQLTVCWIDLENAFGSVQHQLLQTALKWYNFPSVVMDIIANYYNKLSFVIANKGVYTDPLKYNVGLFQGCCLSPVAFNIIINIQIDKLKTKEKKFGYRFKLNNKYSESILAFADDLAVLTRNAKQCQELRKDIDQFCSWTKGLKTKPTKCFCLSLGRKDTKFTSFDPGLNMAGQRIAPVEEAVPFKFLGRRIDFKGKTPSLEVVIEGFIEDIKKIEERPIGNVKKAWIYDNYLTSRLTWPFLVYDFNKSLLFKLDAEVIKTLKSWLGLARGADSSTLFRGQQNFGMSFKKPSELYKHLRITKHQILTNSRDNLIASLPKDLLASEMEPRLQFHKAFMTGAQTSKKGLGWEKKKSDKEVIKSLLKQDEAHAYRVHATTLEVQNEWLTLGEICVPPALKWRTIMYDWSPALVKFYLNAFQIPKMPDQSNLVRWGKGTDKTCTLCGLAVGTARHILVGCVTLLDRGCYSRRHDKVLEIIREAVSLSIGRARKGLSTNERHITFVKESHLRKSQNKPFSILRNAPDWKILMDTFEKHYKIPEDLAVSAYRPDILVYSRRLKTIIIVKLTVPWETNIPKDHNIKSNKYYDLTNEMTKNGFKTQLYAVEVGARGLPAKTLHHLLKNLGLPRSAVTTFLDRMSKAALVGSYNIWLGRGDSEGREGEC

SEQ ID NO: 18666 - protein, 908 aa, Tinea semifulvella
MRQNIGDKQQCHQVARALRSILKLIQGISLQIKDNSNQYNRARHEVLFDNNPFVYARKIFSEKSGVLSLTRDQIYKYYKETYTEIQKEEQYLDPPSPRPVRPLEDFRCLPPSMEEMEEQIKRKSSKSAPGPDGIPYIVYKKCPHTRKHLYNIYRKIWSTNQVPKAFGEAVFVLIPKKTEVNDPKDARPIALTNTMSKIFFSIVQARMSRFMIKNEYFSRQHQKGFLPGVSGCLEHNTLLAECLKDARKQERQLSVCWIDLENAFGSVQHELLQTALKWYNFPTLIRDIIANYYKNLRFVVTNKDGYTDTLKYNVGLFQGCCLSPVAFNIIINILIDKLKSREKKWGYRFKQNNIYTESVLAFAETRNPKQCQGLLKIVDDFCSWTKGMRTKPSKCFSLCLARRNTTFTSYDPGLSIAGQRIAPVNETMPFKFLGRRINFQGKTPSLEVVVKQFTDDMNRVTQQPISNVKKAWIYDNYLASRLTWPFLVYDFNKSLLSSLDADVIRTLKSWLGLAQGADSSTFFRGRRNFGMDLKRPSELYKHLRISKYQILTSSQDNTISSLPRDPLVSDMEPRLLFFKKFMTGAQTDKRGIGWKKKESDKEVIKSFLRKDEEHEYRVHAMTLEVQNDWLTLGDFYIPPALKWRTLMYDWSPALLKFYLNAFQMSLPDQSNLVRWGKATEKNCTLCGAAIGTARHTLVGCVTLLEKGYYSRRHDKVLGVIREAVSLSIARARKGLTTNKTLTTFVKEGQSTKTKCKPTSILGAASDWKILMDTFEHHYRIPDELAVSAYRPDILVFSRNLKKVILIELTVPWESNIPKDHNMKSNKYYDLTEEMIRNGFKTQLYAVEVGARGVPAKSLHHLLKELGLSRSAVNTFMERASKTALTESYSIWLGRERSRMVDGERIIAQ

SEQ ID NO: 18667 - protein, 807 aa, Tinea semifulvella
MEEMEEQIKRKSSKSAPGPDGIPYIVYKKCPHTRKHLYNIYRKIWSTNQVPKAFGEAVFVLIPKKTEVNDPKDARPIALTNTMSKIFFSIVQARMSRFMIKNEYFSRQHQKGFLPGVSGCLEHNTLLAECLKDARKQERQLSVCWIDLENAFGSVQHELLQTALKWYNFPTLIRDIIANYYKNLRFVVTNKDGYTDTLKYNVGLFQGCCLSPVAFNIIINILIDKLKSREKKWGYRFKQNNIYTESVLAFADDLAVLTRNPKQCQGLLKIVDDFCSWTKGMRTKPSKCFSLCLARRNTTFTSYDPGLSIAGQRIAPVNETMPFKFLGRRINFQGKTPSLEVVVKQFTDDMNRVTQQPISNVKKKKKKKKSLIYDNYLASRLTWPFLVYDFNKSLLSSLDADVIRTLKSWLGLAQGADSSTFFRGRRNFGMDLKRPSELYKHLRISKYQILTSSQDNTISSLPKDPLVSDMEPRLLFFKKFMTGAQTDKRGIGWKKKESDKEVIKSFLRKDEEHEYRVHAMTLEVQNDWLTLGDFCIPPALKWRTLMYDWSPALLKFYLNAFQMSLPDQSNLVRWGKATEKNCTLCGAAIGTARHTLVGCVTLLEKGYYSRRHDKVLGVIREAVSLSIARARKGLTTNKTLTTFVKEGQSTKTKCKPTSILGAASDWKILMDTFEHHYRIPDELAVSAYRPDILVFSRNLKKVILIELTVPWESNIPKDHNMKSNKYYDLTEEMIRNGFKTQLYAVEVGARGVPAKSLHHLLKELGLSRSAVNTFMERASKTALTESYSIWLGRERSRMVDGEPIIAK

SEQ ID NO: 18668 - protein, 989 aa, Tinea trinotella
MNIRTRLNIPSIKDTTWKAHDHNLAVRLDCPGNKQDLDSQVKTFQDTIYNYFSEHYPPATAYAHNNKENTFKLKMRRKKRELIKKLRWAKTMGDNHLCHQLARALRSILKLIQGISLQIDDHHNQFNRAKHEVAFDKNPFVYAKKIFSTKSGRLSLTKEQIYQYYSETYAKTHKEESYIEPPTLRPDNPSVDFQCSPPSIEEIEEQIKKKSSGSAPGPDGIPYIVFKKCQHVRKHLHNIYGKIWSSKQVPKAFGEAVFVLIPKTANVTHPTDARPIALTNTVSKIFFSVLQVRMSRFMTNNKYFTPQHQKGFLPGISGCLEHNTLLGECLKDAREHERQLTVCWIDLENAFGSVQHQLLQTALKWYNFPSVVMDIIANYYNKLSFVIANKGVYTDPLKYNVGLFQGCCLSPVAFNIIINILIDKLKTKEKKFGYRFKLNNKYSESILAFADDLAVLTRNAKQCQELLKDIDQFCSWTKGLKTKPTKCFCLSLGRKDTKFTSFDPGLNMAGQRIAPVEEAVPFKFLGRRIDFKGKTPSLEVVIEGFIEDIKKIEERPIGNVKKAWIYDNYLTSRLTWPFLVYDFNKSLLFKLDAEVIKTLKSWLGLARGADSSTLFRGQQNFGMSFKKPSELYKHLRITKHQILTNSRDNLIASLPKDPLASEMEPRLQFHKAFMTGAQTSKKGLGWEKNKSDKEVIKSHAYRVHATTLEVQNEWLTLGEICVPPALKWRTIMYDWSPALVKFYLNAFQMSLPDQSNLVRWGKGTDKTCTLCGLAVGTARHILVGCVTLLDRGCYSRRHDKVLEIIREAVSLSIGRARKGLSTNERHITFVKESHLRKSQNKPFSILRDAPDWKILMDTFEKHYKIPEDLAVSAYRPDILVYSRHLKTIIIVELTVPWETNIPKDHNIKSNKYYDLTNEMTKNGFKTQFYAVEVGARGLPAKTLHHLLKNLGLPRSAVTTFLDRMSKAALVGSYNIWLGRGDSEGREGEC

SEQ ID NO: 18669 - protein, 1058 aa, Tinea semifulvella
MDLKCPTCGKINRRQAWFKKHLKTHEGIEAQMVRPSTSTADRVSPHISHGTPPCEFNQESMTIRTRLSIPTIKETTWKVHDGNLAVMLDCPGTKQDLDSQVRAFQNTVYDYFSEHYPPTTTHAHTNKENTFKLKLRRKKRELRKRLRCAKNIGDKQQCHQVARALRSILKLIQGISLQIKDNSNQYNRARHEVLFDNNPFVYARKIFSEKSGVLSLTRDQIYKYYKETYTEIQKEEQYLDPPSPRPVRPLEDFRCLPPSMEEMEEEIKRKSSKSAPGPDGIPYIVYKKCPHTRKHLYRKIWSTNQVPKAFGEAVFVLIPKKTEVNDPKDARPIALTNTMSKIFFSIVQARMSRFMIKNEYFSRQHQKGFLPGVSGCLEHNTLLAECLKDARKQERQLSVCWIDLENAFGSVQHELLQTALKWYNFPTLIRDIIANYYKNLRFVVTNKDGYTDTLKYNVGLFQGCCLSPVAFNIIINILIDKLKSREKKWGYRFKQNNIYTESVLVFADDLAVITRNPKQCCKGLLKIVDDFCSWTKGMRTKPSKCFSLCLARRSTTFTSYDPGLSIAGQRIAPVNETMPFKFLGRRINFQGKTPSLEVVVKQFTDDMNRVTQQPISNVKKAWIYDNYLASRLTWPFLVYDFNKSLLSSLDADVIRTLKSWLGLAQGADSSTFFRGRRNFGMDLKRPSELYKHLRISKYQILTSSQDNTISSLPRDPLVSDMEPRLLFFKKFMTGAQTDKRGIGWKKKESDKEVIKSFLRKDEEHEYRVHAMTLEVQNDWLTLGDFCIPPALKWRTLMYDWSPALLKFYLNAFQMSLPDQSNLVRWGKATEKNCTLCGAAIGTARHTLVGCVTLLEKGYYSRRHDKVLGVIREAVSLSIARARKGLTTNKTLTTFVKEGQSTKTKCKPTSILGAASDWKILMDTFEHHYRIPDELAVSAYRPDILVFSRNLKKVILIELTVPWESNIPKDHNMKSNKYYDLTEEMIRNGFKTQLYAVEVGARGVPAKSLHHLLKELGLSRSAVNTFMERASKTALTESYSIWLGRERSRMVDGERIIAQ

SEQ ID NO: 18670 - protein, 1144 aa, Andrena haemorrhoa
MSCNMSSSNEDEASDTETHGPGISVADLSASREGTTDDTSNVQGQPNEQVVELPLGSPIRCEGCLREHRDCQFLSESDFAKHVHKQHSLTAILWMCKKCGKAYKKAHALACHIPKCKGPKVAQEKEFKCSECADSFSSQRGLSTHERFRHPALRNSKRKGAEGAVPVAARRGAKASVWSEEETLLLIELNQRFQGSSQMNVRMREFFPDKTLKQISDKRRQIKPPPEEVIIVDSGSDSENQASEEVVTSPRAGETSRTSVEDNDWREALKIAVVTEQTDAANWVSIQGRLREVAMSEALDCTAMDEIIKDIVEILVGSKVAEPGRTKKRGNQDKGGPNGARRKKDKTRKAKYRYAKYQETYSKCPGKLVNLAMAGKDLGSGEEGTTYPETVAVRELYTSLWGTTGPQWKEVTRAKDPDTEIAMGDLWSPITAEEIIRKMAKIKSNTAAGIDGVKKADLRGKGTVQILSQLFNTLLLKEFFPTHFKQNRTTLIPKPGKDSRNPGNWRPITIGSLLGRLFSSAIDSRVRKSVTISDRQKGFKNENGCRHNIAILGSTLATMKSDKGGVLTIVDVSKAFDTVPHAALGPTLAKKGIPRKAREYIGRMYEDCSTSIRTKEGGSMQITLKRGVKQGDPLSPLLFNIIMDPIIEAINETSLGVNLEGTNVAILAFADDIVLVGKDKKEASKQLALLSKYLGNLGMELSIPKCAAVEVVAKGKTWYLQDPGMKLGSEVIPTIKAEETADYLGVTLDPWIGFRVSKSKIEKVVCAANIIKRMGLKPHQKIDLIRTYLIPKIIYALVANPPPMATLKELDHELKQVVKSILKLHPSTTDGIIYVDRSHGGIGLQRIENIVKIAVIRSGIKMLSSTDDAVKSALQGQLSVLDKYAQSLGIKWPANMDQVEEARKQAKRQETDRWRQLISQGQGVTDFCHDKVGNAWLYNPQLLKASRFLDALKLRTNTFGTKVALRRAKKDVDVTCRRCRAQIETLGHVLGNCLHTKPMRIRRHDEIKNFVKDQVALRCTVFDEPTVNVVGELKKPDLVIKDQDRLIIVDVTVRYEDKDNLRKAFLDKTSKYKDTLEFIRIKTNSSHACIMPIVVGTRGAMPAKTQENLKALGMKKKDMVTISLMALRSSLEISNAFLDYDRIR

SEQ ID NO: 18671 - protein, 1140 aa, Andrena haemorrhoa
MSSSNEDEASDTETHGPGISVADLSASREGTTDETSNVQGQPNEQVVELPLGSPIRCEGCLREHRDCQFLSECDFAKHVHKQHSLMAILWMCKKCGKAYKKAHALACHIPKCKGPKVAQEKEFKCSECADSFSSQRGLSTHERFRHPALRNSKRKGAEGAVPVAARRGAKASVWSEEETLLLIELNQRFQGSSQMNVRMREFFPDKTLKQISDKRRQIKPPPEEVIIVDSGSESENQASEEVVTSPRAGETSRTSIEDNDWREALKIAVVTEQTDAANWVSIQGRLREVAMSEALDCTAMDEIIKDIVEILVGSKVAEPGRTKKRGNQDKGGPNGARRKKDKTRKAKYRYAKYQETYSKCPGKLVNLAMAGKDLGSGEEGTTYPETVAVRELYTSLWGTTGPQWKEVTRAKDPDTEIAMGDLWSPITAEEIIRKMAKIKSNTAAGIDGVKKADLRGKETVQILSQLFNTLLLKEFFPTHFKQNRTTLIPKPGKDSRNPGNWRPITIGSLLGRLFSSAIDSRVRKSVTISDRQKGFKNENGCRHNIAILGSTLATMKSDKGGVLTIVDVSKAFDTVPHAALGPTLAKKGIPRKAREYIGRMYEDCSTSIRTKEGGSMQITLKRGVKQGDPLSPLLFNIIMDPIIEAINETSLGVNLEGTNVAILAFADDIVLVGKDKKEASKQLALLSKYLGNLGMELSIPKCAAVEVVAKGKTWYLQDPGMKLGSEVIPTIKAEETADYLGVTLDPWIGFRVSKSKIEKVVGAANIIKRMGLKPHQKIDLIRTYLIPKIIYALVANPPPMATLKELDHELKQVVKSILKLHPSTTDGIIYVDKSHGGIGLQRIENIVKIAVIRSGIKMLSSTDDAVKSALQGQLSVLDKYAQSLGIKWPANMDQVEEARKQAKRQETDRWRQLISQGQGVTDFCHDKVGNAWLYNPQLLKASRFLDALKLRTNTFGTKVALRRAKKDVDVTCRRCRAQIETLGHVLGNCLHTKPMRIRRHDEIKNFVKDQVALRCTVFDEPTVNVVGELKKPDLVIKDQDRLIIVDVTVRYEDKDNLRKAFLDKTSKYKDTLEFIRIKTNSSHACIMPIVVGTRGAMPAKTQENLKALGMKKKDMVTISLMALRSSLEISNAFLDYDRIR

SEQ ID NO: 18672 - protein, 1055 aa, Andrena haemorrhoa
MAILWMCKKCGKAYKKAHALACHIPKCKGPKVAQEKEFKCSECADSFSSQRGLSTHERFRHPALRNSKRKGAEGAVPVAARRGAKASVWSEEETLLLIELNQRFQGSSQMNVRMREFFPDKTLKQISDKRRQIKPPPEEVIIVDSGSESENQASEEVVTSPRAGETSRTSIEDNDWREALKIAVVTEQTDAANWVSIQGRLREVAMSEALDCTAMDEIIKDIVEILVGSKVAEPGRTKKRGNQDKGGPNGARRKKDKTRKAKYRYAKYQETYSKCPGKLVNLAMAGKDLGSGEEGTTYPETVAVRELYTSLWGTTGPQWKEVTRAKDPDTEIAMGDLWSPITAEEIIRKMAKIKSNTAAGIDGVKKADLRGKGTVQILSQLFNTLLLKEFFPTHFKQNRTTLIPKPGKDSRNPGNWRPITIGSLLGRLFSSAIDSRVRKSVTISDRQKGFKNENGCRHNIAILGSTLATMKSDKGGVLTIVDVSKAFDTVPHAALGPTLAKKGIPRKAREYIGRMYEDCSTSIRTKEGGSMQITLKRGVKQGDPLSPLLFNIIMDPIIEAINETSLGVNLEGTNVAILAFADDIVLVGKDKKEASKQLALLSKYLGNLGMELSIPKCAAVEVVAKGKTWYLQDPGMKLGSEVIPTIKAEETADYLGVTLDPWIGFRVSKSKIEKVVGAANIIKRMGLKPHQKIDLIRTYLIPKIIYALVANPPPMATLKELDHELKQVVKSILKLHPSTTDGIIYVDKSHGGIGLQRIENIVKIAVIRSGIKMLSSTDDAVKSALQGQLSVLDKYAQSLGIKWPANMDQVEEARKQAKRQETDRWRQLISQGQGVTDFCHDKVGNAWLYNPQLLKASRFLDALKLRTNTFGTKVALRRAKKDVDVTCRRCRAQIETLGHVLGNCLHTKPMRIRRHDEIKNFVKDQVALRCTVFDEPTVNVVGELKKPDLVIKDQDRLIIVDVTVRYEDKDNLRKAFLDKTSKYKDTLEFIRIKTNSSHACIMPIVVGTRGAMPAKTQENLKALGMKKKDMVTISLMALRSSLEISNAFLDYDRIR

SEQ ID NO: 18673 - protein, 1140 aa, Andrena haemorrhoa
MSSSNEDEASDTETHGPGISVADLSASREGTTDETSNVQGQPNEQVVELPLGSPIRCEGCLREHRDCQFLSECDFAKHVHKQHSLMAILWMCKKCGKAYKKAHALACHIPKCKGPKVAQEMEFKCSECADSFSSQRGLSTHERFRHPALRNSKRKGAEGAVPVAARRGAKASVWSEEETLLLIELNQRFQGSSQMNVRMREFFPDKTLKQISDKRRQIKPPPEEVIIVDSGSESENQASEEVVTSPRAGETSRTSIEDNDWREALKIAVVTEQTDAANWVSIQGRLREVAMSEALDCTAMDEIIKDIVEILVGSKVAEPGRTKKRGNQDKGGPNGARRKKDKTRKAKYRYAKYQETYSKCPGKLVNLAMAGKDLGSGEEGTTYPETVAVRELYTSLWGTTGPQWKEVTRAKDPDTEIAMGDLWSPITAEEIIRKMAKIKSNTAAGIDGVKKADLRGKGTVQILSQLFNTLLLKEFFPTHFKQNRTTLIPKPGKDSRNPGNWRPITIGSLLGRLFSSAIDSRVRKSVTISDRQKGFKNENGCRHNIAILGSTLATMKSDKGGVLTIVDVSKAFDTVPHAALGPTLAKKGIPRKAREYIGRMYEDCSTSIRTKEGGSMQITLKRGVKQGDPLSPLLFNIIMDPIIEAINETSLGVNLEGTNVAILAFADDIVLVGKDKKEASKQLALLSKYLGNLGMELSIPKCAAVEVVAKGKTWYLQDPGMKLGSEVIPTIKAEETADYLGVTLDPWIGFRVSKSKIEKVVGAANIIKRMGLKPHQKIDLIRTYLIPKIIYALVANPPPMATLKELDHELKQVVKSILKLHPSTTDGIIYVDKSHGGIGLQRIENIVKIAVIRSGIKMLSSTDDAVKSALQGQLSVLDKYAQSLGIKWPANMDQVEEARKQAKRQETDRWRQLISQGQGVTDFCHDKVGNAWLYNPQLLKASRFLDALKLRTNTFGTKVALRRAKKDVDVTCRRCRAQIETLGHVLGNCLHTKPMRIRRHDEIKNFVKDQVALRCTVFDEPTVNVVGELKKPDLVIKDQDRLIIVDVTVRYEDKDNLRKAFLDKTSKYKDTLEFIRIKTNSSHACIMPIVVGTRGAMPAKTQENLKALGMKKKDMVTISLMALRSSLEISNAFLDYDRIR

SEQ ID NO: 18674 - protein, 1218 aa, Melanostoma mellinum
MEMNYERNTDQRPLPEVVGAHSGADAGGDSITQAVGGRPLDGAPVGIPELVTTTNRPDTNTQPNPAIRVLDVESMPTTNAGYPRQRIKWNTEMNKCIMRSYYISTNLEENMTAYRTDMRRLFLMEYPQFQRLTEQNIADRRRAIVQRKLLTYVECYEIKTSAIHQLRPNGTRQIYNEEAALANSTVQEANHENSESTYTNYLQPDSLPEERQLLIADENLIQALRRQFTAALVEYGDAELCMRTSIPKLFPEHKINEYARIVNSHILPEYVSSAIGLDQIGCLMYISAISIARTMGCNLKQQSRPGAANPNPAKHFPPWEKRLINKIERLRQDMGRLTAYKNGVRSRKVLKSLREIIRPTSIQFLTPQELTNIKDIKRQQLAVYAKRLARYRESRDRKNQNMNFSRNERGFYRLLNKEHSSTSTSPAMNDMTSYWTSIWGVPKPCEEDALWIHEEEADTEHITQMQHYEITAAHIMEAINDAHNWKGTGPDKIHNIWLKKLTIFHSPLAKCYTTLLENPEVTPPFMMTGSTYLLPKTLNASNPSTYRPITCLSVIYKLFTKIITNRVYKHCSDNNIMSIEQKGCIKDSQGCKEQLTIDSVIMRQAIEKKRNLSIAYIDYRKAFDSIPHNYLLLVLKLYKIDDRIVNYMAYAMTKWNIRLYMGSEVSQPIPIKNGIFQGDAFSPLWFCLGLNVLSKQLGKLESNLGFEIKSEQGNKYLNHLMYIDDIKLYAQNASKLHRMMKIVHDFSTNINMEFGLEKCKIAHLVRGKLSNTDEGCPLNEDEVIENLSDGESYKYLGFLQLKGFSSKMIKEKLTSTFNHRLERILRSKLNAGNKTKAINTWAIPIYNYSFGVIKWTETDIDAITRSIRTTLTKYQSHHPKSAVERIVLPREEGGRGITNLSELHHKQICNLRSYFQSQRSCPLIRAIVEADKNYTPLNLSSNDLGMPDNVKSKAELIEMWKAKELHGTHIKQLLNDSVDIPKSNLWLKKGKLFSETEGFMIAIQDRVIPTRNYIKHIMLENIVTDKCRRCNIAQETIEHIIGGCSMLSGTDYLNRHDKVGKLIYLKLAVRYGLINRLVPYYKYEPPPVLENQNIILYWDRSIRTDRTVQANRPDIVLLDTEKKTIEIIDISIPLTQNLATAYCNKINKYTELAHEMKELYHAQRVTITPIIISATAVIPKSLVRHLKELEMEDLLEEMQKAVILGTCNTVRRFLQQST

SEQ ID NO: 18675 - protein, 1040 aa, Harmonia axyridis
MRAHYIALDLVERSTRTYRQALLETWEEMCPNRPSYAQLLSNRVRWMLKGEKLSRAEMENIRVSCYPLETPQEQCSQAEGNNSRRSLLRVRHSGLFVRNEQTETIKQQFLQNLMKFSGINPESRPKIPRLQHSKQVLETVKCLNSVLSGHLENVDTLIGLVDIVYAGAATICEMHGERVGEHKARRLADPPPWKRRLEEKIVSLRKKIGKLHTYLKSPNPSSRIIKAARKTASEFKIKRKDPNYQEKISVLCDHLKQKIKALGSRIHRYNERVKRHKNNKMFFQNQKKFFRDLEENSTGKSSQLQLKSAEKFWNEVWSKKTTYDENIPWIQEATSKIPVVKMDEIYITGSDVADVLRGSNNWATPGCDNLHNYWWKHFTNVHEALSILLRRSLSDPNLIPNFFTQGQTYLIPKGGDPANPQNYRPITCLPTVYKILTAIITKHVNKHLRTHNLMAPEQGGGRIKTKGSKELLFIDYIITKQARKKLRNISVAWVDYHKAFDSVPHSWLLRVLEIHGIDKGIINLLDFLMCTWRTSLSVRVGDEIKKSNNIEINRGVFQGDTLSAVWFCMALNPLSMLLKNTKYGYIIDKPRQIRVNHSLYIDDLKLYGANSDQLRRLLEIVSQFSDSIGMSFGIEKCATLDVIRGKIQNERLATTLMNQTVIPSLGVGDSYKYLGVQQALDIQTSEMKKIYKQKLIKRITILLKSKLNARSLFTAINIWAMPTITYSFGILTWSTTELKEMDRAIRSLLTQSGVHHPHSSVIRLYLPRHQGGRGLLSLEDVHKENIKSLRKYFLERNSPFFRAIREADQHLSALRLSEPDVQCSDRSMEQLIEEWNAKALHGRYPGCLKKEEVNRVESLTYLRAGYLYPETEGRLLAIQDQVMPTRMYQKHIAKLDIPSDRCRKCLRAPETIQHITSSCPILAPREYLERHNSMARIYHQKIALNLGLLRDETPNHLYAPKTLMKNARYKLYWDSALVTDRNVMHNRPDITLFDNQRKTCMLLEFTIPADDNITRAYTEKITKYGDLAFQLKEMYDLKKN

SEQ ID NO: 18676 - protein, 1093 aa, Harmonia axyridis
MRAHYIALDLVERSTRTYRQALLETWEEMCPNRPSYAQLLSNRVRWMLKGEKLSRAEMENIRVSCYPLETPQEQCSQAEGNNSRRSLLRVRHSGLFVRNEQTEMIEQQFFQNLMKFSGINPESRPKIPRLQHSKQVLETVKCLNSVLSGHLENVDTLIGLVDIVYAGAATICEMHGERLGERKARRLAAPPPWKRRLEEKIVTLRKKIGKLHTYLKSPNPSSRIIKAARKTASEFKIKRKDPNYQEKISVLCDHLKQKIKALGSRIHRYNERVKRHKNNKMFFQNQKNFFRDLEENSTGKSSQLQLKSAEKFWNEVWSKKTTYDENIPWIQEATSKMPVVKMDEIYITGSDVADVLKGSNNWATPGCDNLHNYWWKHFTNVHEALSILLRRSLSDPNLIPNFFTQGQTYLIPKGGDPTNPQNYRPITCLPTLYKILTAIITKHVNKHLRTHNLMAPEQGGGRIKTKGSKELLVIDYIITKQARKKLRNISVAWVDYHKAFDSVPHSWLLRVLEIHGIDKGIINLLDFLMCTWRTSLSVRVGDEIKKSNNIEINRGVFQGDTLSAVWFCMALNPLSMLLKNTKYGYIIDKPRQIRVNHSLYIDDLKLYGANSDQLRRLLEIVSQFSDSIGMSFGIEKCATLDVIRGKIQNERLATTLMNQTFIPSLGVGDSYKYLGIQQALDIQTSEMKKIYKQRLIKRITILLKSKLNARSLFTAINIWAMPTITYSFGILTWSTTELKEMDRAIRSLLTQSGVHHPHSSVIRLYLPRHQGGRGLLSLEDVHKENIKSLRKYFLQRNSPFLRAIGEADQHLSALRLSEPDVQCSDRSMEQLIEEWNAKALHGRYPGCLKKEEVNRVESLTYLRAGYLYPETEGRLLAIQDQVMPTRMYQKHIAKLDIPSDRCRKCLRAPETIQHITSSCPILASREYLERHNSMARIYHQKIALNLGLLRDETPNHLYAPKTLMENARYKLYWDSALVTDRSVMHNRPDITLFDNQRKTCMLLEFTIPADDNITRAYTEKITKYGDLAFQLKEMYDLKKISILPLIISTNGMVEAHLPENTKRLCLQPDVVSTSQKQVILSTTRIVRKFLQGF

SEQ ID NO: 18677 - protein, 1093 aa, Harmonia axyridis
MRAHYIALDLVERSTRTYRQALLETWEEMCPNRPSYAQLLSNRVRWMLKGEKLSRAEMENIRVSCYPLETPQEQCSQAEGNNSRRSLLRVRHSGLFVRNEQTETIEQQFLQNLMKFSGINPESRPKIPRLQHSKQVLETVKCLNSVLSGHLENVDTLIGLVDIVYAGAATICEMHGERVGEHKARRLAAPPPWKRRLEEKIVSLRKKIGKLHTYLKSPNPSSKIIKAARKTASEFKIKRKDPNYQEKISVLCDHLKQKIKALGSRIHRYNERVKRHKNNKMFFQNQKKFFRDLEENSAGKSSQLQLKSAEKFWNEVWSKKTTYDENIPWIQEATSKIPVVKMDEIYITGSDVADVLRGSNNWATPGCDNLHNYWWKHFTNVHEALSILLRRSLSDPNLIPNFFTQGQTYLIPKGGDPANPQNYRPITCLPTVYKILTAIITKHVNKHLRTHNLMAPEQGGGRIKTKGSKELLVIDYIITKQARKKLRNISVAWVDYHKAFDSVPHSWLLRVLEIHGIDKGIINLLEFLMCSWRTSLSVRVGDEIKKSNNIEINRGVFQGDTLSAVWFCMALNPLSMLLKNTKYGYIVDRPRQIRVNHSLYIDDLKLYGANSDQLRRLLEIVSQFSDSIGMSFGIEKCATLDVIRGKIQNERLATTLMNQTVIPSLGVGDSYKYLGVQQALDIQTSEMKKMYKQRLIKRITILLKSKLNARSLFTAINIWAMPTITYSFGILTWSTTELKEMDRVIRSLLTQSGVHHPHSSVIRLYLPRHQGGRGLLSLEDVHKENIKSLRKYFLERNSPFFRAIREADQHLSALRLSEPDVQCSDRSMEQLIEEWNAKALHGRYPGCLEKEEVNRVESLTYLRAGYLYPETEGRLLAIQDQVMPTRMYQKHIAKLDIPSDRCRKCLRAPETIQHITSSCPILAPREYLERHNSMARIYHQKIALNLGLLRDETPNHLYAPKTLMENARYKLYWDSALVTDRNVMHNRPDITLFDNQRKTCMLLEFTIPADDNITRAYTEKITKYGDLAFQLKEMYDLKKISILPLIISTNGMVEAHLPENTKRLCLQPDVVSTSQKQVILGTTRIVRKFLQGF

SEQ ID NO: 18678 - protein, 1060 aa, Harmonia axyridis
MRAHFIAQDLAERSNRTYRQLLVETWEEMCPNRPSYAQLLSNRVRWITRGEKLSRAELNNIKASCYPLETAQDLCQAVVETSPRRSSLRIRRSGLFVRNDEQEKEIEQRFIGNLMKFSDITPENRPRIPRMQHSKELLKTMKSLNSVLIRHLDGVQTLNELIDVVYARAVTICETQGSQVGDCGKPSPNRPPPWKKRLEKKITELRKKIGIFHTYLNNPNPSTKTMKIVRKLASEFRVKRKENHFKDKITFLNDNLKQRIKALGNRIRRYNDRVKRHRNNRDFQNQKKFFRGLEQGNTNKNIHLEPKCAEEHWREIWSENTEHKNQMPWIQEAQSKIPSVQMDEIDITESDIAEVLKGSNNWAAPGCDKLHNYWWKHLTNVHKILATLLKKSIIDPSSLPLYFTQGLTYLIPKHGDPKDPKNYRPITCLPTVYKILTAVITKYINKHLRMNNLMAPEQGGGRIKTKGCKELLVVDYIVTKQARKKLRNISVAWIDYRKAFDSIPHSWLLKVLKMHGISEQIINLLQYLMKTWRTSLVIHTEEEIKKSGNIKINRGVFQGDTLSAIWFCMAVNPLSMLLRNTEYGYVIDKRKHVLINHSLYIDDLKLYGANFDQIRRLLEIVSLFSDSIGMSFGVEKCATLEVRRGKIQNTNLGTTLMNQTTIPSLNIDDSYKYLGIKQALDIKISEMKRLYEEKLLKRVTILLRSKLNSRSLFTAINIWAIPTIAYSFGILTWSTTDLREMDRALRSLLTKYGVHHPHSSTVRLYLPRHLGGRGLLNLEKIHQENITTMRNYFLKKNSPFFQAIREADQDISALKLSNPVLQQTVRTIEELGYLFPETEGRLLAIQDQVVATRMYQKNVAKLDIPSDRCRKCFQAPEKIQHLTSSCPILAPRDYLERHNSMAKIYHQQTALKLGLLQEELQSHLYAPKTLLQNARYKLYWDSTLVTDRNVMHNRPDMALFDTEEKTCMLVEFTVPADDNVSKAYTEKITKYGDLAFQLKELYNLKKVSVLPMIISVNGLVEAHLPENTERLFLKPAVMSASQKQVILYTTRIVRKFLQGF

SEQ ID NO: 18679 - protein, 1094 aa, Coccinella septempunctata
MRAHYIAQDLIEQTGKTYRQLLVEIWREMYPIRPSYAQLLSNRVRWMIKGEKLSRAELSNIKASCYPLEAVQNMSTDMVESSPRRSSLRVRRSGLYLRDDLQTNKMEEEFVGNWMKFSGLAVENRPKIPRIQHNKGLLKSVKLLNSVLPKHFTGTETLSELVDIVYAGAVTVSEAQGYQVSDNNSRWVSSPPPWKRRLESKIVKFRKKIGTFYTYLSTPHPSTKLMKNVKKLASEFRIKRRDPLFKDKIALLNDTLKQKIKALGNRIRRYNEKEKRIKNNRMFHQNQKKFFRDLEQKDVSQDVNLEPMVAEEYWSGIWSKSVEHNEHTSWMGEAETRIPQVQMDEVDITVSDIEEALKGTNNWATPGCDKLHNYWWKHFTNIHEVLSLILKKSLTDPLSLPPYLTQGLTYLIPKAGDLRNPNNYRPITCLPAVYKILTSVITKHIHQHLRTNNLMAPEQGGGRIRTKGSKELLIVDYIVTKQARKKLRNISVAWIDYRKAFDSVPHTWLLKVLKMHGVHEKLIHLLRFLMQTWRTSLLIRTGDGMKQSRSIKIRRGVFQGDTLSAIWFCMAINPLSALLRNTEYGYVIDKQRSIRINHSLYIDDLKLYGANFEQIKRLLEIVSLFSESIGMSFGVDKCATLEVRRGKIQNTSLGTTLMNQTTIPSLNVDDSYKYLGIKQALDIKTSEMKELYREKILRRVNILLRSKLNSRSLFTAINIWAIPTVAYSFGIITWSTTDLQEMDRALRRMLTKHGVHHPHSSTIRLYLPRHQGGRGLLSLEKIHQENITTLRNYFLRKNSPFFQAIREADRDISALRLSGSYSQPADRTVEELIEEWSSKALHGRYPGCLKKENINKKESLTYLTAGYLFPETEGRLLAIQDQVVPTRMYQKSIAKLDVPSDRCRKCSQAPETLQHVTSSCPILAPRDYLERHNSMARIYHQQVALKLGLLQEELPSYIYVPKPLLQNARYRLYYDSTLVTDRAVMHNRPDIALFDTEQKTCMLIEFTIPADDNIAKAYTEKITKYGDLAFQLRELYNLRTISILPMIISVNGLVETHLLENTKRLRLEPDVISASQKQVILYTTRIVRKFLQGF

SEQ ID NO: 18680 - protein, 1094 aa, Harmonia axyridis
MRAHYIAQDLTERTGKTYRQLLVEIWEEMYPSRPSYAQLLSNRVRWMMKGGKLSRAELSNIKGSCYPLEVVENMNTDGVESSPRRSSLRVRRSGLYLGGDVQTNEIEEAFVGTLMKFSGLTLENRPKIPRMQHNKRLLNSVKLLNSVLPRHLTGIETLSDLVDIVYAGAVTVSEAQGYQVGDDNSRCFNSSPPWKRRLENKIVQFRKKIGTFHTYLATPHPSTKVMKSVKKLASEFRIKRRDPLFKDKITLLNDTLKQKIKALGNRIRRYNEKEKRNKNNRMFHQNQKRFFRDLEQKGVSQDVNLEPGVAEEYWSGVWSGSVEHNEQMSWIKEADSGIPQVQMDEVEITVSDIEEVLKGTNNWATAGCDKLHNYWWKHFTNIHGVLSSILKKSLTDPLSLPPYLTQGLTYLIPKAGDLQNPNNYRPITCLPTVYKILTAVITKHINKHLRTNNLMAPEQGGGRIRTKSSKELLIVDYIVTKQARKKLRNISVAWIDYRKAFDSVPHSWLLKVLKMHGVHEQVISLLRFLMQTWRTSLLMRAGDEMKKSRSIKINRGVFQGDTLSAIWFCMAINPLSALLRNTEYGYVIDKQRNIRINHSLYIDDLKLYGANFEQIRRLLEIVSLFSDSIGMSFGVDKCATLEVRRGKIRNTSLVTTLMNQITIPSLDVDDSYKYLGIKQALDIKTSEMKELYRKKVLGRVNMLLRSKLNSRSLFTAINIWAIPTVAYSFGIITWSTTDLQEMDRAIRCMLTKHGVHHPHSSTIRLYLPRHQGGRGLLSLEKIHQENITTLRNYFLKKNSPFFRAIQKADQDISALRLSGSYPQSVDRTIEDLIEEWCSKALHGRYPACLKKENINKKESLTYLTAGYLFPETEGRLMAIQDQVIPIRMYQKNIAKLDVPSDRCRKCSQAPETLQHVTSSCPILAPRDYLERHNSMAKIYHQQIALKLGLIRENLPTHIYVPKPLLQNARYKLYWDCTLVTDRAVMHNRPDIALFDTEQKTCILIEFTIPADDNITKAYTEKIIKYGDLAFQLRELHNLRTISIFPMIISVNGLVETHLLENTKRLCLEPDVISASQKQVILSTTRIVRKFLQGF

SEQ ID NO: 18681 - protein, 1093 aa, Harmonia axyridis
MRAHYIAQDLTERTGKTYRQLLVEIWEEMYPSRPSYAQLLSNRVRWMMKGGKLSRAELSNIKGSCYPLEVVQNMNTDGVESSPRRSSLRVRRSGLYLGGDVQTNEIEEAFVGTLMKFSGLKLENRPKIPRMQHNKRLLNSVKLLNSVLPRLTGIETLSDLVDIVYAGAVTVSEAQGYQVGDDNSRCFNSSPPWKRRLENKIVQFRKKIGTFHTYLATPHPSTKVMKSVKKLASEFRIKRRDPLFKDKITLLNDTLKQKIKALGNRIRRYNEKEKRNKNNRMFHQNQKRFFRDLEQKGVSQDVNLEPGVAEEYWSGVWSESVEHNEQMSWIKEAESGIPQVQMDEVEITVSDIEEVLKGTNNWATPGCDKLHNYWWKHFTNIHGVLSSILKKSLTDPLSLPPYLTQGLTYLIPKAGDLQNPNNYRPITCLPAVYKILTAVITKHINKHLRTNNLMAPEQGGGRIRTKSSKELLIVDYIVTKQARKKLRNISVAWIDYRKAFDSVPHSWLLKVLKMHGVHEQVISLLRFLMQTWRTSLLMRAGDEMKKSRSIKINRGVFQGDTLSAIWFCMAINPLSALLRNTEYGYVIDKQRNIRINHSLYIDDLKLYGANFEQIRRLLEIVSLFSDSIGMSFGVDKCATLEVRRGKIRNTSLVTTLMNQITIPSLDVDDSYKYLGIKQALDIKTSEMKELYRKKVLGRVNMLLRSKLNSRSLFTAINIWAIPTVAYSFGIITWSTTDLQEMDRAIRCMLTKHGVHHPHSSTIRLYLPRHQGGRGLLSLEKIHQENITTLRNYFLKKNSPFFRAIQKADQDISALRLSGSYPQSVDRTIEDLIEEWCSKALHGRYPACLKEENINKKESLTYLTAGYLFPETEGRLMAIQDQVIPIRMYQKNIAKLDIPSDRCRKCSQAPETLQHVTSSCPILAPRDYLERHNSMAKIYHQQIALKLGLIRENLPTHIYVPKPLLQNARYKLYWDCTLVTDRAVMHNRPDIALFDTEQKTCILIEFTIPADDNITKAYTEKITKYGDLAFQLRELHNLRTISIFPMIISVNGLVETHLLENTKRLCLEPDVISASQKQVILSTIRIVRKFLQGF

SEQ ID NO: 18682 - protein, 813 aa, Adalia bipunctata
MFHQNQKKFFRGLEQENINQEVNLEPKIAEEYWSNIWSKNAEHNQQMSWLEEAKSRMPQAQMDEINITESDIEEAIRGTNNWATPGCDKLHNYWWKYFTNVHKMLSLIFRKSLTEPHSLPPYLTQGLTYLIPKTGNPEDPNNYRPITCLPTVYKILTAVITKHINKHLRTNNIMAPEQGGGRIRTKGSKELLIVDFIVTKQARKKFRNISVAWIDYRKAFDSVPHSWLLKVLKMHGIHEKIINLLKVLMQTWRTSLLIHSGDEMKNSKNIKIRRGVFQGDTLSAIWFCMAINPLSMLLRNTEYGYVIDKQRNIRVNHSLYIDDLKLYGANYDQIRRLLEIVSLFSDSIGMSFGVDKCATLEVRRGKIQNNSLAITLMNQTTIPSLQVDDSYKYLGIKQALDIKTSEMKKLYREKLLKRVAILLKSKLNSRSLFTAVNIWAIPTIAYSFGIITWSKTDLQEMDRALRGILTKHGVHHPHSSTMRLYLPRHQGGRGLLNLERIHQENITSLRNYFLEKNSPFFRAIREADQDISVLQLSRSDPPRNARTMEELIEEWSSKALHGRYPSCLKKGNINKKESLTYLTAGYLFPETEGRLLAIQDQVMPTRTYQKHIAKLDIPSDRCRKCSQAPETIQHMTSSCSILAPRDYLERHNSMAKIYHQQVALKLGLLREELPNHIYVPKTLIQNARYKLYWDFPLITDRGVMHNRPDIALFDNELKTCMLIEFTIPADDNITNAYTTKITKYGDLAFQLRELYKLKTISVLPMIISVNGLVESHLPDNTRRLCLDLDVISDSQKQVILSTTRIVRKFLQGF

SEQ ID NO: 18683 - protein, 1066 aa, Adalia bipunctata
MYPIRPSYAQLLSNRVRWMIKGEKLSRAELSNIKASCYPLEAVQNMSTDMVESSPRRSSLRVRRSGLYLRDDLQTNKIEEEFVGNLMKFSGLAVENRPKIPRIQHNKGLLKSVKLLNSVLPKHLTGIETLSELVDIVYAGAVTVSEAQGYQVGENNSRWVNSPPPWKRRLESKIVKFRKKIGTFYTYLSTPHPSTKLMKNVKKLASEFRIKRKDPLFKDKIALLNDTLKQKIKALGNRIRRYNEKEKRNKHNRMFHQNQKKFFRDLEQKDVSQDVNLEPRVAEEYWSGIWSKSVEHNEQMSWMGEAETRIPQVQMDEVDITVSDIEEALKGTNNWATPGCDKLHNYWWKHFTNIHEVLSSILKKSLTDPLSLPTYLTQGLTYLIPKAGDLQNPNNYRPITCLPAVYKILTSMITKHIHQHLRTNNLMAPEQGGGRIRTKGSKELLIVDYIVTKQARKKLRNISVAWIDYRKAFDSVPHTWLLKVLKMHGVHEKLINLLRFLMQTWRTSLLIRTGEGMKQSRSIKIRRGVFQGDTLSAIWFCMAINPLSALLRNTEYGYVIDKQRSIRINHSLYIDDLKLYGANFEQIKRLLEIVSLFSDSIGMNFGVDKCATLEVRRGKIQNRSLGTTLMNQTTIPSLNVDDSYKYLGIKQALDIKTSEMKELYREKILRRVNMLLRSKLNSRSLFTAINIWAIPTVAYSFGIITWSTTDLQEMDRALRRMLTKHGVHHPHSSTIRLYLPRHQGGRGLLSLEKIHQENITTLRNYFLRKNSPFFQAIREADRDISALRLSESYSQPAGRTIEELIEEWGSKALHGRYPGCLKKENINKKESLTYLTAGYLFPETEGRLLAIQDQVVPTRMYQKSIAKLDVPSDRCRKCSQAPETLQHVTSSCPILAPRDYLERHNSMAKIYHQQVALKLDLLQEELPSYIYVPKPLLQNARYKLYWDSTLVTDRAVMHNRPDIALFDTEQKTCMLIEFTIPADDNIAKAYTEKITKYGDLAFQLRELYNLRTISILPMIISVSGLVEIHLLENTKRLCLEPDVISASQKQVILYTTRVVRKFLQGF

SEQ ID NO: 18684 - protein, 1093 aa, Coccinella septempunctata
MRAHYIALDLTERSARTYRQILLETWEEMCPSRPSYAQLLSNRVRWMLRGEKLSRAELESIKTSCYPLEIPEEQNSIAEETNRRRSSLRMRQSGLYVRSEQAETIEQQFLENLMKFSGMNPESRPKIPRLQHSKLILETMKSLNSVIPRHLGEVDTLTELVDVVYAGAVTICEFHGKKINENAAQRLNNPPPWKRRLEQKIVLIRRKIGKLHTYLHSPNPSNKVIKAARKTASEYRIKRRDPEFKEKIWVLCDNLKQKIRALGSRIRRYNERVTRHKNNKLFFQNQKKFFRDLEQGSTEGGDRLELGAAEEYWGEVWSKKTTYDRNMPWIQEAESRIPTTQMEEINIEGSDIADVLKGSNNWATPGCDNLHNYWWKHFTSVHEILSILLKRSLSDPTLLPSYFTQGQTYLILKGGDPKNPENYRPITCLPAVYKILTAIVTKHLNKHLRTHNLMAPEQGGGRIRTKGSKELLVVDYIITKQARKKLRNISVAWVDYRKAFDSVPHSWLLKVLRMHGIDEKVINLLEFLMRTWRTSLFVHNGDEMRGSKNIEINRGVFQGDTLSAVWFCMALNPLSMLLRNTIYGYVIDKPRQVRVNHSLYIDDLKLYGANSDQLKRLLEIVSQFSDSIGMSFGVEKCATLEVIRGKVQAPNFETTLMNQTVIPSLGVGDSYKYLGIKQALDIQTSEMKDFFRQRLLKRVTILLKSKLNARSLFTAINIWAIPTITYSFGVLTWSTTELKEMDRALRSLLVKFGVHHPHSSVIRLYLPRQQGGRGLLNLEDVHRANITSLRNYFLKKNSPFFQAIREADRNLSPLRLSEPDVQCTDQSMQQLIEEWGAMALHGRYPGCLKGEHVNKMESLTYLRAGYLYPETEGRLLAIQDQVMPTRMYQRHIAKLDIPSDRCRKCSQAPETIQHVTSSCPILAPREYLERHNNMAKIYHQKIALNLGLLQDVTPNHLYVPRTLIESARYKLYWDSALVTDRSVMHNRPDIALFDNDRRTCMLIEFTIPADDNITRAYTEKITKYGDLAFQLKEMYDLSKISILPLIMSTNGIVEAHLPENTRRLCLELDVISTSQKQVILSTTRIVRRFLQGF

SEQ ID NO: 18685 - protein, 1094 aa, Adalia bipunctata
MRAHYIAQDLAERSDKTYRQLLVEIWEEMYPSRPSYAQLLSNRVRWMMKGEKLSRAELSNIKASCYPLEAIPNIDTDIQGTSPRRSTLRVRRSGLYLRDDVQANKIDKEFVGNLMKFSGLTAENRPNIPRMQHNKELLETVKLLNSVLPKHLTGTETLSELVDMVYAGAVTVSEAQGYQVGANNFRRLTSSPPWKTRLENKIIQFRKKIGIFHTYLNTPKPSTKVLKIVRKLASEFRIKRRDPLFKDRISLLNDTLKQKIKALGNRIRRYNEKEKRHRNNRMFHQNQKKFFRGLEQENINQEVNLEPRIAEEYWSNIWSENAEHNQQMSWLEEAKSRMPQAQMDEINITESDIEEAIRGTNNWATPGCDKLHNYWWKYFTNVHKMLSLIFRKSLTEPHSLPPYLTQGLTYLIPKTGNPEDPNNYRPITCLPTVYKILTAVITKHINKHLRTNNIMAPEQGGGRIRTKGSKELLIVDFIVTKQARKKFRNISVAWIDYRKAFDSVPHSWLLKVLKMHGIHEKIINLLKVLMQTWRTSLLIHSGDEMKNSKNIKIRRGVFQGDTLSAIWFCMAINPLSMLLRNTEYGYVIDKQRNIRVNHSLYIDDLKLYGANSDQIRGLLEIVSLFSDSIGMSFGVDKCATLEVRRGKIQNNSLATTLMNQTTIPSLQVDDSYKYLGIKQALDIKTSEMKKLYREKLLKRVAILLKSKLNSRSLFTAVNIWAIPTIAYSFGIITWSKTDLQEMDRALRGILTKHGVHHPHSSTMRLYLPRHQGGRGLLNLERIHQENITSLRNYFLEKNSPFFRAIREADQDISVLQLSRSDPPRNARTMEELIEEWSSKALHGRYPSCLKKGNINKKESLTYLTAGYLFPETEGRLLAIQDQVMPTRTYQKHIAKLDIPSDRCRKCSQAPETIQHMTSSCSILAPRDYLERHNSMAKIYHQQVALKLGLLREELPNHIYVPKTLIQNARYKLYWDFPLITDRGVMHNRPDIALFDNELKTCMLIEFTIPADDNITNAYTTKITKYGDLAFQLRELYKLKTISVLPMIISVNGLVESHLPDNTRRLCLDLDVISDSQKQVILSTTRIVRKFLQGF

SEQ ID NO: 18686 - protein, 1093 aa, Coccinella septempunctata
MRAHYIALDLTERSARTYRQILLETWEEMCPSRPSYAQLLSNRVRWMLRGEKLSRAELGNIKTSCYPLEIPEEQNSIAEETNRRRSSLRMRQSGLYVRSEQAETIEQQFLENLMKFSGMNPESRPKIPRLQHSKLILETMKSLNSVIPGHLGEVDTLTELVDVVYAGAVTICEFHGKKINENAAQRLNGPPPWKRRLEQKIVLIRRKIGKLHTYLHSPNPSNKVIKATRKTASEYRIKRRDPEFKEKILVLCDNLKQKIRALGSRIRRYNERVTRHKNNKLFFQNQKKFFRDLEQGSTEGGDRLELGAAEEYWGEVWSKKTTYDRNMPWIQEAESRIPTTQMEEINIEGSDIADVLKGSNNWATPGCDNLHNYWWKHFTSVHEILSILLKRSLSDPNLLPSYFTQGQTYLILKGGDPKNPENYRPITCLPAVYKILTAIVTKHLNKHLRTHNLMAPEQGGGRIRTKGSKELLVVDYIITKQARKKLRNISVAWVDYRKAFDSVPHSWLLKVLRMHGIDEKVINLLEFLMRTWRTSLFVHNGDEMRGSKNIEINRGVFQGDTLSAVWFCMALNPLSMLLRNTIYGYVIDKPRQVRVNHSLYIDDLKLYGANFDQLKRLLEIVSQFSDSIGMSFGVEKCATLEVIRGKVQASNFETTLMNQTVIPYLGVGDSYKYLGIKQALDIQTSEMKDFFRQRLLKRVTILLKSKLNARSLFTAINIWAIPTITYSFGVLTWSTTELKEMDRALRSLLVKFGVHHPHSSVIRLYLPRQQGGRGLLNLEDVHRANITSLRNYFLKKNSPFFQAIREADRNLSPLRLSEPDVQYTDQSMQQLIEQWGAMALHGRYPGCLRGEHVNKMESLTYLRAGYLYPETEGRLLAIQDQVMPTRMYQRHIAKLDIPSDRCRKCSQAPETIQHVTSSCPILAPREYLERHNNMAKIYHQKIALNLGLLQDVTPNHLYVPRTLIESARYKLYWDSALVTDRSVMHNRPDIALFDNDRRTCVLIEFTIPADDNITRAYTEKITKYGDLAFQLKEMYDLSKISILPLIMSTNGIVEAHLPENTRRLCLELDVISTSQKQVILSTTRIVRRFLQSF

SEQ ID NO: 18687 - protein, 1093 aa, Coccinella septempunctata
MRAHYIALDLTERSARTYRQILLETWEEMCPSRPSYAQLLSNRVRWMLRGEKLSRAELESIKTSCYPLEIPEEQNSIAEETNRRRSSLRMRQSGLYVRSEQAETIEQQFLENLMKFSGMNPESRPKIPRLQHSKLILETMKSLNSVIPRHLGEVDTLTELVDVVYAGAVTICEFHGKKINENAAQRLNNPPPWKRRLEQKIVLIRRKIGKLHTYLHSPNPSNKVIKAARKTASEYRIKRRDPEFKEKILVLCDNLKQKIRALGSRIRRYNERVTRHKNNKLFFQNQKKFFRDLEQGSTEGGDRLELGAAEEYWGEVWSKKTTYDRNMPWIQEAESRIPTTQMEEINIEGSDIADVLKGSNNWATPGCDNLHNYWWKHFTSVHEILSILLKRSLSDPTLLPSYFTQGQTYLILKGGDPKNPENYRPITCLPAVYKILTAIVTKHLNKHLRTHNLMAPEQGGGRIRTKGSKELLVVDYIITKQARKKLRNISVAWVDYRKAFDSVPHSWLLKVLRMHGIDEKVINLLEFLMRTWRTSLFVHNGDEMRGSKNIEINRGVFQGDTLSAVWFCMALNPLSMLLRNTIYGYVIDKPRQVRVNHSLYIDDLKLYGANSDQLKRLLEIVSQFSDSIGMSFGVEKCATLEVIRGKVQAPNFETTLMNQTVIPSLGVGDSYKYLGIKQALDIQTSEMKDFFRQRLLKRVTILLKSKLNARSLFTAINIWAIPTITYSFGVLTWSTTELKEMDRALRSLLVKFGVHHPHSSVIRLYLPRQQGGRGLLNLEDVHRANITSLRNYFLKKNSPFFQAIREADRNLSPLRLSEPDVQCTDQSMQQLIEEWGAMALHGRYPGCLKGEHVNKMESLTYLRAGYLYPETEGRLLAIQDQVMPTRMYQRHIAKLDIPSDRCRKCSQAPETIQHVTSSCPILAPREYLERHNNMAKIYHQKIALNLGLLQDVTPNHLYVPRTLIESARYKLYWDSALVTDRSVMHNRPDIALFDNDRRTCMLMEFTIPADDNITRAYTEKITKYGDLAFQLKEMYDLSKISILPLIMSTNGIVEAHLPENTRRLCLELDVISTSQKQVILSTTRIVRRFLRGF

SEQ ID NO: 18688 - protein, 780 aa, Anoplius nigerrimus
MWKKDRSRCITTILQGTFDHDLPPKDVMINYWREIMTSRPPPKGTFKQEKTPNSTIESLWMPITHDEIRRNRIPRKTAAGPDGISSRLLRSVPLDVLARILNLILWIGRLPEHLRQSRTIFLPKKQGSESPSDFRPITIPSVIVRCLHKILADRFRRSIEIDPRQRAFRNTDGCRDNIILLDAILRSHQKQCRQLPLASIDVSKAFDSVSHEAIINTLSYMGVPQQLVDYIAQVYNTGATRLEGQNWTSDNLTPTKGVKQGDPLSPLIFNMIIHQLLQKLPTDIGITMGGTKINSSAFADDLILFASTTNGLQKLIDISSEFLGECGLRINIEKSLTVSLRPSGKLKKNLVDSSCTFICDGRKIPSLKRTDEWKYLGVKFSPEGRRKTEPAKLVNSDIEKLTRAPLKPQQRLYAMKYFIIPKTYYQLALGDVTIGALNKVDHLIRNAVRKWLVLPHDTPNAYIHAAVCDGGLGVPSLRWTAPQLRRTRLSTLKAAQTSQDATNTFLEDEIAKTERRLTDHGSNLRTANDIKRRWATLLCNSVDGSALRDSAKVSNQHQWIDDGTRLLSGRDFIGCGKVRIGALPTRSRTTRGRREDRTCRAGCMAAETVNHVLQTCHRTHSSRINRHNAVVSYITRNLRRQGYEVRMEPRLTTSQGIRKPDIVATLGPTALVIDAQVVSEQTDLERAHRKKRHYYEDNTEVSTQIKAQTGAQNTKFTTATLSWRGIWCPSSATELMEHGVIRRSELKLISTRVLIGALAMWRIFNKDTSFRRTRINTGIG

SEQ ID NO: 18689 - protein, 1243 aa, Cyprideis torosa
MRADETLDSPTAVVPHGSEDHHVHPVQQVDVAHAPHLPGPHTHGNMMMPQLRKIHTGSAVAQDKKGRAGCRSPGAVSEKLASGGSHVPVPHQAEVGVRATGERPSSVPGAGVDSRPSSATENMPPARKRMKWTKSMNIDVMRVYYQARSDAPGAYRKKMLELWNQSYSELNINEQRLANQRLYIERNNMLSELERENIKQEVLNTLQPDKPECSIPENEEAKPEETPLQVPPRALEAPSELEAPSEELRIAFLDHLEDLRYLQMSDRPRLRPLKLNLAISKDIEEINRIISSCDLADCDLTELNHRAFAAAITIHQKYQGPEKPTPKPGKGPSSIPPWKRRLQSRIDAARRDLSTLQEIKKGNTSRKVKLTYKRLCPKYKITSDADLPTAIENVKMKIQAWALRIRRYTKKVNYFRHNERFTNNQKLFYRELGTKPIEVKKIPGKAEVEEFWSNIMERPASHNVDATWLRRQRELTDTPEMSDLQITKSDLQKALKQTANWKSPGHDRLPNFWLKQLTSLHEQLAREMQKVVTDPSEMPDWLTAGVTYLLPKNAETQLPKNYRPITCLPTVYKVLSSILAARIERHIYDNNIMSEEQKGCRKGSYGCKEQLLLNRMVMDDARTRKKNLSMAWIDYQKAYDSVPHSWIIECLRMYNINPVVVNFLERTMPRWKTVMSLKGQDSTLTTREISIKRGIFQGDTLSPLLFCLALNPLSTELARTDCGYYVGKGKNADHRMNHLLYMDDLKLYASNEKQLESLLNVVSIFSKDICMKFGLDKCAKLSIHRGVLTPMGDITTTNDEQLRELTAPDTYKYLGVEENSSVAVKRTKQRLTTEYKRRVRLVLKTELSGKNKISALNSLATPVLNYSFGVIDWSPTELQAIDRATRKLLTMHHTHHPKAAVERLYLPRCKGGRGLIELESLYKRTTCEVARFIERKQGRLISILRERDALKKSHSIQGDATRFRNALHLDDDCDTTDVKTADQGQREARWKEKPLHGQHPKIMDKPSIDSDVSYNWLKKGLLNAETESNILAIQDQCIRTRNYEKHILKLDVEDRCRCCHGPPETVHHLLSACPELAPREYLYRHDQVCKYVHWCVSKQAGLEVPDKWYEHQPESVVENASTKILWDMPIITDRSIGCNRPDLTIYKKEKKTALLVDVSIPADNNLQEKTREKLEKYSELKVEVEQLCGMKTTIVPIIIGTTGVVLKDFKGHVKKLECEISLDILQRTAILGTASILRRVLQN

SEQ ID NO: 18690 - protein, 1116 aa, Notodromas monacha
MPPARKRMKWTKSMNIDVMRVYYQARSDAPGAYRKKMLELWNQSYSELNINEQRLANQRLYIERNNMLSELERENIKQDVLNTLQPDKPECSVPENEEATPEVPPRALEAPSELEAPSEELRIAFLDHLEDLRYLQMSDRPRLRPLKLNLAISKDIEEINQIISSCDLADCDLTELNHRAFAAAITIHQKYQGPEKPTPKPGKGPSSIPPWKRRLQSRIDAARRDLSTLQEIKKGNTSRKVKLTYKRLCPKYKITSDADLPTAIENVKMKIQAWALRIRRYTKKVNYFRHNERFMNNQKLFYRELGAKPIEVKKIPGKAEVEEFWSNIMERPASHNVDATWLRRQRELTDTPEMSDLQITKSDLQKALKRTANWKSPGHDRLPNFWLKQLTSLHEQLAREMQKVVTDPSEMPDWLTAGVTYLLPKNAETQQPKNYRPITCLPTVYKVLSSILAARIERHIYDNNIMSEEQKGCRKGSYGCKEQLLLNRMVMDDARTRKKNLSMAWIDYQKAYDSVPHSWIIECLRMYNINPVVVDFLEQTMPHWKTVMSLKGQDSTLTTREISIKRGIFQGDTLSPLLFCLALNPLSTELARTDCGYYVGKGKNADHRMNHLLYMDDLKLYASNEKQLESLLNVVSIFSKDICMKFGLDKCAKLSIHRGVLTPMGDITTTNDEQLRELTAPDTYKYLGVEENSSVAVKRTKQRLTTEYKRRVRLVLKTELSGKNKISALNSLATPVLNYSFGVIDWSPTELQAIDRATRKLLTMHHTHHPKAAVERLYLPRCKGGRGLIELESLYKRTTCEVARFIERKQGRLISILRERDALKKSHSIQGDATRFRNALHLDDDCDTTDVKTADQGQREARWKEKPLHGQHPKIMDKPSIDSDVSYNWLKKGLLNAETESNILAIQDQCIRTRNYEKHILKLDVEDRCRCCHGPPETVHHLLSACPELAPREYLYRHDQVCKYVHWCVSKQAGLEVPEKWYEHQPESVVENASTKILWDMPIITDRSIGCNRPDLTIYKKEKKTALLVDVSIPADNNLQEKTREKLEKYSELKVEVEQLCGMKTTIVPIIIGTTGVVLKDLKGHVKKLECEISLDILQRTAILGTASILRRVLQN

SEQ ID NO: 18691 - protein, 1291 aa, Thymallus thymallus
MSTTTDRINQVMDSNPLPVQGDQPGLSKLAPTAGVSGRRLVKQAGSSTALYSGGSGRKNYGKSDSPRRMSKTRKRKDSEEERKTTSQILEENVNVNEPRPSQLRKRRRRKDSQTVNRDSPRGEETRGDLGITEPQRERELMTTPRTSDIGGEEVVLLPQLAQSAPPPATIPLLAKPQSADTMFIRIPVQELSCGLCGEVLERVGRVVRHFKIKHSLVKVLYQCGACGRSSPNSHVISCHVPKCKGREETRSADTAAFACEYCPKRCNTGVGLSQHKRQVHLALYCQEKSEEERAIKEKRKGVRGNKKGWTEWEKQEMVRLYERFKGNKDIHSKVAAGLPEKNREQVRDRRRRLNKVTTKYEGPEEAPTAEVQFRWLSNPGDVTSPTQGIRDKLRAAVRGCGAMNKDLKIGAITLSLGSVDQDGALIESSALELQKMLGKVVGLEGGRGGKECRPLSGNKSGQAKRAIYRQQQRLFDGDQSKLAGLILDGEVKGACAIPLKDITKALADRWQATEPFNGLGQFRSEGGADNEEFQYLISAAEVGENLRGMKKGTAAGPDGVTREALLRWDPKGDKLARLCSMWLVSGALPSAFKECRTTLVAKTSDPEERMKTGGWRPITIGSVVARLFSRIMNSRLASACPINPRQRGFISAPGCSENLMLLQGLIKQSRRQQTPLAVVFVDFAKAFDSVSHEHLQVALGQRGLDQHIIELIRSTYENSSTRIIIDGVKSPKINMLVGVKQGDPMSPLLFNLGLDPLIQTLERYGSGVGSVGSQTTTLAFADDLVLLSDSEKGMGRNMEIVERFCKQTGLRVQPRKCHSFFIEKGRKERGGSAFKVNECAAWKLNGEEVHMIGPEESEKYLGMEVNPWVGIVKPKMVGLLRDWIGKIGRASLKPSQKVKMLNAFAVPRLSYKADHGNLKTADLTILDRMIRTAVKEWLHLPPSTCDGLLYVKHRDGGLGIVKLACQIPSIQARRIHRLWHSADECTRRITRSTVEEAEFEGMWLRAGGVKESVPSLRDSPTGVVTPRCPIPCDWRKEEMRKWISLTSQGVGTQAFGNDKTSNGWLANPSSVGFRQGQYIDALKLRANVYPTREMMARGRPEMDSSCRRCPAPYESSSHILGQCPWIQGARINRHNKVCDLLVTEAESNGWNVFKEMHIFSPQGKLRKPDVIFVRDVSALVVDVTVRYEMAFDTLEVARAEKIAHYLPCAPAILSKLPGVKEVKFFGFPVGARGKWPTRNDQLLRALGVSRSRRAAFGKLVSRRVLLYSIDLIREFFRADRLVEEALSGEEG

SEQ ID NO: 18692 - protein, 1279 aa, Hucho hucho
MSSMHFSSQSDQTGLPKMAPTVGVSGHRQVERAGSSTVLYSGDAGGKNYGRANTQAWPSQTHKRRRDEGQWGKTQPTLCDVSNLNETRLSHPRKRRCLSNSQTTCRDSPRRPDAGGGPGIVSPQWLSESKTSSRPVDNEGVVVLPPQPARSKTPTAADPRPATTPTVNTMLITIPVHELSCGLCGEILKRVGGVVRHFKTRHSLVKVLYKCGSCGRSDPNSHAISCHVPKCNEVAGTRVAAATASTCEHCRKGFGSKVGLSQHKRHVHLALYCQQRSEEARSVKVKRTGKENNNKGWTEWEEQEMNRRYNLFEGHKAIHSMVARGLPGRTREQVRYKRGRLRKAAALSDGPAEAPTANKDLRWLSNPGEPPTPTHGVRDKLRAAVEAHRGMEGDLQIGTISLSFRGVDQRGALIKSSALELQKLLGKVARHQSKSSGTRSKPMRGNTNWKIKRAAFHQQQMLFDKDQSKLAALILDEEVKGLCAIPMPELTRAFADRWRATEPFNGLGQFRAEGGANNGEFEHLISAGEVYENLKEMKKGTAAGPDGVTRERLLSWDPNGAKLACLFSMWLVTGALPSTFKECRTTLIPKTPNPVERMQIGGWRPITISSVVARLFSRIITARLARACPISPRQRGFISAPGCSENLMLLQGLIRQSRKQRTPLAVVFVDFAKAFDSVSHEHLQRVLEQRGLDRHIMALIGSTYEKSTTRITIDGVKSSVIDMSVGVKQSDPMSPLLFNLALDPLIQTLERYGSGVGSEGCQTTTLAFADDLVLLSSSVKGMGLNIAILEQFCQLTGLRVQPRKCHSFFIEKAGNGKGESSVKVNNCPAWKLNGEDVHMIGPEESEKYLGMQVSPRAGIVKPELTGPFRDWIDKIGRAALKPSQKVKMLNSFAVPRLIYKADHGNLKTVDLTKIDGMIRNAVKGWLHLPPSTCNGLLYAKHRDGGLGIVKLARQIPSIQARRIHRLWHSADECTRRITRSNVEEAEFEGTWRRAGGSDAERPSLGENPTGSVTPRCPIPSDWRQEEMRQWIGLATQGIGTQAFGNDKTSNSWLANPYSVRFKQGQYIDGLKLRANVYPTREMLARGRPEMDPSCRRCPAPYESCSHILGQCPSIQGARINRHNKVCDLLVTEAESNGWNVIKEMRLVSQEGKLRKPDLIFVKEDVALVVDVTVRYEVAFDTLEVARSQKIAHYLPTAPAILKKLPGVKKVTFFGFPVGARGKWPTRNNQVLRAMGMSDGRRAAFAKLVSRRVLLYSTDLLREFFRADRLEEEASSGEDD

SEQ ID NO: 18693 - protein, 1130 aa, Osmia bicornis
MGRTSTNDKASDAGVLGPGTPVAEISAMDRRATDKQPGDSNGHELAQRIDIPLSSTTACLACSLAGVQTTCASDKVIAVHAQKQHPKLRLIWCCAKCGKESEKIHSIKCHIPKCKGKSEPVEHSFKCTGCDKTFATKRGLSIHEMHMHPDVRNAARAKTVEPGKGKKGRKCSVWTEEETALLRELNDRFKAEKQINAKIRSHFPDKTLKQISDKRRQLNTRQSPVIPAEAEEDNSNNISEPSNIHASPVETINADDAEDVWKEPLIECIRASPVLEDPEMAKIEKEIVKLAQGECRAEGIDRVANALVEILKSGGGDKRRNTPKNSKNSKSKPNSKAQSRRTKLGKFKYARYQEVYKKCPKKLVDMAITGAEFESDKITLPNSADVIGLYGELWGTTGECRGLPSFEGDQRQPHIPTREICTPITAEEIIARMRKIKTDSAAGVDGVRKVHLKKKGVVQILAKLYNLLMLSDHYPEQWRINRTTLIPKQGKDSTDVKNWRPITIGSMLGRIYSAMIDARLRRHVQQSIRQKGFTKEDGCKHNIALLSHALAMMKKRNGGVVTIVDIAKAFDTVPHAAIKECLTRKGVSPKVAQLIRQMYDRCRTKVKTNNGEVSVTLNRGVKQGDPLSPLIFNLIIDPVIEYLNNNTTGVSVEDENLSILAFADDMVLLAKDEKEARNQIRILYQFLQDLGMNVAASKCSAFEIITKNKTWHQKDPELKIGNDKIPGAKPDEVMRYLGADFNCWNGLLRVKHLQVIVGAANNICRMALKPHQKVELIKTYLLPRYIHSMVASPPPLKTLQEIGNEVRQIVKKILHLHHSTTDGLIYSGKNCGGLGLPRIENLIKLAVLRRAAKMQESNDAAVRGVVADLDDVVKKYAQSVELEWPTTVDRIEETRRDLKRKETQRWKDLNSQGQGVADFANDKIGNAWLRNPTLLKPSRYLDALRLRSNTFGTRVALKRANKDQDIACRKCRVEIETLGHIIGMCSHTKPARIRRHDEIKDMISEKVSRRCSVFVEPTVNVFGELKRPDLVIKDQERLIVADVTVRYEAKSNLRNAFRDKTRKYMETAEYIRVKTGCAKAEVLPIVVGCRGAMPKRTQDNLKKLGLRKDEIMTISLIALRSSIEMANAFI

SEQ ID NO: 18694 - protein, 1137 aa, Osmia lignaria
MEEENIEEASDAEVSGPETSVAETSAMDRRATGNRPGSVSGHELVQRISLPFAGNIECTVCRQSGQQMQFFGDRDFLRHAQRQHPRLRLIWCCTKCGKDHDKVHGLKCHIPKCKGARLMAVGNFKCSACDLSFATQRGLSIHELHRHPAIRNAARSKQMTATTSRKGRKCTVWTDEEIALLKELDNRFQAEKRINVKIREYLPNKTAKQISDKRRQLPQIQRVATEAVVMESESGDSFESAISHVSEEGPPASPVSDNEDDVWMDELKEAIRADIQIEDPELVRLEAEIRRVADSGCQTGDIEAIVEALTTNIINSEKEKSSGVSRQEKKRDVMNRKAESRRTKFAKFKYARYQELYRKCPRKLVDMAVDGVEYDREQPKLPDSTNTNELYNALWGIAGSCEGLPQFPGVQRSPNIPTGQIFIPISEGDIIARMRKIKADSAAGIDGIRKVHLKKKGVVEILAKLFNLLMLSGYYPEQWKINRTTLIPKQGKNTSDVKNWRPITISSMLGRMYSAMIDARLRRKVQQSIRQKGFTKEDGCKHNIALLDHAIIRMKEGLGGVITIIDIAKAFDTVPHAAIEHCLMRKGVPNIVASHIRLMYQGCKTKIRTNDGEVSITLKRGVKQGDPLSPLIFNLIIDPVVDQINNKTIGIKIGEAKVAILVFADDMVLLAKDRTEAKKQVHILHQFLSELGMNISASKCSTFEIGTKRKTWFLKDPKLNIGNDRIPESKPEEVFCYLGAELSAWRGLLRVRPTEMIIKAAENIQRMGLKPNQKVNLIRTYLLPRYIHRLVASPPPIKTLQEIDSGVRQLIKQILHLHPSTTDGLFYSDKSHGGLGLPRIENITKLAVIRRAIKMLESSDEAVKAVAMDLEEILKKYTSTIGLQWPTTMEETEEARQNLRKAETQRWEQLISQGQGVSDFRKNKIANAWLYNPTLLKPSRYLDALRLRTNTFGTRVVLRRANKEQDITCRRCGMQAETLGHILGMCIHTKNKRIKRHDEIRNLIEKKVSQRCIVFSEPTVNVLGELKKPDLVIKNQDRLIVADVTVRYEDKNNLLNAFTDKINKYKETAEYIRLRTGCTKAEVLPIVVGCRGALPQKTQSNLKALGLTKSEMMTISMIALRSSIEMANAFLDYEVTR

SEQ ID NO: 18695 - protein, 913 aa, Oikopleura albicans
MSQKNKNMTGNKVGSLGNVTRLGLRKRNVFDTEELPVAKRRKNSSRFGFLRQLSTDVESVDQLKYLVCEGESFECGKAYSDLCQAIKSFSRRTDGNAKHKLKTLNDLFNENPKQAYKKLKGTSHSSKPSYSSTKAFFKQLWSDDEPLERVVTDSDVAVVPLGHTELNRHIKRLNKASAMGHSKVTPRMLVRYHKDFPNDLLILFNAILKSGKIPKKMKKSMVTLIPKVEDTQGNPAMYRPISVNCVVFRLLMSVIDTRLKEQIEGKISPYQFGLLTGVNATAKAVCHAKAAVNHALGKSRSISVVTLDVKKAFDRIKHNAILTALEEFDIDSRTIALILDSLKSVVRVLRTDKGNIFIQPTRGVSQGLSISATLFCIATNCFGKIMNAGYNVTHTLDSPTLCQFAGNLYFDDLLLIDSNQASMRVRVNKALEIANDLGLEMNSSKSKVFAMVRSRNKAKTYTWVSEDLVCGNFTLKSVESFTYLGISLGRCKSKPMFQSILERKVETVTKAKLSIRNKLKAMSEHVIPTLIYKLSLHSTVSCWRRRPVVNNSRLYDDLDSIVRSGARTVLNINNKAARMKLLNVSKADGGMGIPRFADIVPGARWRLSESFGGDERNTIIKYCFADLEAIRDHETQLNYESREGRRDKVNEKKRKLFCSLADGSSNWLVKDSKVKISPLNSTRLTGSALLAAFRFRSGNVGVRFGSSCRFCHYARESIVHFLVTCEHAIWRRYRNHRHNQAAKRMYDLLEKKRLILKIDTLKLEREVSLNDGDRTWIRPDLVIVNESEKKVFVLDTHVTYGTRKDNELSRSETLTTARDKKVAKYRRFDDLLLDKYLSSNAGEVYHVPFIYGAFGTILTYKSVGEKILQRYGLPIRETMEIVSAETLKSSAILLARALRNNVVPFDDVEVGSV

SEQ ID NO: 18696 - protein, 979 aa, Alatina alata
MVYAMGKAVAYIMGVRPKGENQRRGRKAEGGNRRERKLKAEMKRLRQDIARAGNELHRRKQQRKATKKEKEIINQLRTTMNGNEVTLKNLRAAKEQWLDKLRFKKVKLEKYVEKGNRKKDNIMFQKDQKSFFRTLEKVEKHEGEMPEMEKFVEFWGGIWEQDEPTPNMPWMEKVKEELSEKVNIVSQFEITEEKLRRETAKRKNWTAPGIDGIQNVWWKKFAPAQKALVKSFNSLYQDTSMTPEWWPSGRTVLLPKTKNLSDEKNYRPITCLNTSYKILTGLVAKYMREHTIVNEIWDEGQLGAVEGVLGTVDQLIIDRCIMEEVKEYHRNLAVAFYDYKKAYDKVHHDWMIRVYEWIGVPRNVIKLIVHLMSKWKTRLEIWNGSEKVTSRWIRILCGFLQGDSYSPVGFCISEIPVCILLQHSRGYRMGEPGNRVVKRTHSLFVDDLKVYQESHNALKIVNEIIVQASHDTGACYGVSKCAEIIFKHGKMVKGEGLQVLEERMKTMNPDENDIYTFLGIEQAHGIRTKSVYERVKEEVTKRVKMLTKTELNDANLIKAINMKVIPVATYAMNVCKFTIAELKELDQVIKRELRGKYMLGRQASDERLYLKREQGGRGLKSLRDAYKETRLRVACYMAKSSNRWIRTAWRREESKEENAIVTESILAMEEVGVRLRFEENSIQLGGEVIDEETGYKATWRKVKNSLQQATEFKRIEVYKTKEQQSQVYQAQEKECHAWLNQNLNGRKTSSIMMMLEQMVETRAWKTARGLIQEKRCRVCNERDETVEHLVAGCTVLANSEYLSRHNRVLMIMAVAWAKEFDLINTDAIWYSERWERGTVLENDRAKLIWDFEFHLRKTTTARRPDLILEDKEQKKIWVCDMACPQQRNIETKRMEKLTKYRQLAFEMRERRPGYKIVVVPIVIGALGGGIKQAIVDMGKIFMNEDLVKKTVCEMQKTVLMDSETTVRKVLSGLVQELDE

SEQ ID NO: 18697 - protein, 1106 aa, Morbakka virulenta
MKVKLLNIDEEERANGRGFMKHVKARWDVIYPEYQSVSWQKLRDNAARFKKDPEIKNLILVRQREVLQVPETRVAENQEENYNSELNSEGNEQNEEGDDQVNETIVIEDEDLTEADKELERYFQTELNNMEHCTLIHMEPREKLPKLKISKEVEKRANKILRKYLPNAATIPEITDIVYAMGKAVAYASGIKPKEINQNGKRKAKGGNRRERKLRTEMKELRQNIARTANELHRRRQQRKATKREKGILKKLALSMNERETTTLNLQNAKEEWLDKLRYKKVKLQKYIEKGQRKKDNIMFQRDQRSYFRKLEGADKHEGEMPEMEKFLQFWSGVWEQNEPTPNMPWMEEVKSELNEKVNVVAEFEITEEKLKKEIVKRKNWTAPGVDGIQNFWWKKFEPAQKALGRAFMDTYRNTRMIPEWWPSGRTVLIPKTRNLSDEKNYRPITCLNTSYKILTGLVAKYMREHTMINEIWDKGQLGAVEGVLGTVDQLIIDRCIMEEVKQYHRNLAVAFYDYKKAYDRVHHDWMIRVYEWIGIPKAVIRLLKELMNKWRTRLEIWDGNKKMISRWIQIMSGFLQGDSYSPVGFCISEIPVCVLLQHTRGYRMGEPGNRLVKRTHSLFVDDLKVYQESHNALKIVNEMIVQASHDTGAAYGVSKCAEIVFEKGKMVRGEGLEVLEERMKTMDPDENEIYKFLGIEQADGIKTKSVFIRVKKEILKRLKMLVNTELNDSNLIKAINMKVIPVAGYAMNICKFSTGELKELDQVIKRQLREKNMLGRLASDERLYLKREKGGRGLKSMRDVYKETRLRVACYMAKSNNQWIEAAWIREMKKEENAIVTESVMTMAEAGVRLQFEGRSIRIDDRVIEEDREWKPTWQNVKTSLQKGTETKRIEDYKIKEQQSQFYQEQEEECHIWLKQNLHGRKTAAIMMMLQQMVETRAWKVARGLMDDRRCRLCTEKEETVEHLVAGCKVLANSEYLARHNRALMIMTTASAKEYDLIEQGIVWYKEKWERGTTIENHKAKVVWDFEFNLRKTTTARRPDLTIEDQVKKKIWKCDMACPKQRNIVNMRLEKMAKYRQLAFEMRERRPDYDIKVVPVIIGAFGGGK

SEQ ID NO: 18698 - protein, 1289 aa, Morbakka virulenta
MEDLDNNQFQLIHDIANNTVAQMDAENEAIHKNQNIVQILNNREWTEEQKHRIVELDSQERKRGKNFMKRVKDRWDAEYPESRRTAQNLTDNARRFKKEGWGRQNEPSNQNQILEQVEDHVVENAQRKSLEWTTEMKVKLLNIDKEERANGRGFMKRVKARWDVIYPEYQSVSWQKLRDNAARFKKDPEIKNLILVRQREVLQVPETRVAENQEENYNSELNSEGNEQNEEGDDQVNETIVIEDEDLTEADKELERYFQTELNNMEHCTLIHMEPREKLPKLKISKEVEKRANKILRKYLPNAATIPEITDIVYAMGKAVAYASGIKPKEINQNGKRKAKGGNRRERKLRTEMKELRQNIARTANELHRRRQQRKATKREKGILKKLALSMNERETTTLNLQNAKEEWLDKLRYKKVKLQKYIEKGQRKKDNIMFQRDQRSYFRKLEGADKHEGEMPEMEKFLQFWSGVWEQNEPTPNMPWMEEVKSELNEKVNVVAEFEITEEKLKKEIVKRKNWTAPGVDGIQNFWWKKFEPAQKALGRAFMDTYRNTRMIPEWWPSGRTVLIPKTRNLSDEKNYRPITCLNTSYKILTGLVAKYMREHTMINEIWDKGQLGAVEGVLGTVDQLIIDRCIMEEVKQYHRNLAVAFYDYKKAYDRVHHDWMIRVYEWIGIPKAVIRLLKELMNKWRTRLEIWDGNKKMISRWIQIMSGFLQGDSYSPVGFCISEIPVCVLLQHTRGYRMGEPGNRLVKRTHSLFVDDLKVYQESHNALKIVNEMIVQASHDTGAAYGVSKCAEIVFEKGKMVRGEGLEVLEERMKTMDPDENEIYKFLGIEQADGIKTKSVFIRVKKEILKRLKMLVNTELNDSNLIKAINMKVIPVAGYAMNICKFSTGELKELDQVIKRQLREKNMLGRLASDERLYLKREKGGRGLKSMRDVYKETRLRVACYMAKSNNQWIEAAWIREMKKEENAIVTESVMTMAEAGVRLQFEGRSIRIDDRVIEEDREWKPTWQNVKTSLQKGTETKRIEDYKIKEQQSQFYQEQEEECHIWLKQNLHSRKTAAIMMMLEQMVETRAWKVARGLMDDRRCRLCTEKEETVEHLVAGCKVLANSEYLARHNRALMIMTTAWAKEYDLIDQGTVWYKEKWERGTTIENHKAKVVWDFEFNLRKTSTARRPDLTIEDKEKKKIWICDMACPKQRNIVNTRLEKMAKYRQLAFEMRERRPDYDIKVVPVIIGALGGGIKQVTKDIKNILENEELLLRTVAEMQKTILIDSETIIRKVFSGLIQDID

SEQ ID NO: 18699 - protein, 1222 aa, Morbakka virulenta
MKRVKDRWDAEYPESRRTAQNLTDNARRFKKEGWGRQNEPSNQNQILEQVEDHVVENAQRKSLEWTTEMKVKLLNIDKEERANGRGFMKRVKARWDVIYPEYQSVSWQKLRDNAARFKKDPEIKNLILVRQREVLQVPETRVAENQEENYNSELNSEGNEQNEEGDDQVNETIVIEDEDLTEADKELERYFQTELNNMEHCTLIHMEPREKLPKLKISKEVEKRANKILRKYLPNAATIPEITDIVYAMGKAVAYASGIKPKEINQNGKRKAKGGNRRERKLRTEMKELRQNIARTANELHRRRQQRKATKREKGILKKLALSMNERETTTLNLQNAKEEWLDKLRYKKVKLQKYIEKGQRKKDNIMFQRDQRSYFRKLEGADKHEGEMPEMEKFLQFWSGVWEQNEPTPNMPWMEEVKSELNEKVNVVAEFEITEEKLKKEIVKRKNWTAPGVDGIQNFWWKKFEPAQKALGRAFMDTYRNTRMIPEWWPSGRTVLIPKTRNLSDEKNYRPITCLNTSYKILTGLVAKYMREHTMINEIWDKGQLGAVEGVLGTVDQLIIDRCIMEEVKQYHRNLAVAFYDYKKAYDRVHHDWMIRVYEWIGIPKAVIRLLKELMNKWRTRLEIWDGNKKMISRWIQIMSGFLQGDSYSPVGFCISEIPVCVLLQHTRGYRMGEPGNRLVKRTHSLFVDDLKVYQESHNALKIVNEMIVQASHDTGAAYGVSKCAEIVFEKGKMVRGEGLEVLEERMKTMDPDENEIYKFLGIEQADGIKTKSVFIRVKKEILKRLKMLVNTELNDSNLIKAINMKVIPVAGYAMNICKFSTGELKELDQVIKRQLREKNMLGRLASDERLYLKREKGGRGLKSMRDVYKETRLRVACYMAKSNNQWIEAAWIREMKKEENAIVTESVMTMAEAGVRLQFEGRSIRIDDRVIEEDREWKPTWQNVKTSLQKGTETKRIEDYKIKEQQSQFYQEQEEECHIWLKQNLHSRKTAAIMMMLEQMVETRAWKVARGLMDDRRCRLCTEKEETVEHLVAGCKVLANSEYLARHNRALMIMTTAWAKEYDLIDQGTVWYKEKWERGTTIENHKAKVVWDFEFNLRKTSTARRPDLTIEDKEKKKIWICDMACPKQRNIVNTRLEKMAKYRQLAFEMRERRPDYDIKVVPVIIGALGGGIKQVTKDIKNILENEELLFRTVAEMQKTILIDSETIIRKVFSGLIQDID

SEQ ID NO: 18700 - protein, 1289 aa, Morbakka virulenta
MEDLDNNQFQLIHDIANNTVAQMDAENEAIHKNQNIVQILNNREWTEEQKHRIVELDSQERKRGKNFMKRVKDRWDAEYPESRRTAQNLTDNARRFKKEGWGRQNEPSNQNQILEQVEDHVVENAQRKSLEWTTEMKVKLLNIDKEERANGRGFMKRVKARWDVIYPEYQSVSWQKLRDNAARFKKDPEIKNLILVRQREVLQVPETRVAENQEENYNSELNSEGNEQNEEGDDQVNETIVIEDEDLTEADKELERYFQTELNNMEHCTLIHMEPREKLPKLKISKEVEKRANKILRKYLPNAATIPEITDIVYAMGKAVAYASGIKPKEINQNGKRKAKGGNRRERKLRTEMKELRQNIARTANELHRRRQQRKATKREKGILKKLALSMNERETTTLNLQNAKEEWLDKLRYKKVKLQKYIEKGQRKKDNIMFQRDQRSYFRKLEGADKHEGEMPEMEKFLQFWSGVWEQNEPTPNMPWMEEVKSELNEKVNVVAEFEITEEKLKKEIVKRKNWTAPGVDGIQNFWWKKFEPAQKALGRAFMDTYRNTRMIPEWWPSGRTVLIPKTRNLSDEKNYRPITCLNTSYKILTGLVAKYMREHTMINEIWDKGQLGAVEGVLGTVDQLIIDRCIMEEVKQYHRNLAVAFYDYKKAYDRVHHDWMIRVYEWIGIPKAVIRLLKELMNKWRTRLEIWDGNKKMISRWIQIMSGFLQGDSYSPVGFCISEIPVCVLLQHTRGYRMGEPGNRLVKRTHSLFVDDLKVYQESHNALKIVNEMIVQASHDTGAAYGVSKCAEIVFEKGKMVRGEGLEVLEERMKTMDPDENEIYKFLGIEQADGIKTKSVFIRVKKEILKRLKMLVNTELNDSNLIKAINMKVIPVAGYAMNICKFSTGELKELDQVIKRQLREKNMLGRLASDERLYLKREKGGRGLKSMRDVYKETRLRVACYMAKSNNQWIEAAWIREMKKEENAIVTESVMTMAEAGVRLQFEGRSIRIDDRVIEEDREWKPTWQNVKTSLQKGTETKRIEDYKIKEQQSQFYQEQEEECHIWLKQNLHSRKTAAIMMMLEQMVETRAWKVARGLMDDRRCRLCTEKEETVEHLVAGCKVLANSEYLARHNRALMIMTTAWAKEYDLIDQGTVWYKEKWERGTTIENHKAKVVWDFEFNLRKTSTARRPDLTIEDKEKKKIWICDMACPKQRNIVNTRLEKMAKYRQLAFEMRERRPDYDIKVVPVIIGALGGGIKQVTKDIKNILENEELLFRTVAEMQKTILIDSETIIRKVFSGLIQDID

SEQ ID NO: 18701 - protein, 1289 aa, Morbakka virulenta
MEDLDNNQFQLIHDIANNTVAQMDAENEAIHKNQNIVQILNNREWTEEQKHRIVELDSQERKRGKNFMKRVKDRWDAEYPESRRTAQNLTDNARRFKKEGWGRQNEPSNQNQILEQVEDHVVENAQRKSLEWTTEMKVKLLNIDKEERANGRGFMKRVKARWDVIYPEYQSVSWQKLRDNAARFKKDPEIKNLILVRQREVLQVPETRVAENQEENYNSELNSEGNEQNEEGDDQVNETIVIEDEDLTEADKELERYFQTELNNMEHCTLIHMEPREKLPKLKISKEVEKRANKILRKYLPNAATIPEITDIVYAMGKAVAYASGIKPKEINQNGKRKAKGGNRRERKLRTEMKELRQNIARTANELHRRRQQRKATKREKGILKKLALSMNERETTTLNLQNAKEEWLDKLRYKKVKLQKYIEKGQRKKDNIMFQRDQRSYFRKLEGADKHEGEMPEMEKFLQFWSGVWEQNEPTPNMPWMEEVKSELNEKVNVVAEFEITEEKLKKEIVKRKNWTAPGVDGIQNFWWKKFEPAQKALGRAFMDTYRNTRMIPEWWPSGRTVLIPKTRNLSDEKNYRPITCLNTSYKILTGLVAKYMREHTMINEIWDKGQLGAVEGVLGTVDQLIIDRCIMEEVKQYHRNLAVAFYDYKKAYDRVHHDWMIRVYEWIGIPKAVIRLLKELMNKWRTRLEIWDGNKKMISRWIQIMSGFLQGDSYSPVGFCISEIPVCVLLQHTRGYRMGEPGNRLVKRTHSLFVDDLKVYQESHNALKIVNEMIVQASHDTGAAYGVSKCAEIVFEKGKMVRGEGLEVLEERMKTMDPDENEIYKFLGIEQADGIKTKSVFIRVKKEILKRLKMLVNTELNDSNLIKAINMKVIPVAGYAMNICKFSTGELKELDQVIKRQLREKNMLGRLASDERLYLKREKGGRGLKSMRDVYKETRLRVACYMAKSNNQWIEAAWIREMKKEENAIVTESVMTMAEAGVRLQFEGRSIRIDDRVIEEDREWKPTWQNVKTSLQKGTETKRIEDYKIKEQQSQFYQEQEEECHIWLKQNLHSRKTAAIMMMLEQMVETRAWKVARGLMDDRRCRLCTEKEETVEHLVAGCKVLANSEYLARHNRALMIMTTAWAKEYDLIDQGTVWYKEKWERGTTIENHKAKVVWDFEFNLRKTSTARRPDLTIEDKEKKKIWICDMACPKQRNIVKTRLEKKAKYRQLAFEMRERRPDYDIKVVPVIIGALGGGIKQVTKDIKNILENEELLLRTVAEMQKTILTDTETIIRKVFSRLIQDND

SEQ ID NO: 18702 - protein, 1289 aa, Morbakka virulenta
MEDLDNNQFQLIHDIANNTVAQMDAENKAIHKNQNIIKILNNREWTEEQKHRIVELDSQERKRGKNFMKRVKDRWDAEYPESRRTAQNLTDNARRFKKEGWGRQNEPSNQNQILEQVEDHVVENAQRKSLEWTTEMKVKLLNIDKEERANGRGFMKRVKARWDVIYPEYQSVSWQKLRDNAARFKKDPEIKNLILVRQREVLQVPETRVAENQEENYNSELNSEGNEQNEEGDDQVNETIVIEDEDLTEADKELERYFQTELNNMEHCTLIHMEPREKLPKLKISKEVEKRANKILRKYLPNAATIPEITDIVYAMGKAVAYASGIKPKEINQNGKRKAKGGNRRERKLRTEMKELRQNIARTANELHRRRQQRKATKREKGILKKLALSMNERETTTLNLQNAKEEWLDKLRYKKVKLQKYIEKGQRKKDNIMFQRDQRSYFRKLEGADKHEGEMPEMEKFLQFWSGVWEQNEPTPNMPWMEEVKSELNEKVNVVAEFEITEEKLKKEIVKRKNWTAPGVDGIQNFWWKKFEPAQKALGRAFMDTYRNTRMIPEWWPSGRTVLIPKTRNLSDEKNYRPITCLNTSYKILTGLVAKYMREHTMINEIWDKGQLGAVEGVLGTVDQLIIDRCIMEEVKQYHRNLAVAFYDYKKAYDRVHHDWMIRVYEWIGIPKAVIRLLKELMNKWRTRLEIWDGNKKMISRWIQIMSGFLQGDSYSPVGFCISEIPVCVLLQHTRGYRMGEPGNRLVKRTHSLFVDDLKVYQESHNALKIVNEMIVQASHDTGAAYGVSKCAEIVFEKGKMVRGEGLEVLEERMKTMDPDENEIYKFLGIEQADGIKTKSVFIRVKKEILKRLKMLVNTELNDSNLIKAINMKVIPVAGYAMNICKFSTGELKELDQVIKRQLREKNMLGRLASDERLYLKREKGGRGLKSMRDVYKETRLRVACYMAKSNNQWIEAAWIREMKKEENAIVTESVMTMAEAGVRLQFEGRSIRIDDRVIEEDREWKPTWQNVKTSLQKGTETKRIEDYKIKEQQSQFYQEQEEECHIWLKQNLHSRKTAAIMMMLEQMVETRAWKVARGLMDDRRCRLCTEKEETVEHLVAGCKVLANSEYLARHNRALMIMTTAWAKEYDLIDQGTVWYKEKWERGTTIENHKAKVVWDFEFNLRKTSTARRPDLTIEDKEKKKIWICDMACPKQRNIVNTRLEKMAKYRQLAFEMRERRPDYDIKVVPVIIGALGGGIKQVTKDIKNILENEELLLRTVAEMQKTILIDSETIIRKVFSGLIQDID

SEQ ID NO: 18703 - protein, 1154 aa, Morbakka virulenta
MKVKLLNIDKEERANGRGFMKRVKARWDVIYPEYQSVSWQKLRDNAARFKKDPEIKNLILVRQREVLQVPETRVAENQEENYNSELNSEGNEQNEEGDDQVNETIVIEDEDLTEADKELERYFQTELNNMEHCTLIHMEPREKLPKLKISKEVEKRANKILRKYLPNAATIPEITDIVYAMGKAVAYASGIKPKEINQNGKRKAKGGNRRERKLRTEMKELRQNIARTANELHRRRQQRKATKREKGILKKLALSMNERETTTLNLQNAKEEWLDKLRYKKVKLQKYIEKGQRKKDNIMFQRDQRSYFRKLEGADKHEGEMPEMEKFLQFWSGVWEQNEPTPNMPWMEEVKSELNEKVNVVAEFEITEEKLKKEIVKRKNWTAPGVDGIQNFWWKKFEPAQKALGRAFMDTYRNTRMIPEWWPSGRTVLIPKTRNLSDEKNYRPITCLNTSYKILTGLVAKYMREHTMINEIWDKGQLGAVEGVLGTVDQLIIDRCIMEEVKQYHRNLAVAFYDYKKAYDRVHHDWMIRVYEWIGIPKAVIRLLKELMNKWRTRLEIWDGNKKMISRWIQIMSGFLQGDSYSPVGFCISEIPVCVLLQHTRGYRMGEPGNRLVKRTHSLFVDDLKVYQESHNALKIVNEMIVQASHDTGAAYGVSKCAEIVFEKGKMVRGEGLEVLEERMKTMDPDENEIYKFLGIEQADGIKTKSVFIRVKKEILKRLKMLVNTELNDSNLIKAINMKVIPVAGYAMNICKFSTGELKELDQVIKRQLREKNMLGRLASDERLYLKREKGGRGLKSMRDVYKETRLRVACYMAKSNNQWIEAAWIREMKKEENAIVTESVMTMAEAGVRLQFEGRSIRIDDRVIEEDREWKPTWQNVKTSLQKGTETKRIEDYKIKEQQSQFYQEQEEECHIWLKQNLHSRKTAAIMMMLEQMVETRAWKVARGLMDDRRCRLCTEKEETVEHLVAGCKVLANSEYLARHNRALMIMTTAWAKEYDLIDQGTVWYKEKWERGTTIENHKAKVVWDFEFNLRKTSTARRPDLTIEDKEKKKIWICDMACPKQRNIVNTRLEKMAKYRQLAFEMRERRPDYDIKVVPVIIDALGGGIKQVTKDIKNILENEELLLRTVAEMQKTILIDSETIIRKVFSGLIQDID

SEQ ID NO: 18704 - protein, 1289 aa, Morbakka virulenta
MEDLDNNQFQLIHDIANNTVAQMDAENEAIHKNQNIVQILNNREWTEEQKHRIVELDSQERKRGKNFMKRVKDRWDAEYPESRRTAQNLTDNARRFKKEGWGRQNEPSNQNQILEQVEDHVVENAQRKSLEWTTEMKVKLLNIDKEERANGRGFMKRVKARWDVIYPEYQSVSWQKLRDNAARFKKDPEIKNLILVRQREVLQVPETRVAENQEENYNSELNSEGNEQNEEGDDQVNETIVIEDEDLTEADKELERYFQTELNNMEHCTLIHMEPREKLPKLKISKEVEKRANKILRKYLPNAATIPEITDIVYAMGKAVAYASGIKPKEINQNGKRKAKGGNRRERKLRTEMKELRQNIARTANELHRRRQQRKATKREKGILKKLALSMNERETTTLNLQNAKEEWLDKLRYKKVKLQKYIEKGQRKKDNIMFQRDQRSYFRKLEGADKHEGEMPEMEKFLQFWSGVWEQNEPTPNMPWMEEVKSELNEKVNVVAEFEITEEKLKKEIVKRKNWTAPGVDGIQNFWWKKFEPAQKALGRAFMDTYRNTRMIPEWWPSGRTVLIPKTRNLSDEKNYRPITCLNTSYKILTGLVAKYMREHTMINEIWDKGQLGAVEGVLGTVDQLIIDRCIMEEVKQYHRNLAVAFYDYKKAYDRVHHDWMIRVYEWIGIPKAVIRLLKELMNKWRTRLEIWDGNKKMISRWIQIMSGFLQGDSYSPVGFCISEIPVCVLLQHTRGYRMGEPGNRLVKRTHSLFVDDLKVYQESHNALKIVNEMIVQASHDTGAAYGVSKCAEIVFEKGKMVRGEGLEVLEERMKTMDPDENEIYKFLGIEQADGIKTKSVFIRVKKEILKRLKMLVNTELNDSNLIKAINMKVIPVAGYAMNICKFSTGELKELDQVIKRQLREKNMLGRLASDERLYLKREKGGRGLKSMRDVYKETRLRVACYMAKSNNQWIEAAWIREMKKEENAIVTESVMTMAEAGVRLQFEGRSIRIDDRVIEEDREWKPTWQNVKTSLQKGTETKRIEDYKIKEQQSQFYQEQEEECHIWLKQNLHSRKTAAIMMMLEQMVETRAWKVARGLMDDRRCRLCTEKEETVEHLVAGCKVLANSEYLARHNRALMIMTTAWAKEYDLIDQGTVWYKEKWERGTTIENHKAKVVWDFEFNLRKTSTARRPDLTIEDKEKKKIWICDMACPKQRNIVNTRLEKMAKYRQLAFEMRERRPDYDIKVVPVIIGALGGGIKQVTKDIKNIFENEELLLRTVAEMQKTILIDSETIIRKVFSGLIQDID

SEQ ID NO: 18705 - protein, 932 aa, Morbakka virulenta
MEHCTLIHMEPREKLPKLKISKEVEKRANKILSKYIPNAATIPEITDIVYAMGKAVAYASGIKPKEVNQNGKRKAKGGNRRERKLRTEMKELRQNIARTANELHRRRQQRKATKREKGILKKLALSMNERETTTLNLQNAKEEWLDKLRYKKVKLQKYIEKGQRKKDNIMFQRDQRSYFRKLEGADKHEGEMPEMEKFLQFWSGVWEQNEPTPNMPWMEEVKSELNEKVNVVAEFEITEEKLKKEIVKRKNWTAPGVDGIQNFWWKKFEPAQKALGRAFMDTYRNTRMIPEWWPSGRTVLIPKTRNLSDEKNYRPITCLNTSYKILTGLVAKYMREHTMINEIWDKGQLGAVEGVLGTVDQLIIDRCIMEEVKQYHRNLAVAFYDYKKAYDRVHHDWMIRVYEWIGIPKAVIRLLKELMNKWRTRLEIWDGNKKMISRWIQIMSGFLQGDSYSPVGFCISEIPVCVLLQHTRGYRMGEPGNRLVKRTHSLFVDDLKVYQESHNALKIVNEMIVQASHDTGAAYGVSKCAEIVFEKGKMVRGEGLEVLEERMKTMDPDENEIYKFLGIEQADGIKTKSVFIRVKKEILKRLKMLVNTELNDSNLIKAINMKVIPVAGYAMNICKFSTGELKELDQVIKRQLREKNMLGRLASDERLYLKREKGGRGLKSMRDVYKETRLRVACYMAKSNNQWIEAAWIREMKKEENAIVTESVMTMAEAGVRLQFEGRSIRIDDRVIEEDREWKPTWQNVKTSLQKGTETKRIEDYKIKEQQSQFYQEQEEECHIWLKQNLHSRKTAAIMMMLEQMVETRAWKVARGLMDDRRCRLCTEKEETVEHLVAGCKVLANSEYLARHNRALMIMTTAWAKEYDLIDQGTVWYKEKWERGTTIENHKAKVVWDFEFNLRKTTTARRPDLTIEDKEKKKIWICDMACPK

SEQ ID NO: 18706 - protein, 1166 aa, Morbakka virulenta
MKRVKDRWDAEYPESRRTAQNLTDNARRFKKEGWGRQNEPSNQNQILEQVEDHVVENAQRKSLEWTTQMKVKLLNIDKEERANGRGFMKRVKARWDVIYPEYQSVSWQKLRDNAARFKKDPEIKNLILVRQREVLQVPETRVAENQEENYNSELNSEGNEQNEEGDDQVNETIVIEDEDLTEADKELERYFQTELNNMEHCTLIHMEPREKLPKLKISKEVEKRANKILRKYLPNAATIPEITDIVYAMGKAVAYASGIKPKEINQNGKRKAKGGNRRERKLRTEMKELRQNIARTANELHRRRQQRKATKREKGILKKLALSMNERETTTLNLQNAKEEWLDKLRYKKVKLQKYIEKGQRKKDNIMFQRDQRSYFRKLEGADKHEGEMPEMEKFLQFWSGVWEQNEPTPNMPWMEEVKSELNEKVNVVAEFEITEEKLKKEIVKRKNWTAPGVDGIQNFWWKKFEPAQKALGRAFMDTYRNTRMIPEWWPSGRTVLIPKTRNLSDEKNYRPITCLNTSYKILTGLVAKYMREHTMINEIWDKGQLGAVEGVLGTVDQLIIDRCIMEEVKQYHRNLAVAFYDYKKAYDRVHHDWMIRVYEWIGIPKAVIRLLKELMNKWRTRLEIWDGNKKMISRWIQIMSGFLQGDSYSPVGFCISEIPVCVLLQHTRGYRMGEPGNRLVKRTHSLFVDDLKVYQESHNALKIVNEMIVQASHDTGAAYGVSKCAEIVFEKGKMVRGEGLEVLEERMKTMDPDENEIYKFLGIEQADGIKTKSVFIRVKKEILKRLKMLVNTELNDSNLIKAINMKVIPVAGYAMNICKFSTGELKELDQVIKRQLREKNMLGRLASDERLYLKREKGGRGLKSMRDVYKETRLRVACYMAKSNNQWIEAAWIREMKKEENAIVTESVMTMAEAGVRLQFEGRSIRIDDRVIEEDREWKPTWQNVKTSLQKGTETKRIEDYKIKEQQSQFYQEQEEECHIWLKQNLHSRKTAAIMMMLEQMVETRAWKVARGLMDDRRCRLCTEKEETVEHLVAGCKVLANSEYLARHNRALMIMTTAWAKEYDLIDQGTVWYKEKWERGTTIENHKAKVVWDFEFNLRKTTTARRPDLTIEDKEKKKIWICDMACPKQRNIVNTFIENNNNNNRTFQSTCHESTKLQQNCREGK

SEQ ID NO: 18707 - protein, 1289 aa, Morbakka virulenta
MEDLDNNQFQLIHDIANNTVAQMDAENEAIHKNQNIVQILNNREWTEEQKHRIVELDSQERKRGKNFMKRVKDRWDAEYPESRRTAQNLTDNARRFKKEGWGRQNEPSNQNQILEQVEDHVVENAQRKSLEWTTEMKVKLLNIDKEERANGRGFMKRVKARWDVIYPEYQSVSWQKLRDNAARFKKDPEIKNLILVRQREVLQVPETRVAENQEENYNSELNSEGNEQNEEGDDQVNETIVIEDEDLTEADKELERYFQTELNNMEHCTLIHMEPREKLPKLKISKEVEKRANKILRKYLPNAATIPEITDIVYAMGKAVAYASGIKPKEINQNGKRKAKGGNRRERKLRTEMKELRQNIARTANELHRRRQQRKATKREKGILKKLALSMNERETTTLNLQNAKEEWLDKLRYKKVKLQKYIEKGQRKKDNIMFQRDQRSYFRKLEGADKHEGEMPEMEKFLQFWSGVWEQNEPTPNMPWMEEVKSELNEKVNVVAEFEITEEKLKKEIVKRKNWTAPGVDGIQNFWWKKFEPAQKALGRAFMDTYRNTRMIPEWWPSGRTVLIPKTRNLSDEKNYRPITCLNTSYKILTGLVAKYMREHTMINEIWDKGQLGAVEGVLGTVDQLIIDRCIMEEVKQYHRNLAVAFYDYKKAYDRVHHDWMIRVYEWIGIPKAVIRLLKELMNKWRTRLEIWDGNKKMISRWIQIMSGFLQGDSYSPVGFCISEIPVCVLLQHTRGYRMGEPGNRLVKRTHSLFVDDLKVYQESHNALKIVNEMIVQASHDTGAAYGVSKCAEIVFEKGKMVRGEGLEVLEERIKTMDPDENEIYKFLGIEQADGIKTKSVFIRVKKEILKRLKMLVNTELNDSNLIKAINMKVIPVAGYAMNICKFSTGELKELDQVIKRQLREKNMLGRLASDERLYLKREKGGRGLKSMRDVYKETRLRVACYMAKSNNQWIEAAWIREMKKEENAIVTESVMTMAEAGVRLQFEGRSIRIDDRVIEEDREWKPTWQNVKTSLQKGTETKRIEDYKIKEQQSQFYQEQEEECHIWLKQNLHSRKTAAIMMMLEQMVETRAWKVARGLMDDRRCRLCTEKEETVEHLVAGCKVLANSEYLARHNRALMIMTTAWAKEYDLIDQGTVWYKEKWERGTTIENHKAKVVWDFEFNLRKTSTARRPDLTIEDKEKKKIWICDMACPKQRNIVNTRLEKMAKYRQLAFEMRERRPDYDIKVVPVIIGALGGGIKQVTKDIKNILENEELLLRTVAEMQKTILIDSETLIRKVFSGLIQDID

SEQ ID NO: 18708 - protein, 1174 aa, Morbakka virulenta
MKRVKDRWDAEYPESRRTAQNLSDNARRFKKEGWGRQNEPSNQNQILEQVEDHVVEDAQRKSLEWTTEMKVKLLNIDKEERANGRGFMKRVKARWDVIYPEYQSVSWQKLRDNAARFKKDPEIKNLILVRQREVLQVPETRVAENQEENYNSELNSEGNEQNEEGDDQVNETIVIEDEDLTEADKELERYFQTELNNMEHCTLIHMEPREKLPKLKISKEVEKRANKILRKYLPNAATIPEITDIVYAMGKAVAYASGIKPKEINQNGKRKAKGGNRRERKLRTEMKELRQNIARTANELHRRRQQRKATKREKGILKKLALSMNERETTTLNLQNAKEEWLDKLRYKKVKLQKYIEKGQRKKDNIMFQRDQRSYFRKLEGADKHEGEMPEMEKFLQFWSGVWEQNEPTPNMPWMEEVKSELNEKVNVVAEFEITEEKLKKEIVKRKNWTAPGVDGIQNFWWKKFEPAQKALGRAFMDTYRNTRMIPEWWPSGRTVLIPKTRNLSDEKNYRPITCLNTSYKILTGLVAKYMREHTMINEIWDKGQLGAVEGVLGTVDQLIIDRCIMEEVKQYHRNLAVAFYDYKKAYDRVHHDWMIRVYEWIGIPKAVIRLLKELMNKWRTRLEIWDGNKKMISRWIQIMSGFLQGDSYSPVGFCISEIPVCVLLQHTRGYRMGEPGNRLVKRTHSLFVDDLKVYQESHNALKIVNEMIVQASHDTGAAYGVSKCAEIVFEKGKMVRGEGLEVLEERMKTMDPDENEIYKFLGIEQADGIKTKSVFIRVKKEILKRLKMLVNTELNDSNLIKAINMKVIPVAGYAMNICKFSTGELKELDQVIKRQLREKNMLGRLASDERLYLKREKGGRGLKSMRDVYKETRLRVACYMAKSNNQWIEAAWIREMKKEENAIVTESVMTMAEAGVRLQFEGRSIRIDDRVIEEDREWKPTWQNVKTSLQKGTETKRIEDYKIKEQQSQFYQEQEEECHIWLKQNLHSRKTAAIMMMLEQMVETRAWKVARGLMDDRRCRLCTEKEETVEHLVAGCKVLANSEYLARHNRALMIMTTAWAKEYDLIDQGTVWYKEKWERGTTIENHKAKVVWDFEFNLRKTTTARRPDLTIEDKEKKKIWICDMACPKQRNNVNTRLEKMAKYTLLAFEMRERRPNYDIKVVLVIRHSPLEVV

SEQ ID NO: 18709 - protein, 895 aa, Morbakka virulenta
MEATCDPMSWTLFKIFFHLCVAFIIIIIIIIIIIIIIIIIIIIIIIIIIIKLEGADKHEGEMPEMEKFLKFWSGVWEQNEPTPNMPWMEEVKSELNEKVNVVAEFEITEEKLKKEIVKRKNWTAPGVDGIQNFWWKKFEPAQKALGRAFMDTYRNTRMIPEWWPSGRTVLIPKTRNLSDEKNYRPITCLNTSYKILTGLVAKYMREHTMINEIWDKGQLGAVEGVLGTVDQLIIDRCIMEEVKQYHRNLAVAFYDYKKAYDRVHHDWMIRVYEWIGIPKAVIRLLKELMNKWRTRLEIWDGNKKMISRWIQIMSGFLQGDSYSPVGFCISEIPVCVLLQHTRGYRMGEPGNRLVKRTHSLFVDDLKVYQESHNALKIVNEMIVQASHDTGAAYGVSKCAEIVFEKGKMVRGEGLEVLEERMKTMDPDENEIYKFLGIEQADGIKTKSVFIRVKKEILKRLKMLVNTELNDSNLIKAINMKVIPVAGYAMNICKFSTGELKELDQVIKRQLREKNMLGRLASDERLYLKREKGGRGLKSMRDVYKETRLRVACYMAKSNNQWIEAAWIREMKKEENAIVTESVMTMAEAGVRLQFEGRSIRIDDRVIEEDREWKPTWQNVKTSLQKGTETKRIEDYKIKEQQSQFYQEQEEECHIWLKQNLHSRKTAAIMMMLEQMVETRAWKVARGLMDDRRCRLCTEKEETVEHLVAGCKVLANSEYLARHNRALMIMTTAWAKEYDLIDQGTVWYKEKWERGTTIENHKAKVVWDFEFNLRKTSTARRPDLTIEDKEKKKIWICDMACPKQRNIVNTRLEKMAKYRQLAFEMRERRPDYDIKVVPVIIGALGGGIKQVTKDIKNILENEELLLRTVAEMQKTILIDSETIIRKVFSGLIQDID

SEQ ID NO: 18710 - protein, 1101 aa, Alatina alata
MLVRQREEIEQAEIVMRNEEVEERNVDEPVERNDEVENHMVESDGEEIVLDVQTDVELTEKDKELELFFNAELEQLDHATALHIEPKEKLPKVKPDAETLERANKILNLYLPNVDTLFEITDMVYAMGKAVACIMGVKPKEKNQRRGRKAEGGNRRERKLKAEMKRLRQDIARAGNELHRRKQQRKATKKEKEIINQLRTSMNGNKVTIKNLRVAKEQWLDKLRFKKVKLEKYVEKGNRKKDNIMFQKDQKSFFRTLEKVEKHEGEMPKMEKFVEFWGGIWEQDDPTPNMPWMEEVKAELSEKVNIVGQFEITEEKLRRETAKRKNWTAPGIDGIQNFWWKKFAPAQKALVKSFTSLYQDTSMTPEWWPSGRTVLLPKTKNLSDEKNYRPITCLNTSYKILTGLVAKYMREHTIVNEIWDEGQLGAVEGVLGTVDQLIIDRCIMEEVKQHHRNLAVAFYDYKKAYDKVHHDWMIRVYEWIGVPRNVIQLIVHLMSKWKTRLEIWNGSEKVTSRWIRILCGFLQGDSYSPVGFCISEIPVCILLQHSRGYRMGEPGNRVVKRTHSLFVDDLKVYQESHNALKIVNEIIVQASHDTGACYGVSKCAEIIFRNGKMVRGEGLQVLEERIKTTNPDENEIYKFLGIELADGIKTKAVYKRVKAEVTKRVQMLTGTELNDANLIKAINMKVVPVATYAMNVCKFTVAELKELDQIIKKELRGKYMLGKKASDERLYLKRERGGRGLKSMRDAYKETRLRVACYMAKSTNRWIRAAWRREENKEENAIVLESMSTMDEVGVKLRFENNLIRLDEEVIDEATEYKATWRKVKNSLQKATESKRIEIYKTKEQQSQVYREQEEECHAWLNQNLHGRKTASIMTMLEQMVETKAWKVSRGLALDKQCRVCHERDETVEHIVAGCKVLANSEYLARHNRALMIVAVNWAKEYELIDQDVIWYKERWERGAVLENERGKLVWDFEFNLRKTTTARRPDLILEDKEKKKIWICDMACPQQQNISVKRLEKLTKYRQLAFETRERRVGYNVMVVPLIIGSLGGGMRQIAKDIKRIFNSNETVNRTICEMQKTILMDSETTVRKVLSGLIQDTNE

SEQ ID NO: 18711 - protein, 967 aa, Alatina alata
MGVRPKEKNQRRASKAEGGNRRERKLKAEMKRLRQDIARAGNELHRRKQQRKATKKEKEIINQLRTSMNGNTVTLKNLRAAKEQWLDKLRFKKVKLEKYVEKGNRKKDNIMFQKDQRSFFRMLENVEKHEGEMPEMEKFVEFWGGIWEQDEPTPNMPWMEKVKAELSEKVNIVSQFEITEEKLRRETAKRKNWTAPGIDGIQNFWWKKFAPAQKALVKSFTSLCQDTSMTPEWWPSGRTVLLPKTKNLSDEKNYRPITCLNTSYKILTGLVAKYMREHTIVNEIWDEGQLGAVEGVLGTVDQLIIDRCIMEEVKEYHRNLAVAFYDYKKAYDKVHHDWMIRVYEWIGVPRNVIKLIVHLMGKWKTQLEIWNGSEKVTSRWIRILCGFLQGDSYSPVGFCISEIPVCILLQHSRGYRMGEPGNRVVKRTHSLFVDDLKVYQESHNALKIVNEIIVQASHDTGACYGVSKCAEIVFKHGKMVRGEGLQVLEERMKTINPDENDIYKFLGIEQADGIKTKSVYERVKEEVTKRVKMLTKTELNDANLIKAINMKVIPVATYAMNVCTFTIAELKELDQVIKRELRGKYMLGRQASDERLYLKREQGGRGLKSLRDAYKETRLRVACYMAKSCNRWIRTAWRREESKEENAIVTESILALEEVGVRLRFEENSIQLGGEVIDKEMGYKATWRKVKNSLQKATEFKRIEVYKTKEQQSQVYQAQEKECHAWLNQNLNGRKTSSIMIMLEQMVETRAWKTARGLIQEKRCRVCNERDETVEHLVAGCKVLANSEYLSRHNRVLMIMAGAWAKEFDLINTDAIWYSERWERGTVLENDRAKMIWDFEFHLRKTTTARRPDLILEDKEQKKIWVCDMACPQQRNIETKRMEKLTKYRQLAFEMRERRPGYKIVVVPVVIGALGGGMKQAIVDMGKIFMNEDLVKKTVCEMQKTVLMDSETTVRKVLSGLVQEHDE

SEQ ID NO: 18712 - protein, 1066 aa, Strongyloides papillosus
MRKSIKEMNPKERYDYFSKDRGKIFRFDVKPWMPTFEIDLLIEKKLRPLTQVWSKTKITDIESKKTWRQASKIMIIATKVLKSYDTRKVDYDGTSVEDVIKVSAALRRTERFDQRIQKMLEQTKSPQKNIKNHAQAYLRKVEKKFKGKVKTIEQVRFFTKSKISTLKKRVAYLNEKKRRDRIRMRFRSKPSLKSLVDTTPLDIEIDKSEIEKYLIDLFSKKDCEVPEPESLLNKWVEYSKNTTSIDEDSKPNFNEEIFNECLKWSRSWKAPGTNKLYMKIFKVLNSCKIFLMEWIKAVYERRCNLTDEDTRGRAFGIFKKGNIDDPKNYRFINVTNSHYKIFMKYLNSVIVDQIEHRIPKEQIANKKGRSCLDGIIINRLIQKKTVHGQQIAQTWLDMQKAYDSLDHKKLLIVLENLGIHRDFIEIIKKAMRCWKFTVINGKETYMNNEKKKKKPTVIHVNRGIYQGDSLSPTLFVCSLIPLSWMLNQQPRINLEDPNTEANVVTTMNDDEVEDEGLYNHLLFMDDIKLFSINAKCLNEMTKICEKYGLEIGLKINPLKSSYSINQGEQAEEPLINFEELSTVYKYLGIYENHKTADEKANLQELYKVVDEKLKLILESPITVGNMIDAINTCLMPKILYVFSHERSELIKRKIYLDMDLRIRKALNTYGVKFQNLSNARIYLPRSRFGLGLKSTETEIDKIQLKNFIHIKYSEVFRKMNETFKMMENDIIIIASKYNINMSFEEGLPCINGTIGSEKEAKKKISELVDNFAYKRWAEHYTRKKEFPKFVINNKLICPWLRTLNIEPRKFKTITMTQDDMHPMLNPIFDKESKCVLETNSVKCNHYDNIRHVGSYCEHSVSWRRRRHDNVLHTITNVLLRKLKQKMVDLNNYKKCYKIDDNTELRIDQLNYTSESLVHNKPDIIYETKDKIIIGELAISHYRNLEESAKLKIQRYTVNGTLQLNAPVENLEYSTNFTAVLAKQKGKPVSFYPLICGPFGELDGPRLDHWVAFLDEFNISEKETIKPVIERITRKAAIETEYILFQYIKLKEKKLKENNDEQNDMEL

SEQ ID NO: 18713 - protein, 1241 aa, Strongyloides papillosus
MTTKITKINNKLNIREQQKIAKLLPDVKINENLTVDITEIINEIQVISNEIDKPISVIIDYIENEIKERTLLDLPITNKNIPNDIYQKKRNSLESEITNPEYNMEVDEFQIVKRRKRNMKNTTPEDQIKRSRMESMNKNGEVISDVKKKPILSYAEVAKKRENIKHRDSKEDSQEMRKSIKEMNPKERYDYFSKDRGKIFRFDVKPWMPTFEIDLLIEKKLRPLTQVWSKTKITDIESKKTWRQASKIMIIATKVLKSYDTRKVDYDGTSVEDVIKVSAALRRTERFDQRIQKMLEQTKSPQKNIKNHAQAYLRKVEKKFKGKVKTIEQVRFFTKSKISTLKKRVAYLNEKKRRDRIRMRFRSKPSLKSLVDTTPLDIEIDKSEIEKYLIDLFSKKDCEVPEPESLLNKWVEYSKNTTSIDEDSKPNFNEEIFNECLKWSRSWKAPGTNKLYMKIFKVLNSCKIFLMEWIKAVYERRCNLTDEDTRGRAFGIFKKGNIDDPKNYRFINVTNSHYKIFMKYLNSVIVDQIEHRIPKEQIANKKGRSCLDGIIINRLIQKKTVHGQQIAQTWLDMQKAYDSLDHKKLLIVLENLGIHRDFIEIIKKAMRCWKFTVINGKETYMNNEKKKKKPTVIHVNRGIYQGDSLSPTLFVCSLIPLSWMLNQQPRINLEDPNTEANVVTTMNDDEVEDEGLYNHLLFMDDIKLFSINAKCLNEMTKICEKYGLEIGLKINPLKSSYSINQGEQAEEPLINFEELSTVYKYLGIYENHKTADEKANLQELYKVVDEKLKLILESPITVGNMIDAINTCLMPKILYVFSHERSELIKRKIYLDMDLRIRKALNTYGVKFQNLSNARIYLPRSRFGLGLKSTETEIDKIQLKNFIHIKYSEVFRKMNETFKMMENDIIIIASKYNINMSFEEGLPCINGTIGSEKEAKKKISELVDNFAYKRWAEHYTRKKEFPKFVINNKLICPWLRTLNIEPRKFKTITMTQDDMHPMLNPIFDKESKCVLETNSVKCNHYDNIRHVGSYCEHSVSWRRRRHDNVLHTITNVLLRKLKQKMVDLNNYKKCYKIDDNTELRIDQLNYTSESLVHNKPDIIYETKDKIIIGELAISHYRNLEESAKLKIQRYTVNGTLQLNAPVENLEYSTNFTAVLAKQKGKPVSFYPLICGPFGELDGPRLDHWVAFLDEFNISEKETIKPVIERITRKAAIETEYILFQYIKLKEKKLKENNDEQNDMEL

SEQ ID NO: 18714 - protein, 1088 aa, Strongyloides papillosus
MQKLQKSAKISNNRDSKEDSQEMRKSIKEMNPKERYDYFSKDRGKIFRFDVKPWMPTFEIDLLIEKKLRPLTQVWSKTKITDIESKKTWRQASKIMIIATKVLKSYDTRKVDYDGTSVEDVIKVSAALRRTERFDQRIQKMLEQTKSPQKNIKNHAQAYLRKVEKKFKGKVKTIEQVRFFTKSKISTLKKRVAYLNEKKRRDRIRMRFRSKPSLKSLVDTTPLDIEIDKSEIEKYLIDLFSKKDCEVPEPESLLNKWVEYSKNTTSIDEDSKPNFNEEIFNECLKWSRSWKAPGTNKLYMKIFKVLNSCKIFLMEWIKAVYERRCNLTDEDTRGRAFGIFKKGNIDDPKNYRFINVTNSHYKIFMKYLNSVIVDQIEHRIPKEQIANKKGRSCLDGIIINRLIQKKTVHGQQIAQTWLDMQKAYDSLDHKKLLIVLENLGIHRDFIEIIKKAMRCWKFTVINGKETYMNNEKKKKKPTVIHVNRGIYQGDSLSPTLFVCSLIPLSWMLNQQPRINLEDPNTEANVVTTMNDDEVEDEGLYNHLLFMDDIKLFSINAKCLNEMTKICEKYGLEIGLKINPLKSSYSINQGEQAEEPLINFEELSTVYKYLGIYENHKTADEKANLQELYKVVDEKLKLILESPITVGNMIDAINTCLMPKILYVFSHERSELIKRKIYLDMDLRIRKALNTYGVKFQNLSNARIYLPRSRFGLGLKSTETEIDKIQLKNFIHIKYSEVFRKMNETFKMMENDIIIIASKYNINMSFEEGLPCINGTIGSEKEAKKKISELVDNFAYKRWAEHYTRKKEFPKFVINNKLICPWLRTLNIEPRKFKTITMTQDDMHPMLNPIFDKESKCVLETNSVKCNHYDNIRHVGSYCEHSVSWRRRRHDNVLHTITNVLLRKLKQKMVDLNNYKKCYKIDDNTELRIDQLNYTSESLVHNKPDIIYETKDKIIIGELAISHYRNLEESAKLKIQRYTVNGTLQLNAPVENLEYSTNFTAVLAKQKGKPVSFYPLICGPFGELDGPRLDHWVAFLDEFNISEKETIKPVIERITRKAAIETEYILFQYIKLKEKKLKENNDEQNDMEL

SEQ ID NO: 18715 - protein, 928 aa, Propylea japonica
MPMSPPNSQDIADAGTSGFTTSNQTTSANEQRESVGLRPFQKLVESNLDALTDVLSSINPESADHSVTSALLHLLKRVIRGKNEPTLREINDIYSLIIEALRGSRAEGPRGKRAEKHKKPSANTKSKVAGKKNKKKYIYAHSQDLFKNSPATLAKYVLENVEFHEDKAMEVDLDVVRKTYEGLWGSPHEDEGIADLYKRDSGTGGNIDVGVMDFASVSKRIGSMKDGARGLDGIGKGHLTSKTSKEILTLFFNLVTFTGLLPDAWGDNRTCLLLKKGKEPNSIKSYRPITISSMLERAYWGLVDQQLRSKLTFFCRQKGFVKENGCFSNINTLHELIYSAKQNKKDLIAVFLDLSSAFDLVPHAAVGHALRRKGLSEATINLILKSYENQRTSIRTSKGNIKINVKRGVKQGDPLSPLIFNLIIEPLLVMLAELRGCRVSEESVSCIAFADDLTVVAENRKDVEALVHQIEKFIEKLGMTISSSKSKCFHISPTKDSFRMTDPLITTLKGERIPCIDADECVEYLGAKIFPWSDHLRPSVQAELHAVMKRVRQLKLKPHQKIHLLATHIIPHFMHSLIVQPPSLTSIKELDRQIRVVIKDILHQEQSRSDCSIYASTKDGGLGFPRLEWIVPCSALKNGINFIGSSDPLIKSLTLSSKLETRLKKLANGIRLNWPCSVRDVERHKVLLKKRNLDDWSSQRFQGRAVGTFTGDAIGNHWLKSPTLLKPSRYITALRMRTNQVGLRVPMSLTRNIQDINCRKCHHQPETLGHVIGLCTYTKPARLRRHDDILNFIIEESARVNPNYLLTKEPTLRVGDRCFKPDLVMKNQERVLVVDLTVRLEDGHYLEDARREKIQKYTPLLQHLQKEEKLNKGMVVPIVVGSRGGMPKSTIGDLKELGIKSFNKLLTISLMALRSSVEIYHSFIDYDG

SEQ ID NO: 18716 - protein, 1247 aa, Nyctibius grandis
MALPIRMWFVSVATQTCLWDFQREVVKPKRVPIKPVEVELNFEELEFINSENVEKIKQYPSADQDILALLPEVYETPAKIGNLIREPPDDTDNEVEDESVSPSNNNGSLTPILSKNNDLTTSVGTPVVKVPDKSPSCPYCNDRIANISGLVAHLKKHHGKKKIRFQCVNCGRMNIKYQSIACHFPKCKKKDEVASAGGYACEECNRTFNTKIGLGQHKRLAHPAIRNIERIKASHPKENSARGAHKKCWSDDEVELLKKLEIQFAGCKNINKLIAEHLTSKTAKQISDKRRALAKKVVDDDGLHHELREKLIIDGEHLVNNGSVRTEGIVACYHERITELLELKRLPILRSIFERLIEGGEDPKNLVNEASDECCPFIRTSELDAIQSKKARDIRSQASRDGRSSRPPRNWMKRRAKKRGQYLRFQDLYYKDRGKLAGIILDNIESMKCEIPLDEVHAVFKSRWESADKFKSLGAFQTFGQADNSAFKAMITEKEISKNIKEMSKKSAPGPDGVSLRDLSLLDPECSQLMELFNLWLATGVIPDMAKESRSILIPKSSLPERLKDINNWRPITIGSSILRLFSRILTARLTKACPINPRQRGFIRSAGCAENLKLLQILVRHAKREHRQLGVVFVDIAKAFDTVSHSHIIAALKQRGVDDHIIALIKNMYENVNTYIDMKDKQSEPIKISIGVKQGDPMSPLLFNLSIDPLICKLEDEGCGFKHQSSNVTAMAFADDLVLLSDSWEGMMKNVEILEVFCDLTGLKTQGEKCHGFYIKPTKDAYTINDCLPWKINGSPINMIDPGESEKYLGVQIDPWVGIKKSDLKAKLEGWLDKIQNTALKPLQKVNILRVYTLPRIIYLADQTDVKTSYLESLDLSIRSAVKDWLHLPSSTCDAIIYSNLCDGGLGLIRLTSLIPSIQARRLHRLAQSSDAVIRTIVKSEHIEKDYEKLWITAGGDVDKIPSIWDPAAFMVLQEVGDDDERSEWELLTSKTVYPRPFNWRKQEFKNWTQLQSQGHGVAIFEGDSISNKWIEFNKGIPHRKLLTALQLRANVYPTREFLARGKQDSRIKSCRHCQAETESCAHIIGYCPAVQKARIKRHNQICNVLSEEAKKKDWITFQEPLIRDEKGQLFKPDLIFVKDNVAYVIDVTVRFESKISILKDAAAEKVNKYKHLTNQVMDLTNATSIKFVGFPLGARGKWYEPNFDLLVNLGLSKTRRTRVAMRLSNMALFTSVDIVHTFTGMASVT

SEQ ID NO: 18717 - protein, 1019 aa, Ancistrocerus nigricornis
MPRMQNEVPAGTSNQHSSSSSPPPPSPPPAPHPAVLAFPCQHCSLSFTSKVGLGVHMNSKHPVVWDQMKARTDIKARWSEEERLLLARKEAELISNQPTRFMNKALVPFFPQRTLESIKKARQRADYRNMVDRFVGETQATDTSNPMAESSSNVSLIPSDLNCPFVEFFRSLDPLDEPSYSAPVLQNIINRIQETTKSDILILLSAYLLEIFPPPKALYKPKPEVPTHRTGNKRQQRRREYAVTLINFKKHQSRCIHSILDEPNNATLPSRDVMEPYWRAIFEESCDLAPPTTHRKTVLESIWVPVTVEELSNNRLKLSTSPGPDGVTSRQLRAIPLGILVRIINIILFCEQLPEHHRTARTVFIPKKSGATEPGEFRPITVPYILARQIHTILARRLLAASDLDPRQRAFCPTDGCSDNITLMDMLLRDHHQRYASCYMATLDVGKAFDSVSHSTIFETLEAYGAPVGFIKYIKNLYRNGCTRFVGNGWVSDKICPKRGVKQGDPLSPGLFILIIDRLLRSLPKEIGAYIDTSKINALAFADDLVLLAATPAGLQKLIDCTNDFLASCGMHINGAKSVTCSIKGQPKQKNSLVEKRTFFVSGRAVPAIDRSQEWRYLGINFSPSGKCKFLPSADLLPKLERLTKAPLKPQQRLHALRTVVVPQLYHKATLGHITIGSLNKADRIIRSAAKKWLSLPSDTPTPFFHAPVEHGGLGVPALRVQAPYLRYKRLMNLKLPNLDDNLVANTFVARELDKATLWLHLGNQVLITPDLISAYWASKLHQSVDGSGLREAQKYKQAHRWIREPTRLMTGRDFVNCVRLRINALPSKSRTTRGRAELDRYCRAGCQTSETTNHIVQQCHRTHGARIARHDAITAYIDRSLCQRGYTTIRESRIETRAHGLQKPDIVAILDTKALIIDSQIVTDGRPLNEAHMHKISKYDHEDLKQAIRQRHKVREVRVMSATINWRGIWSKTSVDALLDAGVIGHRDTAILSTRAMIGSINCLRIFNTSTTVRRGIG

SEQ ID NO: 18718 - protein, 1122 aa, Dreissena rostriformis
MTTRLVQTTLTGTPAEVRCKCGKICKNLRGLRIHQARSACGQKASQKQRTSLILGETQEDTSQEATHRTRDLSADEMPSDSTQISDESQIDPLLELLQTQDDPEPVKEVPHKTPPATPEEEKRPRIEWPKTSNKKAWTDFDHELDLILEATLQGAVERKLVAMTSLIYTVGKERYGVYVPKHSKPSSQPNRRERQIQAIRQELKKLRKAYRNAKDEEKLGLQELRDLQRKQLRELRKAETARKNRRKRAQQRTAFIANPYKFSKKLLDKEKSGILNSSMEEIQTHLRDTHSDTRRDDPLGPCAHIMPEPAPTIALDSKEPTLAEVKDVVKKARAGSAPGPNGIPYKVYKMCPRLLRRLWRLSKVVWRKGQVPECWQKAEGLFVPKETNSHNISQFRTISLLNVEGKIFFAVLARRLTTYLTANKYVDTSIQKGGVPGFSGCVEHTSALSQLIREAKVNQQDLTVVWLDLANAYGSIPHQLIRRALDHYHIPAHVQKIVLGYLDNIQLRFSVREKITEWQRLEKGIITGCTVSVVLFVMGMNLILNAAKKETRGPKTASGIYLPSNRSFMDDLTITTQTHVQARWVLSALESSTSWARMKFKPKKSRSLIIKKGQSTKKFNLQIQGEDIPSIMDSPIKCLGKWYDASLNDTNNVKRIKGQLNEGLKQIDRSWLPGKFKAWLFQHGLLPRLMWPLMLYEIATSTVEGLERTISRHLRRWLGVPPSFTNIGLYGRSNQLQLPLSSLVEEFKASKARLVVTLKESRDDKIRKAGIETRTGRKWSASQAVTQAESRLRQKDIVGTTTSGRQGLGISTCPRWSQAASGEKRKMVVDEVRKMEEDERRSRAVAMGLQGAWTKWDTTPRKMTWDQIWKYEPLRISFLLRSVYDLLPSPANLHRWGMQDSPSCQLCNRTGSMEHILSACSTALTQGRYRWRHDQVLREMADILERQRMKKRKQPQPKTIHFVKEGQSAPKGKRTTSSVLDEADNWNMAVDLQKKLVFPEVVQTNLRPDIVIWSNTAKHLVMIELTIPWETRCEEAYERKKTKYSDLMDQCRQKGWRTWLFPVEIGARGFPANSLWKMLGAMGLNGHERRTAVGRLEQSAERASSWLWSRRDERSWKPVTNT

SEQ ID NO: 18719 - protein, 971 aa, Sinonovacula constricta
MQGPADRKLKGMTTLVYTVGRERFGPVITRRQKPQPTPNRRQSRMKQIRGELRSLTKAFRKASQEERMGPQQLRDILRRELHTLRKAENARTARRRKARKRAEFVSNPYKFSKQLFDKERSGQLETSMADIEEHLRQVHSDPERDIPLGACPRLDAVAPPTSPLDCKEPTFLEVKEVVRKARTGSAPGPNKIPYKVYKMCPLLLRRLWNLLKVIWRKGKIPDEWQHAEGIFIPKEKDSKHVSQFRTISLLNVEGKIFFAILARRLTTYLTTNGYVDTSVQKGGVPGFSGCVEHTSAISQLIREAKVNNGDLTVVWLDLANAYGSIPHRLIETALEYYNVPEYIQGMINEYFSGMKLRFMVNDKMTAWQRLEKGIVTGCTISVVLFVMGMNLIINPANAETRGPKASTGLHLPTNRGFMDDLTVTTQTHIQARWVLKALEEAATWARMKFKPKKSRSLIIKRGSVSRRFNLQVQGEDIPSIMDSPIKCLGKWFDASLSDKANIERIRSQLQEGLKQIERSGLPGKYKAWLFQNGLLPRLMWPLMLYEITTTAVECLERTISRHLRRWLGVPPSFTSIGLYGRTNQLQLPLSSLVEEFKVAKPRLVMTLKQSQDGSIRNAGIETRTGRKWSASQAVEQAERRLQHKDIVGITAVGRQGLGNSTTTLWGSAGNTERRSMVQEEVRAAEEEDRRAKAVSMGAQGAWTKWTTTSRKLTWADLWRYEPLRIAFLLRSVYDLLPSPYNLHRWGLQDNPKCHLCDKTGSMEHILSSCTIALTQGRYRWRHDCVLQELADKLERERTKKRTRQKPRLIQFVKEGQKAPKQLQATHSILDESDKWEMSVDLKQKLVFPNIIQTTLRPDIVIWSNKNKCLIMVELTVPWESRCDEAYERKQAKYSELQEQCKQKGWRVWLFPVEIGARGFPAQSLWKMFSALGIKGADRKRAVGALSQTAERASSWLWMKREERSWKPTINT

SEQ ID NO: 18720 - protein, 971 aa, Sinonovacula constricta
MQGPTDRKLKGMTTLVYTVGRERFGPVITRRQKPQPTPNRRQSRMKQIRGELRSLTKAFRKASQEERMGLQQLRDILRRELHTLRKAEDARTARRRKARKRAEFVSNPYKFSKQLFDKERSGQLETSMADIEEHLRQVHSDPERDIPLGACPRLDAVAPPTSPLDCKEPTFLEVKEVVRKARTGSAPGPNKIPYKVYKMCPLLLRRLWNLLKVIWRKGKIPDEWQHAEGIFIPKEKDSKHVSQFRTISLLNVEGKIFFAILARRLTTYLSTNGYVDTSVQKGGVPGFSGCVEHTSAISQLIREAKVNNGDLTVVWLDLANDYGSIPHRLIETALEYYNVPEYIQGMINEYFSGMKLRFMVNDKMTAWQRLEKGIVTGCTISVVLFVMGMNLIINPANAETRGPKTSTGLHLPTNRGFMDDLTVTTQTHIQARWVLKALEEAATWARMKFKPKKSRSLIIKRGSVTRRFNLQVQGEDIPSIMDSPIKCLGKWFDASLSDKANIERIRSQLQEGLKQIERSGLPGKYKAWLFQNGLLPRLMWPLMLYEITTTAVECLERTISRHLRRWLGVPPSFASIGLYGRTNQLQLPLSSLVEEFKVAKTRLVMTLKQSQDGSIRNAGIETRTGRKWSASQAVEQAERRLQHKDIVGITAVGRQGLGNSTTTLWGSAGNTERRSMVQEEIRAAEEEDRRAKAVSMGAQGAWTKWTTTSRKLTWADLWRYEPLRIAFLLRSVYDLLPSPYNLHRWGLQDNPKCHLCDKTGSMEHILSSCTIALTQGRYRWRHDCVLQELADKLERERTKKRTRQKPRLIQFVKEGQKAPKQLQATHSILDESDKWEMSVDLKQKLVFPNIIQTTLRPDIVIWSNKNKCLIMVELTVPWESRCDEAYERKQAKYSELQEQCKQKGWRVWLFPVEIGARGFPAQSLWKMFSALGIKGADRKRAVGALSQTAERASSWLWMKREERSWKPTINT

SEQ ID NO: 18721 - protein, 971 aa, Sinonovacula constricta
MQGPTDRKLKGMTTLVYMVGRERFGPVITRRQKPQPTPNRRQSRMKQIRGELRSLTKAFRKASQEERMGLQQLRDILRRELHTLRKAENARTARRRKARKRAEFVSNPYKFSKQLFDKERSGQLETSMADIEEHLRQVHSDPERDIPLGACPRLDAVAPPTSPLDCKEPTFLEVKEVVRKARTGSAPGPNKIPYKVYKMCPLLLRRLWNLLKVIWRKGKIPDEWQHAEGIFIPKEKDSKHVSQFRTISLLNVEGKIFFAILARRLTTYLTTNGYVDTSVQKGGVPGFSGCVEHTSAISQLIREAKVNNGDLTVVWLDLANAYGSIPHRLIETALEYYNVPEYIQGMINEYFSGMKLRFMVNDKMTAWQRLEKGIVTGCTISVVLFVMGMNLIINPANAETRGPKTSTGLHLPTNRGFMDDLTVTTQTHIQARWVLKALEEAATWARMKFKPKKSRSLIIKRGSVTRRFNLQVQGEDIPSIMDSPIKCLGKWFDASLSDKANIERIRSQLQEGLKQIERSGLPGKYKAWLFQNGLLPRLMWPLMLYEITTTAVECLERTISRHLRRWLGVPPSFTSIGLYGRTNQLQLPLSSLVEEFKVAKTRLVMTLKQSQDGSIRNAGIETRTGRKWSASQAVEQAERRLQHKDIVGITAVGRQGLGNSTTTLWGSAGNTERRSMVQEEIRAAEEEDRRAKAVSMGAQGAWTKWTTTSRKLTWADLWRYEPLRIAFLLRSVYDLLPSPYNLHRWGLQDNPKCHLCDKTGSMEHILSSCTIALTQGRYRWRHDCVLQELADKLERERTKKRTRQKPCLIQFVKEGQKAPKQLQATHSILDESDKWEMSVDLKQKLVFPNIIQTTLRPDIVIWSNKNKCLIMVELTVPWESRCDEAYERKQAKYSELQEQCKQKGWRVWLFPVEIGARGFPAQSLWKMFSALGIKGADRKRAVGALSQTAERASSWLWMKREERSWKPTINT

SEQ ID NO: 18722 - protein, 971 aa, Sinonovacula constricta
MQGPADRKLKGMITLVYTVGRERFGPVITRRQKPQPTPNRRQSRMKQIRGELRSLTKAFRKASQEERMGLQQLRDILRRELHTLRKAENARTARRRKARKRAEFVSNPYKFSKQLFDKERSGQLETSMADIEEHLRQVHSDPERDIPLGACPRLDAVAPPTSPLDCKEPTFLEVKEVVRKARTGSAPGPNKIPYKVYKMCPLLLRRLWNLLKVIWRKGKIPDEWQHAEGIFIPKEKDSKHVSQFRTISLLNVEGKIFFAILARRLTTYLTTNGYVDTSVQKGGVPGFSGCVEHTSAISQLIREAKVNNGDLTVVWLDLANAYGSIPHRLIETSLEYYNVPEYIQGMINEYFSGMKLRFMVNDKMTAWQRLEKGIVTGCTISVVLFVMGMNLIINPANAETRGPKTSTGLHLPTNRGFMDDLTVTTQTHIQARWVLKALEEAATWARMKFKPKKSRSLIIKRGSVSRRFNLQVQGEDIPSIMDSPIKCLGKWFDASLSDKANIERIRSQLQEGLKQIERSGLPGKYKAWLFQNGLLPRLMWPLMLYEITTTAVECLERTISRHLRRWLGVPPSFTSIGLYGRTNQLQLPLSSLVEEFKVAKTRLVMTLKQSQDGSIRNAGIETRTGRKWSASQAVEQAERRLQHKDIVVITAVGRQGLGNSTTTLWGSAGNTERRSMVQEEVRAAEEEDRRAKAVSMGAQGAWTKWTTTSRKLTWADLWRYEPLRIAFLLRSVYDLLPSPYNLHRWGLQDNPKCHLCDKTGSMEHILSSCTIALTQGRYRWRHDCVLQELADKLERERTKKRTRQKPRLIQFVKEGQKAPKQLQATHSILDESDKWEMSVDLKQKLVFPNIIQTTLRPDIVIWSNKNKCLIMVELTVPWESRCDEAYERKQAKYSELQEQCKQKGWRVWLFSVEIGARGFPAQSLWKMFSALGIKGADRKRAVGALSQTAERASSWLWMKREKRSWKPTINT

SEQ ID NO: 18723 - protein, 971 aa, Sinonovacula constricta
MQGPADRKLKGMTTLVYTVGRERFGPVITRRQKPQPTPNRRQSRMKQIRGELRSLTKAFRKASQEERMGLQQLRDILRRELHTLRKAENARTARRRKARKRAEFVSNPYKFSKQLFDKERSGQLETSMADIEEHLRQVHSDPERDIPLGACPRLDAVAPPTSPLDCKEPTFLEVKEVVRKARTGSAPGPNKIPYKVYKMCPLLLRRLWNLLKVIWRKGKIPDEWQHAEGIFIPKEKDSKHVSQFRTISLLNVEGKIFFAILARRLTTYLTTNGYVDTSVQKGGVPGFSGCVEHTSAISQLIREAKVNNGDLTVVWLDLANAYGSIPHRLIETALEYYNVPEYIQGMINEYFSGMKLRFMVNDKMTAWQRLEKGIVTGCTISVVLFVMGMNLIINPANAETRGPKTSTGLHLPTNRGFMDDLTVTTQTHIQARWVLKALEEAATWARMKFKPKKSRSLIIKRGSVTRRFNLQVQGEDIPSIMDSPIKCLGKWFDASLSDKANIERIRSQLQEGLKQIERSGLPGKYKAWLFQNGLLPRLMWPLMLYEITTTAVECLERTISRHLRRWLGVPPSFTSIGLYGRTNQLQLPLSSLVEEFKVAKTRLVMTLKQSQDGSIRNAGIETRTGRKWSASQAVEQAERRLQHKDIVGITAVGRQGLGNSTTTLWGSAGNTERRSMVQEEVRAAEEEDRRAKAVSMGAQGAWTKWTTTSRKLTWADLWRYEPLRIAFLLRSVYDLLPSPYNLHRWGLQDNPKCHLCDKTGSMEHILSSCTIALTQGRYRWRHDCVLQELADKLERERTKKRTRQKPRLIQFVKEGQKAPKQLQATHSIMDESDKWEMSVDLKQKLVFPNIIQTTLRPDIVIWSNKNKCLIMVELTVPWESRCDEAYERKQAKYSELQEQCKQKGWRVWLFPVEIGARGFPAQSLWKMFSALGIKGADRKRAVGALSQRAERASSWLWMKREERSWKPTINT

SEQ ID NO: 18724 - protein, 971 aa, Cyclina sinensis
MQGPADRKLKGMTTLVYTVGRERFGPVITRRQKPQPTPNRRQSRMKQIRGELRSLTKAFRKASQEERMGLQQLRDILRRELHTLRKAENARTARRRKARKRAEFVSNPYKFSKQLFDKERSGQLETSMADIEEHLRQVYSDPERDIPLGACPRLDAVAPPTSPLDCKEPTFLEVKEVVRKARTGSAPGPNKIPYKVYKMCPLLLRRLWNLLKVIWRKGKIPDEWQHAEGIFIPKEKDSKHVSQFRTISLLNVEGKIFFAILARRLTTYLTTNGYVDTSVQKGGVPGFSGCVEHTSAISQLIREAKVNNGDLTVVWLDLANAYGSIPHRLIETALEYYNVPEYIQGMINEYFSGMKLRFMVNDKMTAWQRLEKGIVTGCTISVVLFVMGMNLIINPANAETRGPKTSTGLHLPTNRGFMDDLTVTTQTHIQARWVLKALEEAATWARMKFKPKKSRSLIIKRGSVTRRFNLQVQGEDIPSIMDSPIKCLGKWFDASLSDKANIERIRSQLQEGLKQIERSGLPGKYKAWLFQNGLLPRLMWPLMLYEITTTAVECLERTISRHLRRWLGVPPSFTSIGLYGRTNQLQLPLSSLVEEFKVAKTRLVMTLKQSQDGSIRNAGIETRTGRKWSASQAVEQAERRLQHKDIVGITAVGRQGLGNSTTTLWGSAGNTERRSMVQEEVRAAEEEDRRAKAVSMGAQGAWTKWTTTSRKLTWADLWRYEPLRIAFLLRSVYDLLPSPYNLHRWGLQDNPKCHLCDKTGSMEHILSSCTIALTQGRYRWRHDCVLQELADKLERERTKKRTRQKPRLIQFVKEGQKAPKQLQATHSILDESDKWEMSVDLKQKLVFPNIIQTTLRPDIVIWSNKNKCLIMVELTVPWESRCDEAYERKQAKYSELQEQCKQKGWRVWLFPVEIGARGFPAQSLWKMFSALGIKGADRKRAVGALSQTAERASSWLWMKREERSWKPTINT

SEQ ID NO: 18725 - protein, 971 aa, Sinonovacula constricta
MQGPADRTLKGMTTLVYTVGRERFGPVITRRQKPQPTPNRRQSRMKQIRGELRSLTKAFRKASQEERMGLQQLRDILRRELHTLRKAENARTARRRKARKRAEFVSNPYKFSKQLFDKERSGQLETSMADIEEHLRQVHSDPERDIPLGACPRLDAVAPPTSPLDCKEPTFLEVKEVVRKARTGSAPGPNKIPYKVYKMCPLLLRRLWNLLKVIWRKGKIPDEWQHAEGIFIPKEKDSKHVSQFRTISLLNVEGKIFFAILARRLTTYLTTNGYVDTSVQKGGVPGFSGCVEHTSAISQLIREAKVNNGDLTVVWLDLANAYGSIPHRLIETALEYYNVPEYIQGMINEYFSGMKLRFMVNDKMTAWQRLEKGIVTGCTISVVLFVIGMNLIINPANAETRGPKTSTGLHLLTNRGFMDDLTVTTQTHIQARWVLKALEEAATWARMKFKPKKSRSLIIKRGSVTRRFNLQVQGEDIPSIMDSPIKCLGKWFDASLSDKANIERIRSQLQEGLKQIERSGLPGKYKAWLFQNGLLPRLMWPLMLYEITTTAVECLERTISRHLRRWLGVPPSFTSIGLYGRTNQLQLPLSSLVEEFKVAKTRLVMTLKQSQDGSIRNAGIETRTGRKWSASQAVEQAERRLQHKDIVGITAVGRQGLGNSTTTLWGSAGNTERRSMVQEEIRAAEEEDRRAKAVSMGAQGAWTKWTTTSRKLTWADLWRYEPLRIAFLLRSVYDLLPSPYNLHRWGLQDNPKCHLCDKTGSMEHILSSCTIALTQGRYRWRHDCVLQELADKLERERTKKRTRQKPRLIQFVKEGQKAPKQLQATHSILDESDKWEMSVDLKQKLVFPNIIQTTLRPDIVIWSNKNKCLIMVELTVPWESRCDEAYERKQAKYSELQEQCKQKGWRVWLFPVEIGARGFPAQSLWKMFSALGIKGADRKRAVGALSQTAERASSWLWMKREERSWKPTINT

SEQ ID NO: 18726 - protein, 971 aa, Sinonovacula constricta
MQGPADRKLKGMTTLVYTVGRERFGPVITRRQKPQPTPNRRQSRMKQIRGELRSLTKAFRKASQEERMGLQQLRDILRRELHTLRKAENARTARRRKARKRAEFVSNPYKFSKQLFDKERSGQLETSMADIEEHLRQVHSDPERDIPLGACPRLDAVAPPTSPLDCKKPTFLEVKEVVRKARTGSAPGPNKIPYKVYKMCPLLLRRLWNLLKVIWRKGKIPDEWQHAEGIFIPKEKDSKHVSQFRTISLLNVEGKIFFAILARRLTTYLTTNGYVDTSVQKGGVPGFSGCVEHTSAISQLIREAKVNNGDLTVVWLDLANAYGSIPHRLIETALEYYNVPEYIQGMINEYFSGMKLRFMVNDKMTAWQRLEKGIVTGCTISVVLFVMGMNLIINPANAETRGPKTSTGLHLPTNRGFMDDLTVTTQTHIQARWVLKALEEAATWARMKFKPKKSRSLIIKRGSVTRRFNLQVQGEDIPSIMDSPIKCLGKWFDASLSDKANIERIRSQLQEGLKQIERSGLPGKYKAWLFQNGLLPRLMWPLMLYEITTTAVECLERTISRHLRRWLGVPPSFTSIGLYGRTNQLQLPLSSLVEEFKVAKTRLVMTLKQSQDGSIRNAGIETRTGRKWSASQAVEQAERRLQHKDIVGITAVGRQGLGNSTTTLWGSAGNTERRSMVQEEVRAAEEEDRRAKAVSMGAQGAWTKWTTTSRKLTWADLWRYEPLRIAFLLRSVYDLLPSPYNLHRWGLQDNPKCHLCDKTGSMEHILSSCTIALTQGRYRWRHDCVLQELADKLERERTKKRTRQKPRLIQFVKEGQKAPKQLQATHSILDESDKWEMSVDLKQKLVFPNIIQTTLRPDIVIWSNKNKCLIMVELTVPWESRCDEAYERKQAKYSELQEQCKQKGWRVWLFPVEIGARGFPAQSLWKMFSALGIKGADRKRAVGALSQTAERASSWLWMKREERSWKPTINT

SEQ ID NO: 18727 - protein, 1036 aa, Dreissena rostriformis
MTDEKDPLLELLGEEEPTEQIHDLPQPKANQAPLEQRQPIDWPKTTDKRAWNDIDKELDAILTSTMQGPVDRKLKCMTTLVYTVAKERFGTKKTRRPKPQQTPNRRQSRIKQIRGELKSLNKAYKKASQEERLGLQELRDILRRELQTLRKAENARTARRRRARKRAEFVSNPYKFSKQLLDKERSGQLETSMADIEEHLRQVHSDPDREIPLGDCPRLEPVAPPTSPLEGKEPSLLEVKEVVRKARTGSAPGPNKIPYKVYKMCPLLLRRLWNLLKVIWRKGIIPDEWLHAEGIFAPKEKNSKHISQFRTISLLNVEGKIFFAILARRLTTYLTTNGYIDTTVQKGGVPGFSGCVEHTSAISQLIREAKVNKSDLTVVWLDLANAYGSIPHKLIESALQYYHIPKHIQGMINAYFSGMKLRFMVGEKMTSWQRLEKGIVTGCTISVVLFVMGMNLIINPANKETRGPKTSTGLHLPTNRGFMDDLTVTTQTHIQARWVLKALEEAATWARMNFKPKKSRSLVIKSGSVTKRFTLQVQGEDIPSIMDSPIKCLGKWFDSSLSDKANVERIRSQLQEGLKQIDKSALPGKFKAWLFQNALLPRLMWPLMLYEIPTSSVECLERTISRHLRRWLGVPPSFTSIGLYGRSNQLQLPLSSLVEEFKVAKTRLVVTLKQSQDSSIRNAGIETRTGRKWSASQAVEQAEKILQQKDIVGITAVGRQGLGSSKVTLWSSAGNMERRRMVQDEVRAAEEEDRRAKAVAMGVQGAWTKWTTTERKLTWADIWSYEPLRIAFLLRSVYDLLPSPSNLHRWGLQDHPKCQLCDKTGTMEHILSLCTTALTQGRYRWRHDSVLQELADKLERERTKKRPRKKPQMIQFVKEGQKAPKILQPTSSVLDESDQWEMSVDLKQKLVFPNIIQTTLRPDIVLWSNKDKCLIMVELTVPWESRCEEAFERKKAKYTYLQEQCREKGWRVWLYPVEIGTRGFPAQSLWRMFSALGIKGADRKRAVGKLSLAAERASSWLWMKREERSWKPTTNT

SEQ ID NO: 18728 - protein, 971 aa, Sinonovacula constricta
MQGPADRKLKGMTTLVYTVGRERFGPVITRRQKPQPTPNRRQSRMKQIRGELRSLTKAFRKASQEERMGLQQLRDILRRELHTLRKAENARTARRRKARKRAEFVSNPYKFSKQLFDKERSGQLETSMADIEEHLRQVHSDPERDIPLGACPRLDAVAPPTSPLDCKEPTFLEVKEVVRKARTGSAPGPNKIPYKVYKMCPLLLRRLWNLLKVIWRKGKIPDEWQHAEGIFIPKEKDSKHVSQFRTISLLNVEGKIFFAILARRLTTYLTTNGYVDTSVQKGGVPGFSGCVEHTSAISQLIREAKVNNGDLTVVWLDLANAYGSIPHRLIETALEYYNVPEYIHGMINEYFSGMKLRFMVNDKMTAWQRLEKGIVTGCTISVVLFVMGMNLIINPANAETRGPKTSTGLHLPTNRGFMDDLTVTTQTHIQARWVLKALEEAATWARMKFKPKKSRSLIIKRGSVTRRFNLQVQGEDIPSIMDSPIKCLGKWFDASLSDKANIERIRSQLQEGLKQIERSGLPGKYKAWLFQNGLLPRLMWPLMLYEITTTAVECLERTISRHLRRWLGVPPSFTSIGLYGRTNQLQLPLSSLVEEFKVAKTRLVMTLKQSQDGSIRNAGIETRTGRKWSASQAVEQAERRLQHKDIVGITAVGRQGLGNSTTTLWGSAGNTERRSMVQEEVRAAEEEDRRAKAVSMGAQGAWTKWTTTSRKLTWADLWRYEPLRIAFLLRSVYDLLPSPYNLHRWGLQDNPKCHLCDKTGSMEHILSSCTIALTQGRYRWRHDCVLQELADKLERERTKKRTRQKPRLIQFVKEGQKAPKQLQATHSILDESDKWEMSVDLKQKLVFPNIIQTTLRPDIVIWSNKDKCLIMVELTVPWESRCDEAYERKQAKYSELQEQCKQKGWRVWLFPVEIGARGFPAQSLWKMFSALGIKGADRKRAVGALSQTAERASSWLWMKREERSWKPTINT

SEQ ID NO: 18729 - protein, 971 aa, Sinonovacula constricta
MQGPADRKLKGMTTLVYTVGRERFGPVITRRQKPQPTPNRRQSRMKQIRGELRSLTKAFRKASQEERMGLQQLRDILRRELHTLRKAENARTARRRKARKRAEFVSNPYKFSKQLFDKERSGQLETSMADIEEHLRQVHSDPERDIPLGACPRLDAVAPPTSPLDCKEPTFLEVKEVVRKARTGSAPGPNKIPYKVYKMCPLLLRRLWNLLKVIWRKGKIPDEWQHAEGIFIPKEKDSKHVSQFRTISLLNVEGKIFFAILARRLTTYLTTNGYVDTSVQKGGVPGFSGCVEHTSAISQLIREAKVNNGDLTVVWLDLANAYGSIPHRLIETALEYYNVPEYIQGMINEYFSGMKLRFMVNDKMTAWQRLEKGIVTGCTISVVLFVMGMNLIINPANAETRGPKTSTGLHLPTNRGFMDDLTVTTQTHIQARWVLKALEEAATWARMKFKPKKSRSLIIKRGSVTRRFNLQVQGEDIPSIMDSPIKCLGKWFDASLSDKANIERIRSQLQEGLKQIERSGLPGKYKAWLFQNGLLPRLMWPLMLYEITTTAVECLERTISRHLRRWLGVPPSFTSIGLYGRTNQLQLPLSSLVEEFKVAKTRLVMTLKQSQDGSIRNAGIETRTGRKWSASQAVEQAERRLQHKDIVGITAVGRQGLGNSTTTLWGSAGNTERRSMVQEEVRAAEEEDRRAKAVSMGAQGAWTKWTTTSRKLTWADLWRYEPLRIAFLLRSVYDLLPSPYNLHRWGLQDNPKCHLCDKTGSMEHILSSCTIALTQGRYRWRHDCVLQELADKLERERTKKRTRQKPRLIQFVKEGQKAPKQLQATHSILDESDKWEMSVDLKQKLVFPNIIQTTLRPDIVIWSNKNKCLIMVELTVPWESRCDEAYERKQAKYSELQEQCKQKGWRVWLFPVEIGARGFPAQSLWKMFSALGIKGADRKRAVGALSQTAERASSWLWMKREERSWKPTINT

SEQ ID NO: 18730 - protein, 844 aa, Dreissena rostriformis
MEEIQQHLKDTHSDPARDNPLGSCPRIEPVSEPTTALNIKEPTMKEVSDVVKKARSGSAPGPNGIPYKVYKMCPMLLRRLWTLLKVIWRKGKVPDCWKQAEGIFTPKEKGSKHVTEFRTISLLNVEGKIFFAVLARRMTTFLTTNQYIDTSVQKGGVPGFSGCMEHTSAISQIIREAKVNDKDLTVVWLDLANAYGSIPHKLIEEAMKHYHIPEHIQGILNGYFDGIQLRFSIGDQTTPWQRLEKGIVTGCTISVVLFVMGMNLIINAAKRETRGPKTASGIHLPSSRGFMDDLTITTTTHVQARWILTALEDTVTWARMKFKPKKSRSLIIKKGKVTKRFTLQVQGEDIPSIIDSPVKCLGKWYDASLKDTNNISRVKNQLQDGLKLIDQTGLPGKFKAWLYQHGLLPRLMWPLMLYEIATTTVEGFERVINRHLRRWLGVPPSFTSIGLYGRTNQLQLPMTSLVEEFKVAKGRLVVTLKESSDDLIWKAGIETRTGRKWSASQAVAQAESRLRHKDIVGTTAVGRQGLGSTKPQRWSTAGKKERSQMVQHEIRLSEEEDRRARAVGMGGQCAWTQWQTTERHLTWADIWHYEPLRLKFLLRSVYDLLPSPVNLHRWGLVEDPKCQLCDKPGTMQHTLSSCQTALTQGRYRWRHDRVLKELADILERERRKTRPTNKKVSPAIKFVKEGQTAKKARTAATAILDESERWEMKVDLGKQLVFPDIVHTTQRPDIVIWSPKDKKLVMIELTVPWETRCDEAYERKMGKYTELQEQCRQRGWSAWLFPVEIGCRGFPAQSVWRMLSNLGIKGGDRKRAVGRLGQAAERASNWLWMMREEKSWTLNH

SEQ ID NO: 18731 - protein, 1079 aa, Dreissena rostriformis
MGRPTLLIHLTTTTRLVQSTLTGTKAEVKCRCGKVCKNLRGLRIHQGRTACGSTARQRQRSDFTSGETLEDPSQDSTHSTGDLYAAEEPRTNSADPDIVSQVSDIFEEDDPLLELLGTPEDLRPNTDAQHNTRNTASNTNATAQKVRIAWPKTSDSSLWKQFDEDLNTILATTLQGPVEKKLKSLTNLVYSIGKERFGEVKRKPTRTPAQPNRRQRQITEIRKELKSLRISYRKANAEERPGLQQLREDLRQKLTDLRKAEQLRDKRKKRDKRRAEFIANPYKFSKGLLDKEKSGKLESSMEEIQQHLKDTHSDPARDNPLGSCPRIEPVSEPTTALNIKEPTMKEVSDVVKKARSGSAPGPNGIPYKVYKMCPMLLRRLWTLLKVIWRKGKVPDCWKQAEGIFTPKEKGSKHVTEFRTISLLNVEGKIFFAVLARRMTTFLTTNQYIDTSVQKGGVPGFSGCMEHTSAISQIIREAKVNDKDLTVVWLDLANAYGSIPHKLIEEAMKHYHIPEHIQGILNGYFDGIQLRFSIGDQTTPWQRLEKGIVTGCTISVVLFVMGMNLIINAAKRETRGPKTASGIHLPSSRGFMDDLTITTTTHVQARWILTALEDTVTWARMKFKPKKSRSLIIKKGKVTKRFTLQVQGEDIPSIIDSPVKCLGKWYDASLKDTNNISRVKNQLQDGLKLIDQTGLPGKFKAWLYQHGLLPRLMWPLMLYEIATTTVEGFERVINRHLRRWLGVPPSFTSIGLYGRTNQLQLPMTSLVEEFKVAKGRLVVTLKESSDDLIWKAGIETRTGRKWSASQAVAQAESRLRHKDIVGTTAVGRQGLGSTKPQRWSTASKKERSQMVQHEIRLSEEEDRRARAVGMGGQCAWTQWQTTERHLTWADIWHYEPLRLKFLLRSVYDLLPSPVNLHRWGLVEDPKCQLCDKPGTMQHTLSSCQTALTQGRYRWRHDRVLKELADILERERRKTRPTNKKVSPAIKFVKEGQTAEKARTAATAILDESERWEMKVDLGKQLVFPDIVHTTQRPDIVIWSPKDKKLVMIELTVPWETRCDEAYERKMGKYTELQEQCIQRG

SEQ ID NO: 18732 - protein, 1127 aa, Dreissena rostriformis
MTTRLVQRTLTGEVAVVKCGKCDKICKNLRGLRIHQAKTDCGKSDTQTQRSGDTPGETLEDPSREEPHRTRNLYASENLVSNTQGRQQEEDDHDPLLDLLPPLDDDTPDHAEPAPQARTAPGDDEKRRPRIAWPKTTDRRAWQELDRDVSAILETTLQGPADRKIRAMTGLIYTVSKERFGLAEKKPEKPAPIISRRQRLIKQTRKELTSVKRQYRKAKEEEKVGLQQLRSTLREKLSTLSKAEQTRQRKRKRERQRARFIQNPYQFSKDILDKERSGTVESSMEDIEQHLRNVHSDPSREVPLGDCSRLEPEDPPETPLDTKEPSLSEVQHVVKKARTGSAPGPNGIPYRVYKMCPGILRKLWSLLRVIWRKGKIPDCWKRAEGIFAPKEKDSKDIGQFRTISLLNVEGKIFFAVLAKRLTTFLTDNNYVDTSIQKGGVPGFSGCVEHTSVLSQVIREARVNHDDLTVVWLDLDNAYGSIPHKLIEKSLEQYHVPEHVCNLVKDYYSGIKLRFAVGDQTTAWQSLEKGIVTGCTISVVLFVMGMNLIINAAKRETRGPKAATGIYLPPAKGFMDDLTLTTKTHIQARWMLSALEEAATWARMRFKPRKSRALVIRNGQPTKKFNLTVQGEDIPSIMDSPIKCLGKWYDATLQDGNNIKRIKNQLTEGLKQIDKSGLPGKFKAWLFQNGLLPRLMWPLMLYEVAITAVEGLERTISRHLRKWLGVPPSFSNIGLYGRSNQLQLPLSSLVEEYKVAKARLVMTLKDSRDDMVRGAGVETRTGRKWSASQAVAQAESRLRHKDIVGTTAVGTQGLGSAESRSWKKADSRTRREMVQAEVRLAEEEDRGIRAVAMGCQGAWTKWQTTGKKMTWADIWRSEPLRISFLLRSVYDLLPSPANLHRWGKLDDPTCPLCGKIGTLEHTLSSCQKALTQGRYRWRHDKVLQELADIVERERRKKRTVKKTGKMQFVKEGETIKKQQTPAASILDRAQSWEMVVDLKRRLVFPSVVQTTQRPDMVIWSAENKCLVMVELTVPWESRCDEATERKTAKYADLQRECREKGWHTWLFPVEVGVRGFPAKSLWRLFTALGLTGRDRKRAVNRLGDAAERASRWLWQRREERSWQPTTDT

SEQ ID NO: 18733 - protein, 960 aa, Dreissena rostriformis
MTGLIYTVSKERFGLAEKKPEKPAPIISRRQRLIKQTRKELTSVKRQYRKAKEEEKVGLQQLRSTLREKLSTLSKAEQTRQRKRKRERQRARFIQNPYQFSKDILDKERSGTVESSMEDIEQHLRNVHSDPSREVPLGDCSRLEPEDPPETPLDTKEPSLSEVQHVVKKARTGSAPGPNGIPYRVYKMCPGILRKLWSLLRVIWRKGKIPDCWKRAEGIFAPKEKDSKDIGQFRTISLLNVEGKIFFAVLAKRLTTFLTDNNYVDTSIQKGGVPGFSGCVEHTSVLSQVIREARVNHDDLTVVWLDLDNAYGSIPHKLIEKSLEQYHVPEHVCNLVKDYYSGIKLRFAVGDQTTAWQSLEKGIVTGCTISVVLFVMGMNLIINAAKRETRGPKAATGIYLPPAKGFMDDLTLTTKTHIQARWMLSALEEAATWARMRFKPRKSRALVIRNGQPTKKFNLTVQGEDIPSIMDSPIKCLGKWYDATLQDGNNIKRIKNQLTEGLKQIDKSGLPGKFKAWLFQNGLLPRLMWPLMLYEVAITAVEGLERTISRHLRKWLGVPPSFSNIGLYGRSNQLQLPLSSLVEEYKVAKARLVMTLKDSRDDMVRGAGVETRTGRKWSASQAVAQAESRLRHKDIVGTTAVGTQGLGSAESRSWKKADSRTRREMVQAEVRLAEEEDRGIRAVAMGCQGAWTKWQTTGKKMTWADIWRSEPLRISFLLRSVYDLLPSPANLHRWGKLDDPTCPLCGKIGTLEHTLSSCQKALTQGRYRWRHDKVLQELADIVERERRKKRTVKKTGKMQFVKEGETIKKQQTPAASILDRAQSWEMVVDLKRRLVFPSVVQTTQRPDMVIWSAENKCLVMVELTVPWESRCDEATERKTAKYADLQRECREKGWHTWLFPVEVGVRGFPAKSLWRLFTALGLTGRDRKRAVNRLGDAAERASRWLWLRREERSWQPTSDT

SEQ ID NO: 18734 - protein, 1086 aa, Dreissena rostriformis
MTTRLVQRTLTGEVAVVKCGKCDKICKNLRGLRIHQAKTDCGKSDTQTQRSGDTPGETLEDPSREEPHRTRNLYASENLVSNTQGRQQEEDDHDPLLDLLPPLDDDTPDHAEPAPQARTAPGDDEKRRPRIAWPKTTDRRAWQELDRDVSAILETTLQGPADRKIRAMTGLIYTVSKERFGLAEKKPEKPAPIISRRQRLIKQTRKELTSVKRQYRKAKEEEKVGLQQLRSTLREKLSTLSKAEQTRQRKRKRERQRARFIQNPYQFSKDILDKERSGTVESSMGDIEQHLRNVQSDPSREVPLGDCSRLEPEDPPETPLDTKEPSLSEVQHVVKKARTGSAPGPNGIPYRVYKMCPGILRKLWSLLRVIWRKGKIPDCWKRAEGIFAPKEKDSKDISQFRTISLLNVEGKIFFAVLAKRLTTFLTDNNYVDTSIQKGGVPGFSGCVEHTSVLSQVIREARVNHDDLTVVWLDLDNAYGSIPHKLIEKSLEQYHVPEHVCNLVKDYYRGIKLRFAVGDQTTAWQSLEKGIVTGCTISVVLFVMGMNLIINAAKRETRGPKAATGIYLPPAKGFMDDLTLTTKTHIQARWMLSALEEAATWSRMRFKPRKSRALVIRNGQPTKKFNLTVQGEDIPSIMDSPIKCLGKWYDATLQDGNNIKRIKNQLTEGLKQIDRSGLPGKFKAWLFQNGLLPRLMWPLMLYEVATTAVEGLERTISRHLRKWLGVPPSFSNIGLYGRSNQLQLPLSSLVEEYKVAKVRLVMTLKESRDDMVRGAGVETRTERKWSASQAVAQAESRLRHKDIVGTTAVGTQGLGSAESRSWKKADSRTRREMVQAEVRLAEEEDRGIRAVAMGCQGAWTKWQTTGKKMTWADIWRSEPLRISFLLRSVYDLLPSPANLHRWGKLDDPTCPLCGKIGTLEHTLSSCQTALTQGRYRWRHDKVLQELADIVERERRKKRTVKKIGRMQFVKEGETIKKQQTPAASILDRARSWEMVVDLKQRLVFPSVVQTTQRPDMVIWSAEEKCLVMVELTVPWESRCDEAMERKTAKYADLQRECREKGWHTWLFPVEVGARGFPAKSLWRFFTA

SEQ ID NO: 18735 - protein, 1127 aa, Dreissena rostriformis
MTTRLVQRTLTGEVAVVKCGKCDKICKNLRGLRIHQAKTDCGKSDTQTQRSGDTPGETLEDPSREEPHRTRNLYASENLVSNTQGRQQEEDDHDPLLDLLPPLDDDTPDHAEPAPQARTAPGDDEKRRPRIAWPKTTDRRAWQELDRDVSAILETTLQGPADRKIRAMTGLIYTVSKERFGLAEKKPEKPAPIISRRQRLIKQTRKELTSVKRQYRKAKEEEKVGLQQLRSTLREKLSTLSKAEQTRQRKRKRERQRARFIQNPYQFSKDILDKERSGTVESSMEDIEQHLRNVHSDPSREVPLGDCSRLEPEDPPETPLDTKEPSLSEVQHVVKKARTGSAPGPNGIPYRVYKMCPGILRKLWSLLRVIWRKGKIPDCWKRAEGIFAPKEKDSKDIGQFRTISLLNVEGKIFFAVLAKRLTTFLTDNNYVDTSIQKGGVPGFSGCVEHTSVLSQVIREARVNHDDLTVVWLDLDNAYGSIPHKLIEKSLEQYHVPEHVCNLVKDYYSGIKLRFAVGDQTTAWQSLEKGIVTGCTISVVLFVMGMNLIINAAKRETRGPKAATGIYLPPAKGFMDDLTLTTKTHIQARWMLSALEEAATWARMRFKPRKSRALVIRNGQPTKKFNLTVQGEDIPSIMDSPIKCLGKWYDATLQDGNNIKRIKNQLTEGLKQIDKSGLPGKFKAWLFQNGLLPRLMWPLMLYEVAITAVEGLERTISRHLRKWLGVPPSFSNIGLYGRSNQLQLPLSSLVEEYKVAKARLVMTLKDSRDDMVRGAGVETRTGRKWSASQAVAQAESRLRHKDIVGTTAVGTQGLGSAESRSWKKADSRTRREMVQAEVRLAEEEDRGIRAVAMGCQGAWTKWQTTGKKMTWADIWRSEPLRISFLLRSVYDLLPSPANLHRWGKLDDPTCPLCGKIGTLEHTLSSCQKALTQGRYRWRHDKVLQELADIVERERRKKRTVKKTGKMQFVKEGETIKKQQTPAASILDRAQSWEMVVDLKRKLVFPSVVQTTQRPDMVIWSAENKCLVMVELTVPWESRCEEAMERKTAKYADLQRQCKEKGWHTWLFPVEVGVRGFPAKSLWRLFTALGLTGRDRKRAVNRLGDAAERASRWLWLRREERSWQPTTDT

SEQ ID NO: 18736 - protein, 1001 aa, Pseudomyrmex elongatus
MNSNNPGPSGSRGPVSQGQLPSSSVAQPPAEFACEFPGCSRRFGTKTGRGLHHRRAHPDWYDAQQRIEPAKTRWNEEESMLMARKEVELIKQNTKFINQALVLAFPNRSLESIKGKRKQPAYKQLIESLLMESSEEPSEENENIELEDIPQYKQDIIAYLHELPVPEENVLHAQRLCRICDSLSSSSPEEVFAELSLYLNDTFPPKSRKIGQPMAPKNSDTVIPKKVARRAEYARTQDLWRKNRSKCLRMLLSDIKEVNYPPKDIMVPFWNQVMTTGEDTSSGKNGLCPIIHDLWAPIKPKEVKKALPANTTASGPDGLTAKQLKKIPASILCRIFNIILWCGKAPVHLLESVTILILKKSKACEPADFRPITISSVLLRTFHKVLAVRMAREIELDQRQKAFVPMDGCSENIFLLDLLLRYHHKAHKQLFIASLDVAKAFDSLAHRTISETLEVSGVPEPMIDYIMDIYSKSSTRLYCDSWTSDRITPTCGVKQGDPMSPIIFNMMIDRMLKRLPVDIGARVGGMVVNAAAFADDLLLFASTPIGLQRLLDVSADFLGKCGLRVSAAKCLTVALRNVPHEKKTVIDRETIFLCQGRVLPSLKRTDEWHYLGVPFTPDGRARVCTVAKLQDAILKLSKAPLKPQQRLFALRTMVVPSVYHQLELGSINISMLRKCDGVLRHAVRTWLGLPSDVPNAYIHTDVKDGGLGILSLRWNAPVRRLERLQKLPLAQHPTGDPPGAFWVAEVKRCEERLKENQVILRNLGQVRDRWSAQLYQRVDGKGLKDAAKVHRQHDWIHDGTRFLSGRDYLQSCKLRINALPTKSRLSRGRVQDRLCRAGCRCSETLNHVIQQCHRTHAARISRHNAVAAYVERRLEKQDYVVHVEPHIDTPEGLRKPDLVAIRGSEALVIDAQIVNDQINLNDAHKRKVEYYTRIKRQIGEKYKVSNISITSITLSWRGLWSGKSAAELIRHGVIQAGSLKVISSRAIIGGVAAQCDFCPVL

SEQ ID NO: 18737 - protein, 864 aa, Pseudomyrmex cubaensis
MELEDIPQYKQDIIAYLHELPVPEDNILNAQRLCRICDSLSSSSPEEVFAELSLYLNDTFPPKSRKIGQPMAPKNSDIVIPKKVARRAEYARTQDLWRKNRSKCLRMLLSDIKEVDYPPKDIMVPFWNQVMTTGEDTSPGKNGLCPVIHDLWAPIKPKEVKKALPANTTASGPDGLTAKQLKKIPASILCRIFNIILWCGKAPVHLLESVTILIPKKSKACEPADFRPITVSSVLLRTFHKVLAVRMAREIELDQRQKAFVPVDGCSENIFLLDLLLRYHHKAHKQLFIASLDVAKAFDSLAHRTISETLEVSGVPEPMIDYIMDIYSKSSTRLYCDSWTSDRITPTCGVKQGDPMSPIIFNMVIDRMLKRLPVDIGARIGGMVVNAAAFADDLLLFASTPIGLQRLLDVSADFLGKCGLRVSAAKCLTVALRNVPHEKKTVIDRETIFLCQGRVLPSLKRTDEWHYLGVPFTPDGRARVCTVAKLQDAILKLSKAPLKPQQRLFALRTMVVPSVYHQLELGSINISMLRKCDGVLRHAVRTWLGLPSDVPNAYIHTDVKDGGLGIPSLRWNAPVRRLERLQKLPLAQHPTGDPPGAFWVAEAKRCEERLKENQVILRNLGQVRDRWSAQLYQRVDGKGLKDAAKVQRQHDWIHDGTRFLSGRDYLQSCKLRINALPTKSRLSRGRVQDRLCRAGCRCPETLNHVIQQCHRTHAARISRHNAVAAYVERGLVKQDYVVHVEPHIDTPEGLRKPDLVAIRGNEALVIDAQIVNDQINLNDAHKRKVEYYTRIKRQIGEKYKVSNISITFITLSWRGLWSGKSAAELIRHGVIQAGSLKVISSRAIIGGVAAFNMFNRTTTWRKRN

SEQ ID NO: 18738 - protein, 925 aa, Pseudomyrmex pallidus
MLLARKEAELIKQNTKFITQALVLAFPNRSLESIKGKRKQPAYKLLVESLLMETTEAPENIELEDMPQYKQNIIAYLQGLPVPEDNIFNAQRLCSICDSLSSSSLEEVFAGLSLYLNDTFPPKTRKIGQSRAPKNSDIVIPKKVARRAEYARTQDLWRKNRSKCLRMLLSDIKEVDYPPKDIMFPFWNQVMTTGEDTSPGKNGTCPVIHDLWAPIKPMEVKKALPANTTASGPDGLTARQLKKIPANILCRIFNIILWCGRAPVHLLESITILIPKKSRACEPADFRPITVSSVLLRTFHKVLAVRMAREIELDQRQKAFVPVDGCSENIFMLDLLLRYHHKAHKQLFIASLDIAKAFDSLAHRTISETLEVSGVPEPMINYIMDIYSRSSTRLYCDSWTSDRITPTCGVKQGDPMSPIIFNMVIDRMLKRLPVDIGARVGGMVVNAAAFADDLLLFASTPIGLQRLLDVSADFLGKCGLRVSAAKCLTVALRNVPHEKKTVIDRETVFLCQGRVLPSLKRTDEWRYLGVPFTADGRAKVGTVAKLQDAILKLTGAPLKPQQRLFALRTMVVPGVYHQVELGSINISMLRKCDKVLRHAVRTWLGLPSDVPNAYIHADVRDGGLGIPSLRWNAPVRRLERLQRLPLAQHPAGDPPSAFWVAEIKRCEERLKENQVILRSFGQVKDRWSAQLYQRVDGKGLKDAAKVQRQHDWIHDGTRFLSGRDYLQSCKLRINALPTKSRLSRGRVQDRLCRAGCRCPETLNHVIQQCHRTHSARISRHNAVAAYVERRLVKQDYVVHVEPHIDTPEGLRKPDLVAIRGDEVLVIDAQVVNDQINLNDAHKRKVEYYTRIKRQIREKYKISNIVITSITLSWRGLWSGKSAAELIRHGVIQAGSLKVISSRAIIGGVAAFNMFNRTTTTRRKRN

SEQ ID NO: 18739 - protein, 825 aa, Tenebrio molitor
MENFVDKKQRKITKKFKENDSQLCQKAQTKLSDGDIRGALNMLTSQDMIAPRNEATIQALQKKHPPPRKYNSTTVFQHKSDNNMSSVTSLEATKAIASFPNGSAGGLDAIQPQHLKDLTSDVLGQNKVNLTTSLRNLGTLLLNGEVPSSICPILYGANLCALEKKDGGIRPIAVGSTIRRLISKIVCRRIADKLGSKFRPHQLGFGTKGGIEAAIHSARRYLQYLHQSTKVLLKIDFLNAFNMLDREAILKKVNEEIPEFYNFLNQCYQKPSNLYYGSTVILSQRGVQQGDPLGPPLFCLGIQSMLNSLCSELNIWYMDDGTLISDQENVFQDLESIISKSKDIGLELNFSKCELAVTSNDTEERNKILEQFNFIAPGIKLLKQENTYILGCPLYDTGLSKVLEKRTSELDNMTTRMCHLPSHMAFYLMQRAFSIPKMNHLLRCTPCWRSKLELKQYDNVLRQSVSKICNVNLENDNSWIQAILPIKLGGLGLRDVNKLCYPAFLGSWNSSNQLSSLILPNSISQLNDSANEEAILNWSLITNMKPLEIPTAYDQKIWDEKIHNICRKILLDRMSTDKDQARLLALQEKESGAWLHALPSTNLGTLLDNQCFRISICLRLGIPMCVPHPCVCGEIVDKLGHHGLSCYRSAGRRARHEMINDLVKRALTSAEIPSIREPNGYYRKDNKRPDGITLIPWLCGKPLLWDVTCTDTLAKSYIELSSKKAGEAARLRENEKKSKYVTVETYNNYHFVPIAIETLGPWGDDAKKIINEIGQKIQKITNESRSTSYLSQRISIAVQRGNAASVLGIIEDSSNDKLEEIFYNL

SEQ ID NO: 18740 - protein, 1692 aa, Dufourea novaeangliae
MSAVKIIIEYPFPDEFRCPECYELNHGKRTGGVFKSHSDLIKHAKKFHPGHTLEHRCGVCDEIGRGGYPLKQIKVHHAAVHVQVQASPNLSPDGGPRATRTSASSVVGSRASGRGGIDRFITRPATNAETAAGNGRVPETVTVDDSHHLQPSKTTRPRAAATKEAAATPSTTTIPPATSTAASGATTTTTSPATTSTVKTTKPTAPTKTSTTLTRPRRTATATATGKPPPPVPTTVTLAVRPRTVPKKPPAAGGTPPTPPAASSTLTTGPCTRSRRSSSVPVEIRPNISRTKTTTVTRPGPVKRTSLATTGEPKPAAVTPPPIAAGTTRRSPAFNPILRPTPPGTRKMAASPTYAAVTAASVTRASQDNGRAPARRSGLRSSGRATSLPPETSGGNRSPPTRETRDPANLKTIQEEAAIPEKDARVPPTLPVTLTTTTITTTSSGGPIMSPCIQGGAATPGATTTSPDAAPRLPRVVEVEVVGPSLAATLKAIFPPIVLPRQEEGVRTPQQHQERPRPSEKLPVDDRRILPPLPAPTRPRPPPATAQAIRSDRRSGDRPSLSPRSPGSDPRQSPRSPAGSQNNNDNFNNSGGLKLDNRFNILAETNSTPFIAGAPQTCSTEGRDHNNSKNKVREGFFNKSRGVGSGRGVRPPRNSPGRKGAGSGARVNPGLTARPAGVIRPNTRSGRSLAPEQRQPMAVEQALHRRPHTRQRAEEQRSVERDLLIGLAEAAVSYEDLEEVVIKIAAFLQGSGVRAVSGGNSGAGRSNAGAEQRGSGSGHGRGSRDRIDRPAPQQHQRNQRPETALLDRGDLVREATKIQRLYRTNRRRAVQGVLLGPSQHCQVPKERVQEHFRDMHASTGTSGERPPPPQYGAPDELSTEALIQPFAVSEVDRRLRRTSKSAPGPDGLTYDDLRRADPGCRVLTAIFNACIRLELIPTIWKTSNTVLVHKKGDRGDLSNWRPLAMDDTTPKLFAAVLADRLLAWAVRNERLSRSQKGFLPCEGCYEHNFVLQEVLNDARRSGRQVVVAWLDLTNAFGSVPHAAIYRALEEAGVPPALQNIVESMYDGCTTRVRTAEGYTDPIGFNSGVRQGCPLSPVAFNLALEPVVRVAIETGVGYSLHGQRHSILAYADDLALISDSTEGMKTLLKKVEAAAAGIGLRFNPAKCATLHQDCRATRGANPTRFTLQNEEIRSLAAGESYEHLGVPTGFQIRQTPIRSVEELIRDLRSVDESLLTPWQKAETVATFILPRLDFLLRGAHVEKGPLKQVDKLVKRMAKSWLHLPQRASAEVVFLPPSRGGLGLLPLADMVDVLTIAHSFRLLTADDEVVRTLAWATLRCVVARKIGREPSNHDIAEYLSGSLEGEFARDGGDISSLWTRTRNATRRSKGVLAADWKWCEARKELGVTMRGTRERDTTVTPESRSQIIHRLRMALIESYSLKLARKPDQGKVYRASSRTTASNHFLRGGGFLRFADWRFIHRARLSVLPLRGAIRWGDGDKWCRRCGEPLESLPHVICHCRPHSAAWQLRHDAVVDRVARACRLPGTIKTNRSVEGVDGELGALRPDIVVRDETTKTIMIVDVTVPFENTDIALEQARARKIIKYKPLADELHGQGYSVVVSAIVVGALGTWDPGNEPVLRLLGVSSRYANLMRRLIVSGTIKWSRDIYVEHVSGVRQYATRGSAPAEGAGPLV

SEQ ID NO: 18741 - protein, 1661 aa, Tenthredo notha
MNNSNDNNNNNANIDILIEFPFPEEFRCPFCYEQNHGRKTGGVFKGHGELVKHAKKYHPASRVIKKCAACCFVGEGVYALKLVKQHHAKQHPPVDPAPRAPRTATTARASGANVTSCDRSSITVSNLTDTSSRGRLDNFILNRLPGPGRGTASISTGLPPATRSRRTAATTAAAATPSPRAAARCGDITILSPAAETTTSTPTTSQVSIPTPTPEVPRPDMATPTTTGSSPSSPRETLPSFYAGPTTRSRRASSVPVGDRPAAHRNTISRRVAVPRPAAATVRKIAPASTKGRSPVTTPSPTVTGSTRRPSTTTTLRPIPPGPKRTSSSPTYAAVTAAGTSRSTQAARGPTTTRPGLRSTTRAASLPPEAAETRRSPATRESRGPRVLPTITEDLWTPVSGLSCPLTLPETPTTTTITTTTSGRPIMSSRLYRAGQEETRAATPPPAAPTLLPVAIVGVAGPSRATPGAETPTTPWQAATRRARRPHQSGPRSSGGSSSEEEPPSPPRAPPRTRLSPTTAQARRSKESNSNNTPNSSRHGLGAGPRESAGSDNNTFNIRQDSTYNRFNLLANNNTIAFSTGTPGTCSAREPGHGEDDDTVRVGFLNQSRGVGSRGGRGTRRGASGSGGGGGASASSGRAARPASSHGSAAVSRHPPAPERRPPTAVNQALRGRQNARPRAEEELPTTRDSLIDMAEAAVTIEDLEETATQVAAFFQSSGEAVGVLRSRVNGGRGGRGGGRRGGERGRGSGYRRDRQQPQHQRQQQPRPALPGRGDRVEEATRIQKLFRANRRRAVQEVLLGPSQHCQVPRERIQAHFEDMYAPSAPLGAQPPPPPYGPPDDASNDALTRPFAVSEVDQRLRRTSNSAPGPDGLTYDDLRRADPECRLLAALFNTCLRLERVPSGWKESNTVLVHKKGDRDDLSNWRPLALGDTTPKLFAALLADRLLTWSIRNKRLSNSQKGFLPCEGCYEHNFVLQEVLNDARRGGRQVVVAWLDLTNAFGSIPHAAIYRALEEAGAPSALQNIVESMYENCTTRVRTADGLTEPIKIQSGVKQGCPMSPVAFNLALEPVLRAVGDSPAGYTLHGHRHQILAYADDLALISDSTEGMGDLLRKVEAAAGGIGLRFNPAKCATLHQDCRGARRVLPTRFTLQGEEMRTLAAGEPYQHLGVPTGFQVRQTPLLTIDDLLRDLRAVDGSLLTPWQRAETVATFLVPRLEFLLRGALVEKGPLKEADKLIRKTVKSWLHLPQRASAELVYLPPSRGGCGLLPLADMADALSIAHAYRLLTVDDPVVRALAWASLRHAVAKKIGRAPSNEDLATYLSGSLEGEFARDGGDISSLWTRARNATRRSKDKIAAKWRWSEIREELVVTMRGSSERETTVSPESRGQVIRRLRAAVTEYYSTRLKRKPDQGKVFQVSARSNVSNHFLRGGSFTRFADWRFIHRARLDVLPLNGARRWGDGDKRCRRCGEPLESLPHVLCHCRPHSAAWQLRHDAVLKRIAKACRLPGEMRVNRRVEGVDGELGALRPDIVVRHEPSKSVVIVDITVPFENNYLAFEEARARKILKYKPLADELYRHGYRVTVSAIVVGALGSWDPANEPVLKQLRISSKYARLMRRLIVSETIRWGRDIYVEHVSGVRQYRVDDELPADDPGPPPDQRP

SEQ ID NO: 18742 - protein, 1824 aa, Lasioglossum morio
MARPTSSPITIIIEFPFPGEFRCPECYGKPGTRTSGVYKTHNDLVKHAKKCHPGHIVVHRCGVCGEHGTGAFPLRYVKAHHLAAHTDGPRPSRCGRGGAYVIPLTTAAPTTVRSSLSTTSTNFSGRGRPESILRDASGAGPTVVPTIATTTTATTTTTTTTASGLRPPAVTTATSGGAPPPSTSPAAAPTTRAAATSTTTTTSTTTTRPTSSSLRQQRLPFGPATAGRGATTGTVTVTRTRQTPPTTATATSRAKAVVATSRTSTTPPPASATLRAGPRTAAAPTASLRKSTTPPPPPATTRTRTTASRTSTTPPPSTATARTRTATAAASKASVRKSTTPPPPPPPTRRRTAAARTSTTPPPSSATSRTKQAAAAAPRAPLRKSTTPPPPPATSRTRKATTAAKVATRELPSPPTTTATATTTTRRGGVTGKSLETVSGSTPPGSRAAPAANKRAGSGAVQRASPSPPARRSTPSSPPTQSNNGPARRTRGSTVSPRTKAPPTSPRGPITRSRGASVPVELESTKKRTAALNATRRKTAPTSGSKRSPRGVGKRDGPCAPTNPSNPTLHPDSSPRLFTSVIRTAASPTYAAVTAGATVVTAAPPGDQTEVRRLRSMTRASSLPPESPIATPSSPTLNTILRALSTSPCSPPTTLGEQEGARGCCVVSCVALATLTTTTVTTTVSGGSIMTSRPLAGGGERGAKRAWPVPAIPSLPPIEEVTVSPGPARTASSPSPPAIEEREEEGGEEDDSPLPWQSAASRRRRRQLRVLSLSPTSPSVSLSPSRSSYPETSPQEARTSPRRPSTEDVRTPEPQRRPPARAQRPPTPPPAPAATRATRGVTNITITATTTTTAAPRTRVQPPSSRQQRRGAQRGTTAGDGRSSRPVSSRAPGGAARVDRSRDLRDLLFRMGGYASRFRSMGGNNPGSSRPSGSTTGAAVPAGRTNAPPGVVRVPTTPQLPRDSGHRRPTPVDQPNPRPRASLRREQAALATERGLLIDLAEAVDNTQDLEEVATQIAAFFKRFGSQPAGVGGRTGGRPTTNARERGRVVNTPVTGPSGRHEGVTPRGTDQVREATRIQRLFRQNRRRAVQEVLMGAPAQCQVPKDQVTEHFRNMYSPASTPPASGPLGFPSEAPTASSDAALVQPFGVSEVDRRLRRMSNSSPGPDGLSYRDLRKADPSCSILTAYFNMIRRLESVPSSWKSSNTVLIHKKGDRMDLSNWRPLAMSDTTPKLFAAVLADRLVSWALQNGRLSPQQKGFLPCEGCYEHNYTLQEILNDARRGKSQVVVAWLDLSNAFGSIPHSTIYHAFAEAQVPLPFRNIVEGLYDGCTTRVRTSQGFTDPVPILSGVKQGCPLSPVAFNLALEPVLRAASGTSVGYTLHGRRYNILAYADDLVLIADTPGGMDTLLNTVEAAAGGVGLRFNPAKCATLHQDSRGSRRAVPTCFSLQGQGLKSLAAGVPYEHLGVPTGFQVKQTPLLSIEELIRDLHAVDRSLLAPWQKCETVGSFILPRLDFLLRGAHVEKGPLKVADKLVRKLAKSWLNLPERASAEVVYLPPSRGGCGLLPLADLADALVIGHAYRLLTAPDPAISGLARDSLREAVARKIGRPPTDQDLATYLSGSLEGEFARTSWDFSTLWSRARNAARRSSESLRLRWEWCAARQELGIRLRGSRGRTTVVTPVARSQVLHRLRSAVTEYYSHRLDSKPDQGKVFGVSSRTKVYNHFLRGGSFTRFADWRFVHRARLNVLPLNGARRWGEGDKRCRRCGENMETLPHVMCHCRPHSAAWQLRHDAVVSRIARACRLPGTLSLAMRPRCFPSISQLYT

SEQ ID NO: 18743 - protein, 943 aa, Rhagoletis zephyria
MMPAGQSGGSSQDPAQPSTSASTTSPTVHLSQPVQLFACPWCDYTTPSKKGLSTHTGYRHKALKRAHARSAASQGTPPTSTGQSSASPSDASRVTDVLHRCGMCSFATPHRVGLNQHIGRMHPPSSTAASAPLAPLNETESPLAELLSKLKQCRPLIVIPPKRSRFPLAAKLLEIMEDIALVNTAEAWRRLLLFGFKTLHLDASQGDKIQQIKKLVADFDATSPVPTVRPSRPQRTTSDQSIANAAERRLKVFADVTGAVRILTSDEKLVSPSVPGALEEMLEKHPPARANDDLSELPQADDSANFQRSSVEEVYSRLKSFRKGVAGGLDGITPVHLVTLIDSSSTLRSRLLRALARICDIIIEGRVPEEIRDALFGAWLIAQTKKSGGLRPIAIGSIFRRLATKIVLRRVQERLGDLLRPKQLGYGTRPGCEAAVHSTRSYLASVPKCTTVKVDFKNAFNSHLRQPMLLAVHEHVPELYRLASYAYGRPTPLFFGDHRVESASGCQQGDPAAPLLFSLVLQPLLLRLKSNLVVAYLDDLTLSDPDPSVLADDLRTIREASLSIGLEMNFSKCEVFHQGYPLGAEPDLSAELPGSRECNRVNLELLGAAIFRDGNSRLIENLDHRLTKMHSRLPLLSSQSAYFLLRNSLGIQRVTYFLRSSPAFMCLDHLKNLDSTLLRCAESCLNMALDRTSEQMRLPVRAGGLGLRHPSDLALPCFLSSAHACEEIVHEAVGPTTEVALLSTASVAWCARYDDTPEDDEKCLQQAWDKISVAKAQSLLRSSLDDDAAARIRLAHAAGPQSGAWLHVRPDENLGTVLQDSEFRVACSLRLGLDLFCSHLCSCGETADAKGYHKLSCKNGAVYREARHNAVNDVLTRAIRQLGIAVRVEPQHLHSNDEIRPDGVTLTPWSVGKSLVWDVSIRNTYAASYAGLARTVGGVAAKA

SEQ ID NO: 18744 - protein, 1005 aa, Globodera ellingtonae
MSRQEAELSNLRKQIGWVSDELRRRQRGVQPTTRQSRNFEKIQRHLQVEGKPSRETHDLESQREKLASRLAMVQKRVKAQIERKERARLQSLPVGRRLSKPLGESQLEPEQARAYWAAIIGERKQFERRPELEEWTSRTMSKVLSVQPFADQSADQIVWKGVLRKARPLKAPGPDGIPNLLWKRLPSAGQALFKWLMGIKSRQLEIPAWLTDGRVVLLPKDGDPSDPGNYRPIACLNTMYKLVTGMITAWVTDHLTRYSILPIEQRAMVKGTWGCTHATVIDRVLTSFAQATKTPLHVCFVDFAKAFDSVSQPWVRHTLRAVKLHPRIRQLICELMQSWTVRYEVFRSGVIHRSTSLQVKNGLLQGDTLSPLLFCLSVAAVSTAVGNLGQFEVDIPGRGVMLKTNHLLYMDDFKGYAYSAESLTELAMLLKQTSRAIGLAINAKKCAVVNTVGVSAIAAGPDSSGLPALGAHETYKYLGVEERISLSFGCAWQRVKGVMVERVKTLLRTEPTFGELRSSIASTVAPVARYLFLNVISGGIRWTQVFSEANALDKDIRSLLRERTDAQVGWRFKYCNVERLYLSSRFGGLGLVSVLDTLFESIIYSWAYVQCRPELEVARELFGSVERRARGGISNSVSKGARKVLERFGFLSESNAQRVTMVDPNSSLPGFRVGETLCEDPTQGARLIVRNIQKESDARRLAEWKSKPMGGQVANSSEIDQTLSYLCLRRARIGKRSFRDCVAAQEGQLKAAELMGVSGAMACRRCGEGTETEQHILNGCAWSRTGTMLERHNGVVRQLYSYLCRKYKLPVASHTVPIHAVLENESAKIFYDVPIHTPPVAVSLGRDGMAKHVGLRSNRPDLVVFDKLAKRILVVEIAVSWRSTMAKQERIKYRKYAMNSIIEPVELATREVAGPNLRYELGSAYGKDFTTVDVIPIVVGSCGEVLPNMLSRLAELGVRKNDRRRLLESMQRAALIGSGHVIRVHLCLKRQGGGVQETGQRTGTA

SEQ ID NO: 18745 - protein, 915 aa, Blastobasis adustella
MSLRMQDNPAVSHPVILCSVQARFFKGRRGLNIHIGKVHTINSDIPSSAPLPSSTDLQLDPHSDTPFWKKLSILKRTTPILKRIPRGARLAVAQKLIQDIKNVTRENSAHSWEHLLTFAYRILHVTNNNNNPQKSLTSRIKDNCISPASLDYLTSRPQSSYNIYTHVEAKVSEGDIRGAARILFSTDAVAPDSADTLTALRSKHLQPSAALHLPDDPKSMDAPALVVSADVVLQAIFAFKTGSAGGIDGLTPQHLKDLLGGGCGETGVYLLNELKDLTNLMLSGSVADGITDILYGANLIALNKKGGGVRPIAVGTMYRRLAAKLCCKSATEQLAAYFQPIQLGFGSKGGCEAAVHALRTFLLNQDCEVLLKVDVKNAFNSVDRGALLTQVQSKLPSVYGFLWQCYKESSKLIYRDHLLHSSVGCQQGDPLGPAIFGLAIHPILEKLKSKFNVWYLDDGTLGGEATTVLEDLQLLIREFGSIGLELNLAKCELYIPDTCPDKNTIASLFNTLAPNISFVNKSTLHLLGAPIFDESFSSFVDSKIQNFTAVSDRLQHISTHMAYVILRFCIFVPQFTYVLRCCQLWKHLDLLFRLVSTIKHSLTTFLNLNFDASLPVRFGSLGIRKISSISLPAFLASVHSTCMLVDKILGTSTNACKVAYMTEARNSWTLACPRTEYPSTPSSQKLWDEPLCSLVRDYLVNTSTDPAVRARLLAVGEWESGLWLQSFPSSTIGTLLDSPTFRVATALRLGVPFVARHECSCGHAVSQLGHHGLSCCRSAGRFSRHAELNDIIRRAFTTAGSPAILEPNGLARDDGKRPDGMTLVPWNMGRSLVWDATCVDTLAPSHIPSTSVNAGSAAASAENFKRRKYAGLSGDHLFAPFGVETLGPWGPGAHTLFIDTRYSEAMRPVFWGLFL

SEQ ID NO: 18746 - protein, 962 aa, Blastobasis lacticolella
MLPHVPQNAGQSSSQPPCNFVQCPRCPQVRFFKGRRGLNIHIGKVHTINSDIPSSAPLPSSTDLQFNPHSDTPFWKKISILKRTTPILKRIPRGARLAVAQILIQDIKNVIRENSVHSWEHLLTFAYRILHVPNNNNNHPQKSLTSRIKDNCISPASLDNKITRPQSSYNMYKHVEAKVSEGDIRGAARILFSTDAVAPDSADTLTALHTKHPQPSAAPHIPDNPKSMDAPALVVSAEVVLQAIFAFKTGSAGGIDGLTPQHLKDLLGGGSGETGVCLLNELKDLTNLMLSGSVADGITDILYGANLIALNKKGGGVRPIAVGTTYRRLAAKLCCKSAAEQLAAYFQPIQLGFGSKGGCEAAVHALRTFLINQDCEVLLKVDVKNAFNSVDRGALLTQVQSKLPSVYGFLWQCYKEPSKLIYRDHLLHSSVGCQQGDPLGPAVFGLAIHPILEKLKSKFNVWYLDDGTLSGKATTVLEDLQLLIREFGAIGLELNLAKCELYIPDTCPDKSTIASLFNTLAPNISFVNKSTLHLLGAPIFDESFSPFVDLKIQNFTAVSDRLQHISTHMAYVILRFCLFVPQFTYVLRCCQLWKHPDLLFRLDSTIKQSLTMFLNLNFDDNAWAQARPIRFGGLGIRKISSISLPAFLSSVHSTCMLVDKILGTSTNACEVAYMTEARNSWTLACPSTEYPSTPSSQKLWDEPLCRLVRDNLVNTSTDPAVRARLLAVGEWESGLWLQTLPSSTIGTLLDSPTFRVATALRLGVPFVARHECSCGHAVSQLGHHGLSCCRSAERFSRHAELNDIIRRAFTTDGSPAILEPNGLARDDGKRPDGMTLVPWNMGRSLVWDATCVDTLAPSHIPSTSVNAGSAAASAENFKRRKYAGLSGDHLFAAFGVETLGPWGPGAHTLFKELSKRLVNTSHDQKADQYLGQRISLAIQRGNAASLLGTIPLTRDLGQVFYL

SEQ ID NO: 18747 - protein, 963 aa, Blastobasis lacticolella
MLPHVPQNAGQSSSQPPCNFVQCPRCPQVRFFKGRRGLNIHIGKVHTINSDIPSSAPLPSSTDLQFNPHSDTPFWKKISILKRTTPILKRIPRGARLAVAQILIQDIKNVIRENSVHSWEHLLTFAYRILHVPNNNNTHPQKSLTSRIKDNCISPASLDNKITRPQSSYNMYKHVEAKVSEGDIRGAARILFSTDAVAPDSADTLTALRTKHPQPSAARHIPDNPKSMDAPALVVSAEVVLQAIFAFKTGSAGGIDGLTPQHLKDLLGGSSGETGVCLLNELKDLTNLMLSGSVADGITDILYGANLIALNKKGGGVRPIAVGTTYRRLAAKLCCKSAAEQLAAYFQPIQLGFGSKGGCEAAVHALRTFLINQDCEVLLKVDVKNAFNSVDRGALLTQVQSKLPSVYGFLWQCYKEPSKLIYRDHLLHSSVGCQQGDPLGPAVFGLAIHPILEKLKSKFNVWYLDDGTLSGKATTVLEDLQLLIREFGAIGLELNLAKCELYIPDTCPDKSTIASLFNTLAPNISFVNKSTLHLLGAPIFDESFSPFVDLKIQNFTAVSDRLQHISTHMAYVILRFCLFVPQFTYVLRCCQLWKHPDLLFRLDSTIKQSLTMFLNLNFDDNAWAQASLPIRFGGLGIRKISSISLPAFLSSVHSTCMLVDKILGTSTNACEVAYMTEARNSWSLACPSTEYPSTPSSQKLWDEPLCRLVRDNLVNTSTDPAVRARLLAVGEWESGLWLQTLPSSTIGTLLDSSTFRVATALRLGVPFVARHECSCGHAVSQLGHHGLSCCRSAGRFSRHAELNDIIRRAFTTAGSPAILEPNGLARDDGKRPDGMTLVPWNMGRSLVWDATCVDTLAPSHIPSTSVNAGSAAASAENFKRRKYAGLSGDHPFAPFGVETLGPWGPGAHTLFKELSKRLVNTSHDQKAGQYLGQRISLAIQRGNAASLLGTIPVTRDLGQVFYL

SEQ ID NO: 18748 - protein, 963 aa, Blastobasis lacticolella
MLPHVPQNAGQSSSQPPCNFVQCPRCPQVRFFKGRRGLNIHIGKVHTINSDIPSSAPLPSSTDLQFNPHSDTPFWKKISILKRTTPILKRIPRGARLAVAQILIQDIKNVIRENSVHSWEHLLTFAYRILHVPNNNNTHPQKSLTSRIKDNCISPASLDNKITRPQSSYNMYKHVEAKVSEGDIRGAARILFSTDAVAPDSADTLTALRTKHPQPSAARHIPDNPKSMDAPALVVSAEVVLQAIFAFKTGSAGGIDGLTPQHLKDLLGGSSGETGVCLLNELKDLTNLMLSGSVADGITDILYGANLIALNKKGGGVRPIAVGTTYRRLAAKLCCKSAAEQLAAYFQPIQLGFGSKGGCEAAVHALRTFLINQDCEVLLKVDVKNAFNSVDRGALLTQVQSKLPSVYGFLWQCYKEPSKLIYRDHLLHSSVGCQQGDPLGPAVFGLAIHPILENLKSKFNVWYLDDGTLSGKATTVLEDLQLLIREFSAIGLELNLAKCELFIPDTCPDKSTIASLFNTLAPNISFVNKSTLHLLGAPIFDESFSPFVDLKIQNFTAVSDRLQHISTHMAYVILRFCLFVPQFTYVLRCCQLWKHPDLLLRLDSTIKQSLTMFLNLNFDDNAWAQASLPIRFGGLGIRKISSISLPAFLSSVHSTCMLVDKILGTSTNACEVAYMTEARNSWTLACPSTEYPSTPSSQKLWDEPLCRLVRDNLVNTSTDPAVRARLLAVGEWESGLWLQTLPSSTIGTLLDSSTFRVATALRLGVPFVARHECSCGHAVSQLGHHGLSCCRSAGRFSRHAELNDIIRRAFTTAGSPAILEPNGLARDDGKRPDGMTLVPWNMGRSLVWDATCVDTLAPSHIPSTSVNAGSAAASAENFKRRKYAGLSGDHLFAPFGVETLGPWGPGAHTLFKELSKRLVNTSHDQKAGQYLGQRISLAIQRGNAASLLGTIPVTRDLGQVFYL

SEQ ID NO: 18749 - protein, 963 aa, Blastobasis lacticolella
MLPHVPQNAGQSSSQPPCNFVQCPRCPQVRFFKGRRGLNIHIGKVHTINSDIPSSAPLPSSTDLQFNPHSETPFWKKISILKRTTPILKRIPRGARLAVAQILIQDIKNVIRENSVHSWEHLLTFAYRILHVPNNNNTHPQKSLTSRIKDNCISPASLDNKITRPQSSYNMYKHVEAKVSEGDIRGAARILFSTDAVAPDSADTLTALRTKHPQPSAARHIPDNPKSMDAPALVVSAEVVLQAIFAFKTGSAGGIDGLTPQHLKDLLGGSSGETGVCLLNELNDLTNLMLSGSVADGITDILYGANLIALNKKGGGVRPIAVGTTYRRLAAKLCCKSAAEQLAAYFQPIQLGFGSKGGCEAAVHALRTFLINQDCEVLLKVDVKNAFNSVDRGALLTQVQSKLPSVYGFLWQCYKEPSKLIYRDHLLHSSVGCQQGDPLGPAVFGLAIHLILEKLKSKFNVWYLDDGTLSGKATTVLEDLQLLIREFGAIGLELNLAKCELYIPDTCPDKSTIASLFNTLAPNISFVNKSTLHLLGAPIFDESFSPFVDLKIQNFTAVSDRLQHISTHMAYVILRFCLFVPQFTYVLRCCQLWKHPDLLFRLDSTIKQSLTMFLNLNFDDNTWAQASLPIRFGGLGIRKISSISLPAFLSSVHSTCMLVDKILGTSTNACEVAYMTEARNSWTLACPSTEYPSTPSSQKLWDEPLCRLVRDNLVNTSTDPAVRARLLAVGEWESGLWLQTLPSSTIGTLLDSSTFRVATALRLGVPFVARHECSCGHAVSQLGHHGLSCCRSAGRFSRHAELNDIIRRAFTTAGSPAILEPNGLARDDGKRPDGMTLVPWNMGRSLVWDATCVDTLAPSHIPSTSVNAGSAAASAENFKRRKYAGLSGDHLFAPFGVETLGPWGPGAHTLFKELSKRLVNTSHDQKAGQYLGQRISLAIQRGNAASLLGTIPVTRDLGQVFYL

SEQ ID NO: 18750 - protein, 962 aa, Blastobasis lacticolella
MLPHVPQNAGQSSSQPPCNFVQCPRCPQVRFFKGRRGLNIHIGKVHTINSDIPSSAPLPSSTDLQFNTHSDTPFWKKISILKRTTPILKRIPRGARLAVAQILMQDIKNVTRENSVHSWEHLLTFAYRILHVPNNNNNHPQKYLTSRIKDNCISPASLDNKITRPQSSYNMYKHVEAKVSEGDIRGAARILFSTDAVAPDSADTLTALRTKHPQPSAARHIPDNPKSMDAPALVVSAEVVLQAIFAFKTGSAGGIDGLTPQHLKDLLGGGSGETGVCLLNELKDLTNLMLSGSVADGVTDILYGANLIALNKKGGGVRPIAVGNTYRRLAAKLCCKSAAEQLAAYFQPIQLGFGSKGGCEAAVHALRTFLINQDEVLLKVDVKNAFNSVDRGALLTQVQSKLPSVYGFLWQCYKEPSKLIYRDHLLHSSVGCQQGDPLGPAVFGLAIHPILEKLKSKFNVWYLDDGTLSGKATTVLEDLQLLIREFGAIGLELNLAKCELYIPDTCQDKSTIASLFNTQAPNISFVNKSTLHLLGAPIFDESFSPFVDLKIQNFTAVSDRLQHISTHMAYVILRFCLFVPQFTYVLRCCQLWKHPDLLFRLDSTIKQSLTMFLNLNFDDNAWAQASLPIRFGGLGIRKISSISLPAFLSSVHSTCMLVDKILGTSTNACEVAYMTEARNSWTLACPSTEYPSTPSSQKLWDEPLCRLVRDNLVNTSTDPAVRARLLAVGEWESGLWLQTLPSSTIGTLLDSSTFRVATALRLGVPFVAHHECSCGHAVSQLGHHGLSCCRSAGRFSRHAELNDIIRRAFTTAGSPAILEPNGLARDDGKRPDGMTLVPWNMGRSLVWDATCVDTLAPSHIPSTSVNAGSAAASAENFKRRKYAGLSGDHLFAPFGVETLGPWGPGAHTLFKKLSKRLVNTSHDQKAGQYLGQRISLAIQRGNAASLLGTIPVTRDLGQVFYL

SEQ ID NO: 18751 - protein, 962 aa, Blastobasis lacticolella
MLPHVPQNAGQSSSQPCNFVQCPRCPQVRFFKGRRGLNIHIGKVHTINSDIPSSAPLPSSTYLQFSPHSDTPFWKKISILKRTTPILKRIPRGARLAVAQILIQDIKNVIRENSVHSWEHLLTFAYRILHVPNNNNNHHQKSLTSRIKDNCISPASLDNKITRPQSSYNMYKYVEAKVSEGDIRGAARILFSTDAVAPDSSDTLTALRTKHPQPSAAPHIPDNPKSMDAPALVVSAEVVLQAIFAFKTGSAGGIDGLTPQHLKDLLGGGSGETGVCLLNELKYLTNLLLSGSVADGITDILYGANLIALNKKGGGVRPIAVGTTYRRLAAKLCCKSAAEQLAAYFQPIQLGFGSKGGCEAAVHALRTFLINQDCEVLLKVDVKNAFNSVDRGALLTQVQSKLPSVYGFLWQCYKEPSKLIYRDHLLHSSVGCQQGDPLGPAVFGLAIHPILEKLKSKFNVWYLDDGTLSGKATTVLEDLQLLIREFGAIGLELNLAKCELYIPDTCPDKSTIASLFNTLAPNISFVNKSTLHLLGAPIFDESFSPFVDLKIQNFTAVSDRLQHISTHMAYVILRFCLFVPQFTYVLRCCQLWKHPDLLFRLDSTIKQSLTMFLNLNFDDNAWAQASLPIRFGGLGIRKISSICLPAFLSSVHSTCMLVDKILGTSTNACEVAYMTEARNSWTLACPSTEYPSTPSSQKLWDEPLCRLVRDNLVNTSTDPAVRARLLAVGEWESGLWLQTLPSSTIGTLLDSSTFRVATALRLGVPFMVRHECRCGHAVSQLGHHGLSCCRSAGRFSRHAELNDIIRRAFTTAGSPAILEPNGLARDDGKRPDGMTLVPWNMGRSLVWDATCVDTLAPSHIPSTSVNAGSAAASAENFKRRKYAGLSGDHLFAPFGVETLGPWGPGAHTLFKELSKRLVNTSHDQKAGQYLGQRISLAIQRGNAASLLGTIPVTRNLGQVFYL

SEQ ID NO: 18752 - protein, 1166 aa, Coccinella septempunctata
MQRNTVCSDRKCGWSRNPTYSREARSDPDPTTTTSPKTWKGLQQSLILLISEISGISEFSSGEECESRKAKVIIIIIKAVMTAYYRATNLEADRTFYRRRMREEFLRFYPQLDHLSEQRISDQQRAIIRRDLLSDPILDEIKNDVRCQNEMVQPPLVQVRNDDLPEVQYEEHDRVDLGLENYFETLCMQYRGSDPCSRPPLSKLRFRAHTGALINTLNNIIQSKLNTDADLEEIHLMIYCAARTVLEKNQKIHSTSNARRRESKPKWEIRLEQKIEKTRKIVAALQQLKLGNKRSRILKKLPKKMYETLIQTPASAHQQLILDSLDTMKQQLAVYAHRLRSYKESNERKKQNALFEKDERRFYRDIIEKKHQTQNTCPKMLELERFWEEIWSKEARHRADSPWIYEEERRMADTNEMPNPQMTSADLSRVLSRLPNWKAPGRDKVQNFWIKKFSSTHPYISEEFNNILRQPSRCPKFFTQGVTYLLPKGENKQDPAQYRPITCLPTLFKILTALITEKITNHLEVNHLMTEEQKGSRKGVLGCKEQLVVDEVVLEHIRRSNRNAYMAFIDYKKAFDSVPHSWLIHALKIHKVSPDIVNFLETSMRQWSTVLTLHTTEQIIQSKEIPIRRGIFQGDPLSAPWFCLALNPLSSTIVRMGHGIKIKTEQNTFNLTHLFFMDDLKIYTSSKRKLEIVLEQIHKMSTDIGMEFGLNKCKTVTVHRGTLQHTEPLQITPTTQIECLSEEPYKYLGILQTNKINHTTVKEELRTEFNKRLQTVLKTKLNSRNLTKAINTYVIPALSYSFGVIKWSQTDLEDLNRRVRTALTRARMHHPKSSCERVNLPRGSGGRGIVDIENLHNGQVENMRRYFYSRRDRLLHHTIIQADNKLTPLDLKNERGHTYACNQQKLLSEWKSKQLHGRFCRALDEPHVDKPASVRWLTQGYLNPETEGSMIAIQDQVVKTRNYSKFILKEDIQSDQCRLCAEKTETIDHIISGCTKLAKTKYIERHNQVAKIVYLELLKMCGMEHDDTPYYKYEPNAVRENVQFKIYWDKTILTNRTVQHNRPDITLVDRRKKKTYLIDVAVPSAHNLQQKYEEKLLKYEILAQEVRQIWGMQSVDIVPLIVSGVGIIPKTLKSNLSKLSIPENTYVQMQKAVILQTAAIVRSVIG

SEQ ID NO: 18753 - protein, 988 aa, Zeuzera pyrina
MLPALTSSPSSSSHIIINDTSLENLIKCKQCSQPRFFRGNRGLKIHVGRVHKRCDTAGIASGPTSLSVPSQSNNLTNSSNSNHNRTPFWKYIGSLKNNVCLIKRIPRGVRIGVAKSLNLIIQRILNRNDKCDWEELLIFGYRTLCLEQNDKDKISLTQKIKHKCSNSSVPSIHVRPIYKSFNSDSIPKIETKVSDGDLRGAAHLLFSSDVLAPNTAETLFALRSKHPSSSVACCRPDPPHPNDVSTRATEEDVLAAINSFKSGSAGGLDGLTPQHYKNLITGSVGDTGKTLLSSLTALINVMLAGKVPPEITDILYGANLCALKKKDGGVRPIAVGATIRRIASKICCRHILSTVSNYFCPTQVGFGSKRGCEAAVHAARAFLTHDGGEVLLKVDIKNAFNSVDRSTLLTQIKQHVPDIYPYLWQSYSSPSKLIYKDNLLHSEVGCQQGDPLGPAIFSLAIHPAICNLNSKFNIWYLDDGTIGSKAITVLEDLKTLIQRFKDIGLELNFSKCELFVSDSVPTITKNEIINKFKNLAPGIEVLSKGSLYLLGAPVLDDSIPCFINDQIQKFSQSSDKLFKINSHMALLIVRFCLFVPKLTYALRCSQLFKFQTLLKSVDNILKNTLSKILNCSFVDDRVWNQASLPICYGGLGIRKISSVSLPAFLSSAYSTENLFLSVIRPSLGSVEVPCLTDARNAWLSVCPSTNLPTSTFSQKHWDEPLCKNVQLFIKLQLLDSCSTEKDRSRLLAVSEKESGHWLKVIPSKNLGTLIDNTTLSLIVSLRLGARTNLLHRCRCGDLVDVLGHHGLSCLRSAGRMSRHAALNDVIRRALVAAGVPAVLEPVGIVRSDGRRPDGLTLIPWKLGRSLVWDATCVDTLAVSHVPATSKSAGAAASTAENLKRRKYATLSESFIFTPFAVETLGPWGPETHRLVSDICKRLVEASGDRRAGSFFRQRISLAIQRGNAASLLGTLSNDSFLSGNFEEVYYLR

SEQ ID NO: 18754 - protein, 984 aa, Zeuzera pyrina
MLPALTSSPSSSSHIIINDTSLENLIKCEQCSQPRFFRGNRGLKIHVGRVHKRCDTAGIASGPTSLSVPSQSNNLTNSSNSNHNRTPFWKYIGSLKNNVCLIKRIPRGARISVAKSLNLIIQRILNRNDKCDWEELLIFGYRTLCLEQNDKDKISLTQKIKHKCSNSSVPSIHVRPIYKSFNSDSIPKIETKISDGDLRGAAHLLFSSDVLAPNTAETLFALRSKHPSSSVACCLPDPPHPNDVSTRATEEDVLAAINSFKSGSAGGLDGLTPQHYKDLITGSVGDTGKTLLSSLTALINVMLAGKVPPEITDILYGANLCALKKKDGGVRPIAVGATIRRIASKICCRHILSTVSNYFCPTQVGFGSKRGCEAAVHAARAYLTHDGGEVLLKVDIKNAFNSVDRSTLLTQIKQHVPDIYPHLWQSYSSPSKLIYKDNLLHSEVGCQQGDPLGPAIFSLAIHPAICNLNSKFNIWYLDDGTIGGKAITVLEDLKTLIQRFKDIGLELNFSKCELFVSDSVPTITKNEIINKFNNLAPGIKVLSKGSLYLLGAPVLDDSIPCFINDQIQKFSQSSDKLFKINSHMALLIVRFCLFVPKFTYALRCSQLFKFQTLLKSVDNILKNTLSKILNCSFVDDRVWNQASLPICYGGLGIRKISSVSLPAFLSSAYSTENLFLSVIRPSLGSVEVPCLTDARNAWLSVCPSTNLPTSTFSQKHWDEPLCKNVHLQLLDSCSTEKDRSRLLAVSEKESGHWLKVIPSKNLGTLIDNTTLSLIVSLRLGARTNLLHRCRCGDLVDVLGHHGLSCLRSAGRMSRHAALNDVIRRALVAAGVPAVLEPVGIVRSDGRRPDGLTLIPWKLGRSLVWDATCVDTLAVSHVPATSKSAGAAASTAENLKRRKYATLSESFIFTPFAVETLGPWGPEAHRLVSDICKRLVEASGDRRAGSFFRQRISLAIQRGNAASLLGTLSNDSFLSGNFEEVYYLR

SEQ ID NO: 18755 - protein, 984 aa, Zeuzera pyrina
MLPALTSLPSSSSHIIINDTSLENLIKCEQCSQPRFFRGNRGLKIHVGRVHKRCDTAGIASGPTSLSVPSQSNNLTNSSNSNHNRTPFWKYIGSLKNNVCLIKRIPRGARISVAKSLNLIIQRILNRNDKCDWEELLIFGYRTLCLEQNDKDKISLTQKIKHKCSNSSVPSIHVRPIYKSFNSDSIPKIETKISDGDLRGAAHLLFSSDVLAPNTAETLFALRSKHPSSSVACCLPDPPHPNDVSTRATEEDVLAAINSFKSGSAGGLDGLTPQHYKDLITGSVGDTGKTLLSSLTALINVMLAGKVPPEITDILYGANLCALKKKDGGVRPIAVGATIRRIASKICCRHILSTVSNYFCPTQVGFGSKRGCEAAVHAARAFLTHDGGEVLLKVDIKNAFNSVDRSTLLTQIKQHVPDIYPYLWQSYSSPSKLIYKDNLLHSEVGCQQGDPLGPAIFSLAIHPAICNLNSKFNIWYLDDGTIGGKAITVLEDLKTLIQRFKDIGLELNFSKCELFVSDSVPTITKNEIINKFNNLAPGIKVLSKGSLYLLGAPVLDDSIPCFINDQIQKFSQSSDKLFKINSHMALLIVRFCLFVPKFTYALRCSQLFKFQTLLKSVDNIQKNTLSKILNCSFVDDRVWNQASLPICYGGLGIRKISSVSLPAFLSSAYSTENLFLSVIRPSLGSVEVPCLTDARNAWLSVCPSTNLPTSTFSQKHWDEPLCKNVHLQLLDSCSTEKDRSRLLAVSEKESGHWLKVIPSKNLGTLIDNTTLSLIVSLRLGARTNLLHRCRCGDLVDVLGHHGLSCLRSAGRMSRHAALNDVIRRALVAAGVPAVLEPVGIVRSDGRRPDGLTLIPWKLGRSLVWDATCVDTLAVSHVPATSKSAGAAASTAENLKRRKYATLSESFIFTPFAVETLGPWGPEAHRLVSDICKRLVEASGDRRAGSFFRQRISLAIQRGNAASLLGTLSNDNFLSGNFEEVYYLR

SEQ ID NO: 18756 - protein, 683 aa, Zeuzera pyrina
MLAGKVPPEITDILYGANLCELKKKDGGVRPIAVGATIRRIASKICCRHILSTVSNYFCPTQVGFGSKRGCEAAVHAARAFLTHDGGEVLLKVDVKNAFNSVDRSTLLTQIKQHVPDIYPYLWQSYSSPSKLIYKDNLLHSEVGCQQGDPLGPAIFSLAIHPAICNLNSKFNIWYLDDGTIGGKAITVLEDLKTLIQRFKDIGLELNFSKCELFVSDSVPTITKNEIINKFNNLAPGIKVLSKESLYLLGAPVLDDSIPCFINDQIQKFSQSSDKLFKINSHMALLIVRFCLFVPKLTYALRCSQLFKFQTLLKSVDNILKNTLSKILNCSFVDDRVWNQASLPICYGGLGIREISSVSLPAFLSSAYSTENLFLSVIRPSLGSVEVPCLTDARNAWLSVCPSTNLPTSTFSQKHWDEPLCKNVHLQLLDSCSTEKDRSRHLAVSEKESGHWLKVIPSKNLGTLIDNTTLSLIVSLRLGARTNLLHRCRCGDLVDVLGHHGLSCLRSAGRMSRHAALNDVIRRALVAAGVPAVLEPVGIVRSDGRRPDGLTLIPWKLGRSLVWDATCVDTLAVSHVPATSKSAGAAASTAENLKRRKYATLSESFIFTPFAVETLGPWGPEAHRLVSDICKRLVEASGDRRAGSFFRQRISLAIQRGNAASLLGTLSNDSFLSGNFEEVYYLR

SEQ ID NO: 18757 - protein, 984 aa, Zeuzera pyrina
MLPALTSSPSSSSHTIINDTSLENLIKCEQCSQPRFFRGNRGLKIHVGRVHKRCDTAGIASGPTSLSVPSQSNNLTNSSNSNHNRTPFWKYIGSLKNNVCLIKRIPRGARISVAKSLNLIIQRILNRNDKCDWEELLIFGYRTLCLEQNDKDKISLTQKIKHKCSNSSVPSIHVRPIYKSFNSDSIPKIETKISDGDLRGAAHLLFSSDVLAPNTAETLFALRSKHPSSSVACCLPDPPHPNDVSTRATEEDVLAAINSFKSGSAGGLDGLTPQHYKDLITGSVGDTGKTLLSSLTALINVMLAGKVPPEITDILYGANLCALKKKDGGVRPIAVGATIRRIASKICCRHILSTVSNYFCPTQVGFGSKRGCEAAVHAARAFLTHDGGEVLLKVDIKNAFNSVDRSTLLTQIKQHVPDIYPYLWQSYSSPSKLIYKDNLLHSEVGCQQGDPLGPAIFSLAIHPAICNLNSKFNIWYLDDGTIGGKAITVLEDLKTLIQRFKDIGLELNFSKCELFVSDSVPTITKNEIINKFNNLAPGIKVLSKESLYLLGAPVLDDSIPCFINDQIQKFSQSSDKLFKINSHMALLIVRFCLFVPKFTYALRCSQLFKFQTLLKSVDNILKNTLSKILNCSFVDDRVWNQASLPICYGGLGIRKISSVSLPAFLSSAYSTENLFLSVIRSSLGSVEVPCLTDARNAWLSVCPSTNLPTSTFSQNHWDEPLCKNVHLQLLDSCSTEKDRSRLLAVSEKESGHWLKVIPSKNLGTLIDNTTLSLIVSLRLGARTNLLHRCRCGDLVDVLGHHGLSCLRSAGRMSRHAALNDVIRRALVAAGVPAVLEPVGIVRSDGRRPDGLTLIPWKLGRSLVWDATCVDTLAVSHVPATSKSAGAAASTAENLKRRKYATLSESFIFTPFAVETLGPWGPEAHRLVSDICKRLVEASGDRRAGSFFRQRISLAIQRGNAASLLGTLSNDSLLSGNFEEVYYLR

SEQ ID NO: 18758 - protein, 984 aa, Zeuzera pyrina
MLPALTSSPSSSSHIIINDTSLENLIKCEQCSQPRFFRGNRGLKIHVGRVHKRCDTAGIASGPTSLSVPSQSNNLTNSSNSNHNRTPFWKYIGSLKNNVCLIKRIPRGARISVAKSLNLIIQRILNRNDKCDSEELLIFGYRTLCLEQNDKDKISLTQKIKHKCSNSSVPSIHVRPIYKSFNSDSIPKIETKISDGDLRGAAHLLFSSDVLAPNTAETLFALRSKHPSSSVACCLPDPPHSNDVSTRATEEDVLAAINSFKSGSAGGLDGLTPQHYKDLITGSVGDTGKTLLSSLTALINVMLAGKVPPEITDIRYGANLCALKKKDGGVRPIAVGATIRRIASKICCRHILSTVSNYFCPTQVGFGSKRGCEAAVHAARAFLTHDGGEVLLKVDVKNAFNSVDRSTLLTQIKQHVPDIYPYLWQSYSSPSKLIYKDNSLHSEVGCQQGDPLGPAIFSLAIHPAICNLNSKFNIWYLDDGTIGDKAITVLEDLKTLIQRFKDIGLELNFSKCELFVSDSVPTITKNEIINKFNNLAPGIKVLSKESLYLLGAPVLDDSIPCFINDQIQKFSQSSDKLFKINSHMALLIVRFCLFVPKLTYALRCSQLFKFQTLLKSVDNILKNTLSKILNCSFVDDRVWNQASLPICYGGLGIRKISSVSLPAFLSSAYSTENLFLSVIRPSLGSVEVPCLTDARNAWLSVCPSTNLPTSTFSQKHWDEPLCKNVHLQLLDSCSTEKDRSRLLAVSEKESGHWLKVIPSKNLGTLIDNTTLSLIVSLRLGARTNLLHRCRCGDLVDVLGHHGLSCLRSAGRMSRHAALNDVIRRALVAAGVPAVLEPVGIVRSDGRRPDGLTLIPWKLRRSLVWDATCVDTLAVSHVPATSKSAGAAASTAENLKRRKYATLSESFIFTPFAVETLGPWGPEAHRLVSDICKKLVEASGDRRAGSFFRQRISLAIQRGNAASLLGTLSNDSFLSGNFEEVYYLR

SEQ ID NO: 18759 - protein, 924 aa, Zeuzera pyrina
MLPALTSSPSSSSHIIINDTSLENLIKCEQCSQPRFFRGNRGLKIHVGRVHKRCDTAGIASGPTSLSVPSQSNNLTNSSNSNHNRTPFWKYIGSLKNNVCLIKHIPRGARISVAKSLNLIIQRILNRSDKCDWEELLIFGYRTLCLEQNDKDKISLTQKIKHKCSNSSVPSIHVRPIYKSFNSDSIPKIETKINDGDLRGAAHLLFSSDVLAPNTVETLFALRSKHPSSSVACCLPDPPHPNDVSTRATEEDVLAAINSFKSGSAGGLDGLTPQHYKDLITGAVGDTGKTLLSSLTALINVMLAGKVPPEITDILYGANLCALKKKDGGVRPIAVDATMRRIASKICCRHILSTVSNYFCPTQVGFGSKRGCEAAVHAARAFLTHDGGEVLLKVDIKNALNSVDRSTLLTQIKQHVPDIYPYLWQSYSSPSKLIYKDNLLHSEVGCQQGDPLGPVIFRLAIHPAICNLNSKFNIWYLDDGTIGGKAITVLEDLKTLIQRFKDIGLELNFSKCELFVSDSVPTITKNEIINKFNNLAPGIKVLSKESLYLLGAPVLDDSIPCFINDQIQKFSQSSDKLFKINSHMALLIVRFCLFVPKLTYALRCSQLFKFQTLLKSVDNILKNTLSKILNCSFVDDRVWNQASLPICYGGLGIRKISSVSLPAFLSSAYSTENLFLSVIRPSLGSVEVPCLTDARNAWLSVCPSTNLPTSTFSQKHWDEPLCKNVHLQLLDSCSTEKDRSRLLAVSEKESGHWLKVIPSKNLGTLIDNTTLSLIVSLRLGARTNLFHRCRCGDLVDVLGHHGLSCLRSAGRMSRHAALNDVIRRALVAAGVPAVLEPVGIVRSDGRRPDGLTLIPWKLGRSLVWDATCVDTLAVSHVPATSKSAGAAASTAENLKRRKYATLSESFIFTPFAVETLGPWGSEAH

SEQ ID NO: 18760 - protein, 984 aa, Zeuzera pyrina
MLPALTSSPSSSSHIIINDTSLENLIKCEQCSQPRFFRGNRGLKIHVGRVHKRCDTAGIASGPTSLSVPSQSNNLTNSSNSNHNRTPFWKYIGSLKNNVCLIKRIPRGARISVAKSLNLIIQRILNRNDKCDWEELLIFGYRTLCLEQNDKDKISLTQKIKHKCSNSSVPSIHVRPIYKSFNSDSIPKIETKISDGDLRGAAHLLFSSDVLAPNTAETLFALRSKHPSSSVACCLPDPPHPNDVSTRATEEDVLAAINSFKSGSAGGLDGLTPQHYKDLITGSVGDTGKTLLSSLTALINVMLAGKVPPEITDILYGANLCALKKKDGGVRPIAVGATIRRIASKICCRHILSTVSNYFCPTQVGFGSKRGCEAAVHAARAFLTHDGGEVLLKVDIKNAFNSVDRSTLLTQIKQHVPDIYPYLWQSYSSPSKLIYKDNLLHSEVGCQQGDPLGPAIFSLAIHPAICNLNSKFNIWYLDDGTIGGKAITVLEDLKTLIQRFKDIGLELNFSKCELFVSDSVPTITKNEIINKFNNLAPGIKVLSKGSLYLLGAPVLDDSIPCFINDQIQKFSQSSDKLFKINSHMALLIVRFCLFVPKFTYALRCSQLFKFQTFLKSVDNILKNTLSKILNCSFVDDRVWNQASLPICYGGLGIRKISSVSLPAFLSSAYSTENLFLSVIRPSLGSVEVPCLTDARNAWLSVCPSTNLPTSTFSQKHWDEPLCKNVHLQLLDSCSTEKDRSRLLAVSEKESGHWLKVIPSKNLGTLIDNTTLSLIVSLRLGARTNLLHRCRCGDLVDVLGHHGLSCLRSAGRMSRHAALNDVIRRALVAAGVPAVLEPVGIVRSDGRRPDGLTLIPWKLGRSLVWDATCVDTLAVSHVPATSKSAGAAASTAENLKRRKYATLSESFIFTPFAVETLGPWGPEAHRLVSDICKRLVEASGDRRAGSFFRQRISLAIQRGNAASLLGTLSNDSFLSGNFEEVYYLR

SEQ ID NO: 18761 - protein, 984 aa, Zeuzera pyrina
MLPALTSSPSSSSHTIINDTSLENLIKCEQCSQPRFFRGNRGLKIHVGRVHKRCDTAGIASGPTSLSVPSQSNNLTNSSNSNHNRTPFWKYIGSLKNNVCLIKRIPRGARISVAKSLNLIIQRILNRNDKCDWEELLIFGYRTLCLEQNDKDKISLTQKIKHKCSNSSVPSIHVRPIYKSFNSDSIPKIETKISDGDLRGAAHLLFSSDVLAPNTAETLFALRSKHPSSSVACCLPDPPHPNDVSTRATEEDVLAAINSFKSGSAGGLDGLTPQHYKDLITGSVGDTGKTLLSSLTALINVMLAGKVPPEITDILYGANLCALKKKDGGVRPIAVGATIRRIASKICCRHILSTVSNYFCPTQVGFGSKRGCEAAVHAARAFLTHDGGEVLLKVDIKNAFNSVDRSTLLTQIKQHVPDIYPYLWQSYSSPSKLIYKDNLLHSEVGCQQGDPLGPAIFSLAIHPAICNLNSKFNIWYLDDGTIGGKAITVLEDLKTLIQRFKDIGLELNFSKCELFVSNSVPTITKNEIINKFNNLAPGIKVLSKESLYLLGAPVLDDSIPCFINDQIQKFSQSSDKLFKINSHMALLIVRFCLFVPKFTYALRCSQLFKFQTLLKSVDNILKNTLSKILNCSFVDDRVWNQASLPICYGGLGIRKISSVSLPAFLSSAYSTENLFLSVIRPSLGSVEVPCLTDARNAWLSVCPSANLPTSTFSQKHWDEPLCKNVHLQLLDSCSTEKDRSRLLAVSEKESGHWLKVIPSKNLGTLIDNTTLSLIVSLRLGARTNLLHRCRCGDLVDVLGHHGLSCLRSAGRMSRHAALNDVIRRALVAAGVPAVLEPVGIVRSDGRRPDGLTLIPWKLGRSLVWDATCVDTLAVSHVPATSKSAGAAASTAENLKRRKYATLSESFIFTPFAVETLGPWGPEAHRLVSDICKRLVEASGDRRAGSFFRQRISLAIQRGNAASLLGTLSNDSLLSGNFEEVYYLR

SEQ ID NO: 18762 - protein, 984 aa, Zeuzera pyrina
MLPALTSSPSSSSHIIINDTSLENLIKCEQCSQPRFFRGNRGLKIHVGRVHKRCDTAGIASGPTSLSVPSQSNNLTNSSNSNHNRTPFWKYISSLKNNVCLIKRIPRGARISVAKSLNLIIQRILNRNDKCDWEELLIFGYRTLCLEQNDKDKISLTQKIKHKCSNSSVPSIHVRPIYKSFNSDSIPKIETKISDGDLRGAAHFLFSSDVLAPNTAETLFALRSKHPSSSVACCLPDPPHPNHVSTRATEEDVLAAINSFKSSSAGGLDGLTPQHYKDLITGSVGDTGKTLLSSLTALINVMLAGKVPPEITDILYGANLCALKKKDGGVRPIAVGATIRRIASKICCRHILSTVSNYFCPTQVGFGSKRGCEAAVHAARAFLTHDGGEVLLKVDIKNAFNSVDRSTLLTQIKQHVPDIYPYLWQSYSSPSKLIYKDNLLHSEVGCQQGDPLGPAIFSLAIHPAICNLNSKFNIWYLDDGTIGGKAITVLEDLKTLIQRFKDIGLELNFSKCELFVSDSVPTITKNEIINKFNNLAPGIKVLSKESLYLLGAPVLDDSIPCFINDQKQKFSQSSDKLFKINSHMALLIVRFCLFVPKLTYALRCSQLFKFQTLLKSVDNILKNTLSKILNCSFVDDRVWNQASLPICYGGLGILKISSVSLPAFLSSAYSTENLFLSVIRPSLGSVEVPCLTDARNAWLSVCPSTNLPTSTFSQKHWDEPLCKNVHLQLLDSCSTEKDRSRLLAVSEKESGHWLKVIPSKNLGTLIDNTTLSLIVSLRLGARTNLLHRCRCGDLVDVLGHHGLSCLRSAGRMSRHAALNDVIRRALVAAGVPAVLEPVGIVRSDGRRTDGLTLIPWKLGRSLVWDATCVDTLAVSHVPATSKSAGAAASTAENLKRRKYATLSESFIFTPFAVETLGPWGPEVHRLVSDICKRLVEASGDRRAGSFFRQRISLAIQRGNAASLLGTLSNDSFLSGNFEEVYYLR

SEQ ID NO: 18763 - protein, 984 aa, Zeuzera pyrina
MLPALTSSPSSSSHIIINDTSLENLIKCEQCSQPRFFRGNRGLKIHVGRVHKRCDTAGIASGPTSLSVPSQSNNLTNSSNSNHNRTPFWKYIGSLKNNVCLIKRIPRGARISVAKSLNLIIQRILNRNDKCDWEELLIFGYKTLCLEQNDKDKISLTQKIKHKCSNSSVPSIHVRPIYKSFNSDSIPKIETKISDGDLRGAAHLLFSSDVLAPNTAETLFALRSKHPSSSVACCLPDPPHPNDVSTRATEEDVLAAINSFKSGSAGGLDGLTPQHYKDLITGSVGDTGKTLLSSLTALINVMLAGKVPPEITDILYGANLCALKKKDGGVRPIAVGATIRRIASKICCRHILSTVSNYFCPTQVGFGSKRGCEAAVHAARAFLTHDGGEVLLKVDVKNAFNSVDRSTLLTQIKQHVPDIYPYLWQSYSSPSKLIYKDNLLHSEVGCQQGDPLGPAIFSLAIHPAICNLNSKFNIWYLDDGTIGGKAITVLEDLKTLIQRFKDIGLELNFSKCELFVSDSVPTITKNEIINKFNNLAPGIKVLSKESLYLLGAPVLDDSIPCFINDQIQKFSQSSDKLFKINSHMALLIVRFCLFVPKLTYALRCSQLFKFQTLLKSVDNILKNTLSKILNCSFVDDRVWNQASLPICYGGLGIRKISSVSLPAFLSSAYSTENLFLSVIRPSLGSVEVPCLTDARNAWLSVCPSTNLPTSTFSQKHWDEPLCKNVHLQLLDSCSTEKDRSRLLAVSEKESGHWLKVIPSKNLGTLIDNTTLSLIVSLRLGARTNLLHRCRCGDLVDVLGHHGLSCLRSAGRMSRHAALNDVIRRALVAAGVPAVLEPVGIVRSDGRRPDGLTLIPWKLGRSLVWDATCVDTLAVSHVPATSKSAGAAASTAENLKRRKYATLSESFIFTPFAVETLGPWGPEAHRLVSDICKRLVEASGDRRAGSFFRQRISLAIQRGNAASLLGTLSNDSFLSGNFEEVYYLR

SEQ ID NO: 18764 - protein, 984 aa, Zeuzera pyrina
MLPALTSSPSSSSHIIINDTSLENLIKCEQCSQPRFFRGNRGLKIHVGRVHKRCDTAGIASGPNSLSVPSQSNNLTNSSNSNHNRTPFWKYIGSLKNNVCLIKRIPRGARISVAKSLNLIIQRILNRNDKCDWEELLIFGYRTLCLEQNDKDKISLTQKIKHKCSNSSVPSIHVRPIYKSFNSDSIPKIETKISDGDLRGAAHLLFSSDVLAPNTAETLFALRSKHPSSSVACCLPDPPHPNDVSTRATEEDVLAAINSFKSGSAGGLDGLTPQHYKDLITGSVGDTGKTLLSSLTALINVMLAGRVPPEITDILYGANLCALKKKDGGVRPIAVGATIRRIASKICCRHILSTVSNYFCPTQVGFGSKRGCEAAVHAARAFLTHDGGEVLLKVDIKNAFNSVDRSTLLTQIKQHVPDIYPYLWQSYSSPSKLIYKDNLLHSEVGCQQGDPLGPAIFSLAIHPAICNLNSKFNIWYLDDGTIGGKAITVLEDLNTLIQRFKDIGLELNFSKCELFVSDSVPTITKNEIINKFNNLAPGIKILSKESLYLLGAPVLDDSIPCFINDQIQKFSQSSDKLFKINSHMALLIVRFCLFVPKLTYALRCSQLFKFQTLLKSVDNILKNTLSKILNCSFVDDRVWNQASLPICYGGLGIRKISSVSLPAFLSSAYSTENLFLSVIRPSLGSVEVPCLTDARNAWLSVCPSTNLPTSTFSQKHWDEPLCKNVHLQLLDSCSTEKDRSRLLAVSEKESGHWLKVIPSKNLGTLIDNTTLSLIVSLRLGARTNLLHRCRCGDLVDVLGHHGLSCLRSAGRMSRHAALNDVIRRALVAAGVPAVLEPVGIVRSDGRSPDGLTLIPWKLGRSLVWDATCVDTLAVSHVPATSKSAGAAASTAENLKRRKYATLSESFIFTPFAVETLGPWGPEAHRLVSDICKRLVEASGDRRAGSFFRQRISLAIQRGNAASLLGTLSNDSFLSGNFEEVYYLR

SEQ ID NO: 18765 - protein, 984 aa, Zeuzera pyrina
MLPALTSSPSSSSHIIINGTSLENLIKCEQCSQPRFFRGNRGLKIHVGRVHKRCDIAGIVSGPTSLSVPSQSNNLTNSSNSNHNRTPFWKYIGSLKNIVCLIKRIPRGARISVAKSLNLIIQRILNRNDKCDWEELLIFGYRTLCLEQNDKDKISLTQKIKHKCSNSSVPSIHVRPIYKSFNSDSIPKIETKISDGDLRGAAHLLFSSDVLAPNTAETLFALRSKHPSSSVACCLPDPPHPNDVSTRATEEDVLAAINSFKSGSAGGLDGLTPQHYKDLITGSVGDTGKTLLSSLTALINVMLAGKVPPEITDILYGANLCALKKKDGGVRPIAIGATIRRIASKICCRHILSTVSNYFCPTQVGFGSKRGCEAAVHAARAFLTHDGGEVLLKVDIKNAFNSVDRSTLLTQIKQHVPDIYPYLWQSYSSPSKLIYKDNLLHSEVGCQQGDPLGPAIFSLAIHPAICNLNSKFNIWYLDDGTIGGKAITVLEDLKTLIQRFIDIGLELNFSKCELFVSDSVPTITKNEIINKFNNLAPGIKVLSKESLYLLGAPVLDDSIPCFINDQIQKFSQSSDKLFKINSHMALLIVRFCLFVPKLTYALRCSQLFKFQTLLKSVDNILKNTLSKILNCSFVDDRVWNQASLPICYGGLGICKISSVSLPAFLSSAYSTENLFLSVIRPSLGSVEVPCLTDARNAWLSVCPSTNLPTSTFSQKHWDEPLCKNVHLQLLDSCSTEKDRSRLLAVSEKESGHWLKVIPSKNLGTLIDNTTLSLIVSLRLGARTNLLHRCRCGDLVDVLGHHGLSCLRSAGRMSRHAALNDVIRRALVAAGVPAVLEPVGIVRSDGRRPDGLTLIPWKLGRSLVWDATCVDTLAVSHVPATSKSAGAAASTAENLKRRKYATLSESFIFTPFAVETLGPWGPEAHRLVSDICKRLVEASGDRRAGSFFRQRISLAIQRGNAASLLGTLSNDSFLSGNFEEVYYLR

SEQ ID NO: 18766 - protein, 984 aa, Zeuzera pyrina
MLPALTSSPSSSSHIIINDTSLENLIKCEQCSQPRFFRGNRGLKIHVGRVHKRCDTAGIASGPTSLSVPSQSNNLTNSSNSNHSRTPFWKYISSLKNNVCLIKRIRRGARISVAKSLNLIIQRILNRNDKCDWEELLIFGYRTLCLEQNDKDKISLTQKIKHKCSNSSVPSIHVRPIYKSFNSDSIPKIETKISDGDLRGAAHLIFSSDVLAPNTAETLFALRSKHPSSSVACCLPDPPHPNDVSTRATEEDVLAAINSFKSGSAGGLDGLTPQHYKDLITGSVGDTGKTLLSSLTALINVMLAGKVPPEITDILYGANLCALKKKDGGVRPIAVGATIRRIASKICCRHILSTVSNYFCPTQVGFGSKRGCEAAVHAARAFLTHDGGEVLLKVDIKNAFNSVDRSTLLTQIKQHVPDIYPYLWQSYSSPSKLIYKDNLLHSEVGCQQGDPLGPAIFSLAIHPAICNLNSKFNIWYLDDGTIGGKAITVLKDLKTLIQRFKDIGLELNFSKCELFVSDSVPTITKNEIINKFNNLAPGIKVLSKESLYLLGAPVLDDSIPCFFNDQIQKFSQSSDKLFKINSHMALLIVRFCLFVPKLTYALRCSQLFKFQTLLKSVDNILKNTLSKILNCSFVDDRVWNQASLPICYGGLGIRKISSVSLSAFLSSAYSTENLFLSVIRLSLGSVEVPCLTDARNAWLSVCPSTNLPTSTFSQKHWDEPLCKNVHLQLLDSCSTEKDRSRLLAVSEKESGHWLKVIPSKNLGTLIDNTTLSLIVSLRLGARTNLLHRCRCGDLVDVLGHHGLSCLRSAGRMSRHAALNDVIRRALVAAGVPAVLEPVGIVRSDGRRPDGLTLIPWKLGRSLVWDATCVDTLAVSHVPATSKSAGAAASTAENLKRRKYATLSESFIFTPFAVETLGPWRPEAHRLVSDICKRLVEASGDRRAGSFFLQRISLAIQRGNAASLLGTLSNDSFLSGNFEEVYYLR

SEQ ID NO: 18767 - protein, 683 aa, Zeuzera pyrina
MLAGKVPPEITDILYGANLCALKKKDGGVRPIAVGATIRRIASKICCRHILSTVSNYFCPTQVGFGSKRGCEAAVHAARAFLTHDGGEVLLKVDIKNAFNSVDRSTLLTQIKQHVPDIYPYLWQSYSSPSKLIYKDNLLHSEVGCQQGDPLGPAIFSLAIHPAICNLNSKFNIWYLDDGTIGGKAITVLEDLKTLIQRFKDIGLELNFSKCELFVSDSVPTITKNEIINKFNNLAPGIKVLSKESLYLLGAPVLDDSIPCFINDQIQKFSQSSDKLFKINSHMALLIVRFCLFVPKFTYALRCSQLFKFQTLLKSVDNILKNTLSKILNCSFVDDRVWNQASLPICYGGLGIRKISSVSLPAFLSSAYSTENLFLSVIRPSLGSVEVPCLTDARNAWLSVCPSTNLPTSTFSQKHWDEPLCKNVHLQLLDSCSTEKDRSRLLAVSEKESGHWLKVIPSKNLGTLIDNTTLSLIVSLRLGARTNLLHRCRCGDLVDVLGHHGLSCLRSAGRMSRHAALNDVIRRALVAAGVPAVLEPVGIVRSDGRRPDGLTLIPWKLGRSLVWDATCVDTLAVSHVPATSKSAGAAASTAENLKRRKYATLSESFIFTPFAVETLGPWGPEAHRLVSDICKRLVEASGDRRAGSFFRQRISLAIQRGNAASLLGTLSNDSLLSGNFEEVYYLR

SEQ ID NO: 18768 - protein, 984 aa, Zeuzera pyrina
MLPALTSSPSSSSHIIINDTSLENLIKCEQCSQPRFFRGNRGLKIHVGRVHKRCDTAGIASGPTSLSVPSQSNNLTNSSNSNHNRTPFWKYIGSLKNNVCLIKRIPRGARISVAKSLNLIIQRILNRNDKCDWEELLIFGYRTLCLEQNDKDKISLTQKIKHKCSNSSVPSIHVRPIYKSFNSDSIPKIETKISDGDLRGAAHLLFSSVVLAPNTAETLFALRSKHPSSSVACCLPDPPHPNDVSTRATEEDVLAAINSFKSGSAGGLDGLTPQHYKDLITGSVGDTGKTLLSSLTALINVMLAGKVHPEITDILYGANLCALKKKDGGVRPIAVGATIRRIASKICCRHILSTVSNYFCPTQVGFGSKRGCEAAVHAARAFLTHDGGEVLLKVDIKNAFNSVDRSTLLTQIKQHVPDIYPYLWQSYSSPSKLIYKDNLLHSEVGCQQGDPLGPAIFSLAIHPAICNLNSKFNIWYLDDGTIGGKAITVLEDLKTLIQRFKDIGLELNFSKCELFVSDSVPTITKNEIINKFNNLAPGIKVLSKGSLYLLGAPVLDDSIPCFINDQIQKFSQSSDKLFKINSHMALLIVRFCLFVPKFTYALRCSQLFKFQTLLKSVDNILKNTLSKILNCSFVDDRVWNQASLPICYGGLGIRKISSVSLPAFLSSAYSTENLFLSVIRPSLGSVEVPCLTDARNAWLSVCPSTNLPTSTFSQKHWDEPLCKNVHLQLLDSCSTEKDRSRLLAVSEKESGHWLKVIPSKNLGTLIDNTTLSLIVSLRLGARTNLLHRCRCGDLVDVLGHHGLSCLRSAGRMSRDAALNDVIRRALVAAGVPAVLEPVGIVRSDGRRPDGLTLIPWKLGRSLVWDATCVDTLAVSHVPATSKSAGAAASTAENLKRRKYATLSESFIFTPFAVETLGPWGPEAHRLVSDICKKLVEASGDRRAGSFFRQRISLAIQRGNAASLLGTLSNDSFLSGNFEEVYYLR

SEQ ID NO: 18769 - protein, 983 aa, Zeuzera pyrina
MLPALTSSPSSSSHIIINDTSLENLIKCEQCSQPRFFRGNRGLKIHVGRVHKRCDTAGIASGPTSLSVPSQSNNLTNSSNSNHNRTPFWKYIGSLKNNVCLIKRIPRGARISVAKSLNLIIQRILNRNDKCDWEELLIFGYRTLCLEQNDKDKISLTQKIKHKCSNSSVPSIHVRPIYKSFNSDSIPKIETKISDGDLRGAAHLLFSSDVLAPNTAETLFALRSKHPSSSVACLPDPPHPNDVSTRATEEDVLAAINSFKSGSAGGLDGLTPQHYKDLITGSVGDTGKTLLSSLTALINVMLAGKVPPEITDILYGANLCALKKKDGGVRPIAVGATIRRIASKICCRHILSTVSNYFCPTQVGFGSKRGCEAAVHAARAFLTHDGGEVLLKVDIKNAFNSVDRSTLLTQIKQHVPDIYPYLWQSYSSPSKLIYKDNLLHSEVGCQQGDPLGPAIFSLAIHPAICNLNSKFNIWYLDDGTIGGKAITVLEDLKTLIQRFKDIGLELNFSKCELFVSDSVPTITKNEIINKFNNLAPGIKVLSKGSLYLLGAPVLDDSIPCFINDQIQKFCQSSDKLFKINSHMVLLIVRFCLFVPKFTYALRCCQLFKFQTLLKSVDNILKNTLSKILNCSFVDDRVWNQASLPICYGGLGIRKISSVSLPAFLSSAYSTENLFLSVIRPSLGSVEVPCLTDARNAWLSVCPSTNLPTSTFSQKHWDEPLCKNVHLQLLDSCSTEKDRSRLLAVSEKESGHWLKVIPSKNLGTLIDNTTLSLIVSLRLGARTNLLHRCRCGDLVDVLGHHGLSCLRSAGRMSRHAALNDVIRRALVAAGVPAVLEPVGIVRSDGRRPDGLTLIPWKLGRSLVWDATCVDTLAVSHVPATSKSAGAAASTAENLKRRKYATLSESFIFTPLAVETLGPWGPEAHRLVSDICKRLVEASGDRRAGSFFRQRISLAIQRGNAASLLGTLSNDSFLSGNFEEVYYLR

SEQ ID NO: 18770 - protein, 984 aa, Zeuzera pyrina
MLPALTSSPSSSSHIIINDTSLENLIKCEQCSQPRFFRGNRGLKIHVGRVHKRCDTAGIASGPTSLSVPSQSNNLTNSSNSNHNRTPFWKYIGSLKNNVCLIKRIPRGARISVAKSLNLIIQRILNRNDKCDWEELLIFGYRTLCLEQNDKDKISLTQKIKHKCSNSSVPSIHVRPIYKSFNSDSIPKIETKISDGDLRGAAHLLFSSDVLAPNTAETLFALRSKHPSSSVACCLPDPPHPNDVSTRATEEDVLAAINSFKSGSAGGLDGLTPQHYKDLITGSVGDTGKTLLSSLTALINVMLAGKVPPEITDILYGANLCALKKKDGGVRPIAVGATIRRIASKICCRHILSTVSNYFCPTQVGFGSKRGCEAAVHAARAFLTHDGGEVLLKVDIKNAFNSVDRSTLLTQIKQHVPDIYPYLWQSYSSPSKLIYKDNLLHSEVGCQQGDPLGPAIFSLAIHPAICILNSKFNIWYLDDGTIGGKAITVLEDLKTLIQRFKDIGLELNFSKCELFVSDSVPTITKNEIINKFNNLAPGIKVLSKGSLYLLGAPVLDDSIPCFINDQIQKFSQSSDKLFKINSHMALLIVRFCLFVPKFTYALRCSQLFIFQTLLKSVDNILKNTLSKILNCSFVDDRVWNQASLPICYGGLGIRKISSVSLPAFLSSAYSTENLFLSVIRPSLGSVEVPCLTDARNAWLSVCPSTNLPTSTFSQKHWDEPLCKNVHLQLLDSCSTEKDRSRLLAVSEKESGHWLKVIPSKNLGTLIDNTTLSLIVSLRLGARTNLLHRCRCGDLVDVLGHHGLSCLRSAGRMSRHAALNDVIRRALVATGVPAVLEPVGIVRSDGRRPDGLTLIPWKLGRSLVWDATCVDTLAVSHVPATSKSAGAAASTAENLKRRKYATLSESFIFTPFAVETLGPWGPEAHRLVSDICKRLVEASGDRRAGSFFRQRISLAIQRGNAASLLGTLSNDSFLSGNFEEVYYLR

SEQ ID NO: 18771 - protein, 683 aa, Zeuzera pyrina
MLAGKVPPEITDILYGANLCALKKKDGGVRPIAVGATIRRIASKICCRHILSTVSNYFCPTQVGFGSKRGCEAAVHAARAFLTHDGDEVLLKVDIKNAFNSVDRSTLLTQIKQHVPDIYPYLWQSYSSPSKLIYKDNLLHSEVGCQQGDPLGPAIFSLAIHPAICNLNSKFNIWYLDDGIIGGKAITVLEDLKTLIQRFKDIGLELNFSKCELFVSDSVPTITKNEIINKFNNLAPGIKVLSKESLYLLGASVLDDSIPCFINDQIQKFSQSSDKLFKINSHMALLIVRFCLFVPKLTYALRCSQLFKFQTLLKSVDNILKNTLSKILNCSFVDDRVWNQASLPICYGGLGIRKISSVSLPAFLSSAYSTENLFLSVIRPSLGSVEVPCLTDARNTWLSVCPSTNLPTSTFSQKHWDEPLCKNVHLQLLDSCSTEKDRSRLLAVSEKESGHWLKVIPSKNLGTLIDNTTLSLIVSLRLGARTNLLHRCRCGDLVDVLGHHGLSCLRSAGRMSRHAALNDVIRRALVAAGVPAVLEPVGIVRSDGRRPDGLTLIPWKLGRSLVWDATCVDTLAVSHVPATSKSAGAAARTAENLKRRKYATLSESFILTPFAVKTLGPWGPEAHRLVSDICKRLVEASGDRRAGSFFRQRISLAIQRGNAASLLGTLSNDSFLSGNFEEVYYLR

SEQ ID NO: 18772 - protein, 984 aa, Zeuzera pyrina
MLPALTSSPSSSSHIIINDTSLENLIKCEQCSQPRFFRGNRGLKIHVGRVHKRCDTAGIASGPTSLSVPSQSNNLTNSSNSNHNRTPFWKYIGSLKNNVCLIKRIPRGARISVAKSLNLIIQRILNRNDKCDWEELLIFGYRTLCLEQNDKDKISLTQKIKHKCSNSSVPSIHVRPIYKSFNSDSIPKIETKISDGDLRGAAHLLFSSDVLAPNTAETLFALRSKHPSSSVACCLPDPPHPNDVSTRATEEDVLAAINSFKSGSAGGLDGLTPQHYKDLITGSVGDTGKTLLSSLTALINVMLAGKVPPEITDILYGANLCALKKKDGGVRPIAVGATIRRIASKICCRHILSTVSNYFCPTQVGFGSKRGCEAAVHAARAFLTHDGGEVLLKVDVKNAFNSVDRSTLLTQIKQHIPDIYPYLWQSYSSPSKLIYKDNLLHSEVGCQQGDPLGPAIFSLAIHPAICNLNSKFNIWYLDDGTIGGKAITVLEDLKTLIQRFKDIGLELNFSKCELFVSDSVPTITKNEIINKFNNLAPGIKVLSKESLYLLGAPVLDDSIPCFINDQIQKFSQSSDKLFKINSHMALLIVRFCLFVPKLTYALRCSQLFKFQTLLKSVDNILKNTLSKILNCSFVDDRVWNQASLPICYGGLGIRKISSVSLPAFLSSAYSTENLFLSVIRPSLGSVEVPCLTDARNAWLSVCPSTNLPTSTFSQKHWDEPLCKNVHLQLLDSCSTEKDRSRLLAVSEKESGHWLKVIPSKNLGTLIDNTTLSLIVSLRLGARTNLLHRCRCGDLVDVLGHHGLSCLRSAGRMSRHAALNDVIRRALVAAGVPAVLEPVGIVRSDGRRPDGLTLIPWKLGRSLVWDATCVDTLAVSHVPATSKSAGAAASTAENLKRRKYATLSESFIFTPFAVETLGPWGPEAHRLVSDICKRLVEASGDRRAGSFFRQRISLAIQRGNAASLLGTLSNDSFLSGNFEEVYYLR

SEQ ID NO: 18773 - protein, 770 aa, Zeuzera pyrina
MAETLFALRSKHPSSSVACCLPDPPHPNDVSTRATEEDVLAAINSFKSGSAGGLDGLTPQHYKDLITGSVGDTGKTLLSSLTALINVMLAGKVPPEITDILYGANLCALKKKDGGVRPIAVGATIRRIASKICCRHILSTVSNYFCPTQVGFGSKRGCEAAVHAARAFLTHDGGEVLLKVDVKNAFNSVDRSTLLTQIKQHVPDIYPYLWQSYSSPSKLIYKDNLLHSEVGCQQGDPLGPAIFSLAIHPAICNLNSKFNIWYLDDGTIGGKAITVLEDLKTLIQRFKDIGLELNFSKCELFVSDSVPTITKNEIINKFNNLAPGIKVLSKESLYLLGAPVLDDSIPCFINDQIQKFSQSSDKLFKINSHMALLIVRFCLFVPKLTYALRCSQLFKFQTLLKSVDNILKNTLSKILNCPFVDGRVWNQASLPICYGGLGIRKISSVSLPAFLSSAYSTENLFLSVIRPSLGSVEVPCLTDARNAWLSVCPITNLPTSTFSQKHWDEPLCKNVHLQLLDSCSTEKDRSRLLAVSEKESGHWLKVIPSKNLGTLIDNTTLSLIVSLRLGARTNLLHRCRCGDLVDVLGHHGLSCLRSAGLMSRHAALNDVIRRALVAAGVPAVLEPVGIVRSDGRRPDGLTLIPWKLGRSLVWDATCVDTLAVSHVPATSKSAGAAASTAENLKRRKYATLSESFIFTPFAVETLGPWGPEAHRLVSDICKRLVEASGDRRAGSFFRQRISLAIQRGNAASLLGTLSNDSFLSGNFEEVYYLR

SEQ ID NO: 18774 - protein, 984 aa, Zeuzera pyrina
MLPALTSSPSSSSHIIINDTSLETLIKCEQCSQPRFFRGNRGLKIHVGRVHKRCDTAGIASGPTSLSVPSQSNNLTNSSNSNHNRTPFWKYISSLKNNVCLIKRISRGARISVAKSLNLIIQRILNRNDKCDWEELLIFGYRTLCLEQNDKDKISLTQKIKHKCSNSSVPSIHVRPIYKSFNSDSIPKIETKISDGDLRGAAHLLFSSDVLAPNTAETLFALRSKHPSSSVACCLPDPPHPNDVSTRATEEDVLAAINSFKSGSAGGLDGLTPQHYKDLITGSVGDTGKTLLSSLTALINVMLAGKVPPVITDILYGANLCALKKKDGGVRPIAVGATIRRIASKICCRHILSTVSNYFCPTQVGFGSKRGCEAAVHAARAFLTHDGGEVLLKVDVKNAFNSVDRSTLLTQIKQHVPDIYPYLWQSYSSPSKLIYKDNLLHSEVGCQQGDPLGPAIFSLAIHPAICNLNSKFNIWYLDDGTIGGKAITVLEDLKTLIRRFKDIGLELNFSKCELFVSDSVPTITKNEIINKFNNLAPGIKVLSKESLYLLGAPVLDDSIPCFINDQIQKFSQSSDKLFKINSHMALLIVRFCLFVPKLTYALRCSQLFKFQTLLKSVDNILKNTLSKILNCSFVDDRVWNQASLPICYGGLGIRKISSVSLSAFLSSAYSTENLFLSVIRPSLGSVEVPCLTDARNAWLSVCPSTNLPTSTFSQKHWDEPLCKNVHLQLLDSCSTEKDRSRLLAVSEKESGHWLKVIPSKNLGTLIDNTTLSLIVSLRLGARTNLLHRCRCGDLVDVLGHHGLSCLRSAGRMSRHAALNDVIRRALVAAGVPAVLEPVGIVRSDGRRPDGLTLIPWKLGRSLVWDATCVDTLAVSHVPATSKSAGAAASTAENLKRRKYATLSESFIFTPFAVETLGPWGPEAHRLVSDICKRLVEASGDRRAGSFFRQRISLAIQRGNAASLLGTLSNDSFLSGNFEEVYYLR

SEQ ID NO: 18775 - protein, 984 aa, Zeuzera pyrina
MLPALTSSPSSSSHIIINDTSLENLIKCEQCSQPRFFRGNRGLKIHVGRVHKRCDTAGIASGPTSLSVPSQSNNLTNSSNSNHNRTPFWKYIGSLKNNVCLIKRIPRGARISVAKSLNLIIQRILNRNDKSDWEELLIFGYRTLCLEQNDKDKISLTQKIKHKCSNSSVPSIHVRPIYKSFNSDSIPKIETKISDGDLRGAAHLLFSSDVLAPNTAETLFALRSKHPSSSVACCLPDPPHPNDVSTRATEEDVLAAINSFKSGSAGGLDGLTPQHYKDLITGSVGGTGKTLLSSLTALINVMLAGKVPPEITDILYGANLCTLKKKDGGVRPIAVGATIRRIASKICCRHILSTVSNYFCPTQVGFGSKRGCEAAVHAARAFLTHDGGEVLLKVDIKNAFSSVDRSTLLTQTRQHVPDIYPYLWQSYRSPSKLIYKDNLLHSEVGCQQGDPLGPAIFSLAIHPAICNLNSKFNIWYLDDGTIGGKAITVLEDLKTIIQRFKDIGLELNFSKCELFVSDSVPTITKNEIINKFNNLAPGIKVLSKESLYLLGAPVLDDSIPCFINDQIQKFSQSSDKLFKINSHMALLIVRFCLFVPKLTYALRCSQLFKFQTLSKSVDNILKNTLSKILNCSFVDDRVWNQASLPICYGGLGIRKISSVSLPAFLSSAYSTENLFLSVIRPSLGSVEVPCLTDARNAWLSVCPSTNLPTSTFSQKHWDEPLCKNLHLQLLDSCSTEKDRSRLLAVSEKESGHWLKVIPSKNLGTFIDNTTLSLIVSLRLGARTNLLHRCRCGDLVDVLGHHGLSCLRSAGRMSRHAALNDVIQRALVAAGVPTVLEPVGIVRSDGRRPDGLTLIPWKLGRSLVWDATCVDTLAVSHVPATSKSAGAAASTAANLKRREYATLSESFIFTPFVVETLGPWGPEAHRLVSDICKRLVEASGDRRAGSFFRQRISLAIQRGNAASLLGTSSNDSFLSGNFEEVYYLR

SEQ ID NO: 18776 - protein, 984 aa, Zeuzera pyrina
MLPALTSLPSSSSHIIINDTSLENLIKCEQCSQPRFFRGNRGLKIHVGRVHKRCDTAGIASGPTSLSVPSQSNNLTNSSNSNHNRTPFWKYIGSLKNNVFLIKRIPRGARISVAKSLNLIIQRILNRNDKCDWEELLIFGYRTLCLEQNDKDKISLTQKIKHKCSNSSVPSIHVRPIYKSFNSDSIPKIETKISDGDLRGAAHLLFSSDVLAPNTDETLFALRSKHPSSSVACCLPDPPHPNDVSTRATEEDVLAAINSFKSGSAGGLDGLTPQHYKDLITGSVGDTGKTLLSSLTALINVMLAGKVPPEITDILYGANLCALKKKDGGVRPIAVGATIRRIASKICCRHILSTVSNYFCPTQVGFGSKRGCEAAVHAARAFLTHDGGEVLLKVDIKNAFNSVDRSTLLTQIKQHVPDIYPYLWQSYSSPSKLIYKDNLLHSEVGCQQGDPLGPAIFSLAIHPAICNLNSKFNIWYLDDGTIGGKAITVLEDLKTLIQRFKDIGLELNFSKCELFVSDSVPTITKNEIINKFNNLAPGIKVLSKGSLYLLGAPVLDDSIPCFINDQIQKFSQSSDKLFKINSHMALLIVRFCLFVPKFTYALRCSQLFKFQTLLKSVDNIQKNTLSKILNCSFVDDRVWNQASLPICYGGLGIRKISSVSLPAFLSSAYSTENLFLSVIRPSLGSVEVPCLTDARNAWLSVCPSTNLPTSTFSQKHWDEPLCKNVHLQLLDSCSTEKDRSRLLAVSEKESGHWLKVIPSKNLGTLIDNTTLSLIVSLRLGARTNLLHRCRCGDLVDVLGHHGLSCLRSAGRMSRHAALNDVIRRALVAAGVPAVLEPVGIVRSDGRRPDGLTLIPWKLGRSLVWDATCVDTLAVSHVPATSKSAGAAASTAENLKRRKYATLSESFIFTPFAVETLGPWGPEAHRLVSDICKRLVEASGDRRAGSFFRQRISLAIQRGNAASLLGTLSNDNFLSGNFEEVYYLR

SEQ ID NO: 18777 - protein, 928 aa, Zeuzera pyrina
MLPALTSSPSSSSHIIINDTSLENLIKCEQCSQPRFFRGNRGLKIHVGRVHKRCDTAGIASGPTSLSVPSQSNNLTNSSNSNHNRTPFWKYIGSLKNNVCLIKRIPRGARISGAKSLNLIIQRILNGNDKCDWEELLIFGYRTLCLEQNDKDKISLTQKIKHKCSNSSVPSIHVRPIYKSFNSDSIPKIETKISDGDLRGAAHLLFSSDVLAPNTAETLFALRSKHPSSSVACCLPDPPHPNDVSTRATEEDVLATINSFKSGSAGGLDGLRPQHYKDLITGSVGDTGKTLLSSLTVLINVMLAGKVPPEITDILYGANLCALKKKDGGVRPIAVGATIRRIASKICCRHILSTVSNYFCPKQLGFGSKRGCEAAVHAARAFLTHDGGEVLLKVDIKNAFNSVDRSTLLTQIKQHVPDIYPYLWQSYSSPSKLIYKDNLLHSEVGCQQGDPLGPAIFSLAIHPAICNLNSKFNIWYLDDGTIGGKAITVLKDLKTLIQRFKDIGLELNFSKCELFVSDSVPTITKNEIINKFNNLAPGIKVLSKESLYLLGAPVLDDSIPCFINDQIQKFSHSSDKLFKINSHMALLIVRFCLFVPKLTYALRCAQLFKFQTLLKSVDNILKNTLSKILNCSFVDDRVWNQASLPICYGGLGIRKISSVSLPAFLSSAYSTENLLLSVIRPSLGSVEVPCLTDARNAWLSVCPSTNLPTSTFSQKHWDEPLCKNVHLQLLDSCSTEKDWSRLLAVSEKESGHWWKVIPSKNLGTLIDNTTLSLIVSLRLGARANLLHRCRCGDLVDVLGHHGLSCLRSAGRMSRHAALNDVIRRALVAAGVPAVLEPVGIVRSNGRRPDGLTLIPWKLGRSLVWDATCVDTLAVSHVPATSKSAGAAASTAENLKRRKYATLSESLESKLWVPGAPKAIDWFLIFVRD

SEQ ID NO: 18778 - protein, 648 aa, Zeuzera pyrina
MLAGKVPPEITDILYGANLCALKKKDGGVRPIAVGATIRRIASKICCRHILSTVSNYFCPTQVGFGSKRGCEAAVHAARAFLTHDGGEVLLKVDIKNAFNSVDRSTLLTQIKQHVPDIYPYLWQSYSSPSKLIYKDNLLHSEVGCQQGDPLGPAIFSLAIHPAICNLNSKFNIWYLDDGTIGGKAITVLEDLKTLIQRFKDIGLELNFSKCELFVSDSVPTITKNEIINKFNNLAPGIKVLSKESLYLLGAPVLDDFIPCFINDQIQKFSQSSDKLFKINSHMALLIVRFCLFVPKLTYALRCSQLFKFQTLLKSVDNILKNTLSKILNCSFVDDRVWNQASLPICYGGLGIRKISSVSLPAFLSSAYSTENLFLSVIRPSLGSVEVPCLTDARNAWLSVCPTTNLPTSTFSQKHWDEPLCKNVHLQLLDSCSTEKDRSRLLAVSEKESGHWLKVIPSKNLGTLIDNTTLCLIVSLRLGARTNLLHRCRCGDLVDVLGHHGLSCLRSAGRMSRHAALNDVIRRALVAAGVPAVLEPVGIVRSDGRRPDGLTLIPWKLGRSLVWDATCVDTLAVSHVPATSKSAGAAASTAENLKRRKYATLFESFIFTPFAVETLGPWGPEAHRLVSDICKRLVEASGDRRAGSFFRQ

SEQ ID NO: 18779 - protein, 683 aa, Zeuzera pyrina
MLAGKVPPEITDILYGANLCALKKKDGGVRPIAVGATIRRIASKICCRHILSTVSNYFCPTQVGFGSKRGCEAAVHAARAFLTHDGGEVLLKVDVKNAFNSVDRSTLLTQIKQHVPDIYPYLWQSYSSPSKLIYKDNLLHSEVGCQQGDPLGPAIFSLAIHPAICNLNSKFNIWYLDDGTIGGKAITVLEDLKTLIQRFKDIGLELNFSKCELFVSDSVPTITKNEIINKFNNLAPGIKVLSKESLYLLGAPVLDDSIPCFINDQIQKFSQSSDKLFKINSHMALLIVRFCLFVPKLTYALRCSQLFKFQTLLKSVDNILKNTLSKILNCSFVDDRVWNQASLPICYGGLGIRKISSVSLPAFLSSAYSTENLFLSVIRPSLGSVEVPCLTDARNAWLSVCPSTNLPTSTFSQKHWDEPLCKNVHLQLLDSCSTEKDRSRLLAVSEKESGHWLKVIPSKNLGTLIDNTTLSLIVSLRLGARTNLLHRCRCGDLVDVLGHHGLSCLRSAGRMSRHAALNDVIRRALVAAGVPAVLEPVGIVRSDGRRPDGLTLIPWKLGRSLVWDATCVDTLAVSHVPATSKSAGAAASTAENLKRRKYATLSESFIFTPFAVETLGLWGPEAHRLVSDICKRLVEASGDRRAGSFFRQRISLAIQRGNAASLLGTLSNDSFLSGNFEEVYYLR

SEQ ID NO: 18780 - protein, 984 aa, Zeuzera pyrina
MLPALTSSPSSSSHIIINDTSLENLIKCEQCSQPRFFRGNRGLKIHVGRVHKRCDTAGIASGPTSLSVPSQSNNLTNSSNSNHNRTPFWKYIGSLKNNVCLIKRIPRGARISVAKSLNLIIQRILNRNDKCDWEELLIFGYRTLCLEQNDKDKISLTQKIKHKCSNSSVPSIHVRPIYKSFNSDSIPKIETKISDGDLRGAAHLLFSSDVLAPNTAETLFALRSKHPSSSVACCLPDPPHPNDVSTRATEEDVLAAINSFKSGSAGGLDGLTPQHYKDLITGSVGDTGKTLLSSLTALINVMLAGKVPPEITDILYGANLCALKKKDGGVRPIAVGATIRRIASKICCRHILSTVSNYFCPTQVGFGSKRGCEAAVHAARAFLTHDGGEVLLKVDIKNAFNSVDRSTLLTQIKQHVPDIYPYLWQSYSSPSKLIYKDNLLHSEVGCQQGDPLGPAIFSLAIHPAICNLNSKFNIWYLDDGTIGGKAITVLEDLKTLIQTFKDIGLELNFSKCELFVSDSVPTITKNEIINKFNNLAPGIKVLSKGSLYLLGAPVLDDSIPCFINDQIQKFSQSSDKLFKINSHMALLIVRFCLFVPKFTYALRCSQLFKFQTLLKSVDNILKNTLSKILNCSFVDDRVWNQASLPICYGGLGIRKISSVSLPAFLSSAYSTENLFLSVIRPSLGSVEVPCLTDARNAWLSVCPSTNLPTSTFSQKHWDEPLCKNVHLQLLDSCSTEKDRSRLLAVSEKESGHWLKVIPSKNLGTLIDNTTLSLIVSLRLGARTNLLHRCRCGDLVDVLGHHGLSCLRSAGRMSRHAALNDVIRRALVAAGVPAVLEPVGIVRSDGRRPDGLTLIPWKLGRSLVWDATCVDTLAVSHVPATSKSAGAAASTAENLKRRKYATLSESFIFTPFAVETLGPWGPEAHRLVSDICKRLVEASGDRRAGSFFRQRISLAIQRGNAASLLGTLSNDSFLSGNFEEVYYLR

SEQ ID NO: 18781 - protein, 984 aa, Zeuzera pyrina
MLPALTSSPSSSSHIIINDTSLENLIKCEQCSQPRFFRGNRGLKIHVGRVHKRCDTAGIASGPTSLSVPSQSNNLTNSSNSNHNRTPFRKYIGSLKNNVCLIKRIPRGARISVAKSLNLIIQRILNRNDKCDWEELLIFGYRTLCLEQNDKDKISLTQKIKHKCSNSSVPSIHVRPIYKSFNSDSIPKIETKISDGDLRGAAHLLFSSDVLAPNTAETLFALRSKHPSSSVACCLPDPPHPNDVSTRATEEDVLAAINSFKSGSAGGLDGLTPQHYKDLITGSVGDTGKTLLSSLTALINVMLAGKVPPEITDILYGANFCALKKKDGGVRPIAVGATIRRIASKICCRHILSTVSNYFCPTQVGFGSKRGCEAAVHAARAFLTHDGGEVLLKVDIKNAFNSVDRSTLLTQIKQHVPDIYPYLWQSYSSPSKLIYKDNLLHSEVGCQQGDPLGPAIFSLAIHPAICNLNSKFNIWYLDDGTIGGKAITVLEDLKTLIQRFKDIGLELNFSKCELFVSDSVPTITKNEIINKFNNLAPGIKVLSKGSLYLLGAPVLDDSIPCFINDQIQKFSQSSDKLFKINSHMALLIVRFCLFVPKFTYALHCSQLFKFQTLLKSVDNILKNTLSKILNCSFVDDRVWNQASLPICYGGLGIRKISSVSLPAFLSSAYSTENLFLSVIRPSLGSVEVPCLTDARNAWLSVCPSTNLPTSTFSQKHWDEPLCKNVHLQLLDSCSTEKDRSRLLAVSEKESGHWLKVIPSKNLGTLIDNTTLSLIVSLRLGARTNLLHRCRCGDLVDVLGHHGLSCLRSAGRMSRHAALNDVIRRALVAAGVPAVLEPVGIVRSDGRRPDGLTLIPWKLGRSLVWDATCVDTLAVSHVPATSKSAGAAASTAENLKRRKYATLSESFIFTPFAVETLGPWGPEAHRLVSDICKRLVEASGDRRAGSFFRQRISLAIQRGNAASLLGTLSNDSFLSGNFEEVYYLR

SEQ ID NO: 18782 - protein, 984 aa, Zeuzera pyrina
MLPALTSSPSSSSHTIINDTSLENLIKCEQCSQPRFFRGNRGLKIHVGRVHKRCDTAGIASGPTSLSVPSQSNNLTNSSNSNHNRTPFWKYIGSLKNNVCLIKRIPRGARISVAKSLNLIIQRILNRNDKCDWEELLIFGYRTLCLEQNDKEKISLTQKIKHKCSNSSVPSIHVRPIYKSFNSDSIPKIETKISDGDLRGAAHLLFSSDVLAPNTAETLFALRSKHPSSSVACCLPDPPHPNDVSTRATEEDVLAAINSFKSGSAGGLDGLTPQHYKDLITGSVGDTGKTLLSSLTALINVMLAGKVPPEITDILYGANLCALKKKDGGVRPIAVGATIRRIASKICCRHILSTVSNYFCPTQVGFGSKRGCEAAVHAARAFLTHDGGEVLLKVDIKNAFNSVDRSTLLTQIKQHVPDIYPYLWQSYSSPSKLIYKDNLLHSEVGCQQGDPLGPAIFSLAIHPAICNLNSKFNIWYLDDGTIGGKAITVLEDLKTLIQRFKDIGLELNFSKCELFVSGSVPTITKNEIINKFNNLAPGIKVLSKESLYLLGAPVLDDSIPCFINDQIQKFSQSSDKLFKINSHMALLIVRFCLFVPKFTYALRCSQLFKFQTLLKSVDNILKNTLSKILNCSFVDDRVWNQASLPICYGGLGIRKISSVSLPAFLSSAYSTENLFLSVIRPSLGSVEVPCLTDARNAWLSVCPSTNLPTSTFSQKHWDEPLCKNVHLQLLDSCSTEKDRSRLLAVSEKESGHWLKVIPSKNLGTLIDNTTLSLIVSLRLGARTNLLHRCRCGDLVDVLGHHGLSCLRSAGRMSRHAALNDVIRRALVAAGVPAVLEPVGIVRSDGRRPDGLTLIPWKLGRSLVWDATCVDTLAVSHVPATSKSAGAAASTAENLKRRKYATLSESFIFTPFAVETLGPWGPEAHRLVSDICKRLVEASGDRRAGSFFRQRISLAIQRGNAASLLGTLSNDSLLSGNFEEVYYLR

SEQ ID NO: 18783 - protein, 984 aa, Zeuzera pyrina
MLPALTSSPSSSSHIIINDTSLENLIKCEQCSQPRFFRGNRGLKIHVGRVHKRCDTAGIASGPTSLSVPSQSNNLTNSSNSNHNRTPFWKYIGSLKNNVCLIKRIPRGARISVAKSLNLIIQRILNRNDKCDWEELLIFGYRTLCLEQNDKDKISLTQKIKHKCSNSSVPSIHVRPIYKSFNSDSIPKIETKISDGDLRGAAHLLFSSDVLAPNTAETLFALRSKHPSSSVACCLPDPPHPNDVSTRATEEDVLAAINSFKSGSAGGLDGLTPQHYKDLITGSVGDTGKTLLSSLTALINVMLAGKVPPEITDILYGANLCALKKKDGGVRPIAVGATIRRIASKICCRHILSTVSNYFCPTQVGFGSKRGCEAAVHAARAFLTHDGGEVLLKVDVKNAFNSVDRSPLLTQIKQHVPDIYPYLWQSYSSPSKLIYKDNLLHSEVGCQQGDPLGPAIFSLAIHPAICNLNSKFNIWYLDDGTIGGKAITVLEDLKTLIQRFKDIGLELNFSKCELFVSDSVPTITKNEIMNKFNNLAPDIKVLSKESLYLLGAPVLDDSIPCFINDQIQKFSQSSDKLFKINSHMALLIVRFCLFVPKLTYALRCSQLFKFQTLLKSVDNILKNTLSKILNCSFVDDRVWNQASLPICYGGLGIRKISSVSLPAFLSSAYSTENLFLSVIRPSLGSVEVPCLTDARNAWLSVCPSTNLPTSTFSQKHWDEPLCKNVHLQLLDSCSTEKDRSRLLAVSEKESGHWLKVIPSKNLGTLIDNTTLSLIVSLRLGARTNLLHRCRCGDLVDVLGHHGLSCLRSAGRMSRHAALNDVIRRALVAAGVPAVLEPVGIVRSDGRRPDGLTLIPWKLGRSLVWDATCVDTLAVSHVPATSKSAGAAASTAENLKRRKYATLSESFIFTPFAVETLGPWGPEAHRLVSDICKRLVEASGDRRAGSFFRQRISLAIQRGNAASLLGTLSNDSFLSGNFEEVYYLR

SEQ ID NO: 18784 - protein, 984 aa, Zeuzera pyrina
MLPALTSSPSSSSHIIINDTSLENLIKCEQSSQPRFFRGNRGLKIHVGRVHKRCDTAGIASGPTSLSVPSQSNNLTNSSNSNHNRTPFWKYIGSLKNNVCLIKRIPRGARISVAKSLNLIIQRTLNRNDKCDWEELLIFGYRTLCLEQNDKDKISLTQKIKHKCSNSSVPSIHVRPIYKSFNSDSIPKIETKISDGDLRGAAHLLFSSDVLAPNTAETLFALRSKHPSSSVACCLPDPPHPNDVSTRATEEDVLAAINSFKSGSAGGLDGLTPQHYKDLITGSVGDTGKTLLSSLTALINVMLAGKVPPEITDILYGANLCALKKKDGGVRPIAVGATIRRIASKICCRHILSTVSNYFCPTQVGFGSKRGCEAAVHAARAFLTHDGGEVLLKVDIKNAFNSVDRSTLLTQIKQHVPDIYPYLWQSYSSPSKLIYKDNLLHSEVGCQQGDPLGPAIFSLAIHPAICNLNSKFNIWYLDDGTIGGKAITVLEDLKTLIQRFKDIGLELNFSKCELFVSDSVPTITKNEIINKFNNLAPGIKVLSKGSLYLLGAPVLDDSIPCFINDQIQKFSQSSDKLFKINSHMALLIVRFCLFVLKFTYALRCSQLFKFQTLLKSVDNILKNTLSKILNCSFVDDRVWNQASLPICYGGLGIRKISSVSLPAFLSSAYSTENLFLSVIRPSLGSVEVPCLTDARNAWLSVCPSTNLPTSTFSQKHWDEPLCKNVHLQLLDSCSTEKDRSRLLAVSEKESGHWLKVIPSKNLGTLIDNTTLSLIVSLRLGARTNLLHRCRCGDLVDVLGHHGLSCLRSAGRMSRHAALNDVIRRALVAAGVPAVLEPVGIVRSDGRRPDGLTLIPWKLGRSLVWDATCVDALAVSHVPATSKSAGAAASTAENLKRRKYATLSESSIFTPFAVETLGPWGPEAHRLVSDICKRLVEASGDRRAGSFFRQRISLAIQRGNAASLLGTLSNDSFLSGNFEEVYYLR

SEQ ID NO: 18785 - protein, 983 aa, Zeuzera pyrina
MLPALTSSPSSSSHIIINDTSLENLIKCEQCSQPRFFRGNRGLKIHVGRVHKRCDTAGIASGPTSLSVPSQSNNLTNSSNSNHNRTPFWKYIGSLKNNVCLIKRIPRGARISVAKSLNLIIQRILNRNDKCDWEELLIFGYRTLCLENDKDKISLTQKIKHKCSNSSVPSIHVRPIYKSFNSDSIPKIETKISDGDLRGAAHLLFSSDVLAPNTAETLFALRSKHPSSSVACCLPDPPHPNDVSTRATEEDVLAAINSFKSGSAGGLDGLTPQHYKDLITGSVGDTGKTLLSSLTALINVMLAGKVPPEITDILYGANLCALKKKDGGVRPIAVGATIRRIASKICCRHILSTVSNYFCPTQVGFGSKRGCEAAVHAARAFLTHDGGEVLLKVDVKNAFNSVDRSTLLTQIKQHVPDIYPYLWQSYSSPSKLIYKDNLLHSEVGCQQGDPLGPAIFNLAIHPAICNLNSKFNIWYLDDGTIGGKAITVLEDLKTLIQRFKDIGLELNFSKCELFVSDSVPTITKNEIINKFNNLAPGIKVLSKESLYRLGAPVLDDSIPCFINDQIQKFSQSSDKLFKINSHMALLIVRFCLFVPKLTYALCCSQLFKFQTLLKSVDNILKNTLSKILNCSFVDDRVWNQASLPICYGGLGIRKISSVSLPAFLSSAYSTENLFLSVIRPSLGSVEVPCLTDARNAWLSVCPSTNLPTSTFSQKHWDEPLCKNVHLQLLDSCSTEKDRSRLLAVSEKESGHWLKVVPSKNLGTLIDNTTLSLIVSLRLGARTNLLHRCRCGDLVDVLGHHGLSCLRSAGRMSRHAALNDVIRRALVAAGVPAVLEPVGIVRSDGRRPDGLTLIPWKLGRSLVWDATCVDTLAVFHVPATSKSAGAAASTAENLKRRKYATLSESFIFTPFAVETLGPWGPEAHRLVSDICKRLVEASGDRRAGSFFRQRISLAIQRGNAASLLGTLSNDSFLSGNFEEVYYLR

SEQ ID NO: 18786 - protein, 683 aa, Zeuzera pyrina
MLAGKVPPEITDILYGANLCALKKIDGGVRPIAVGATIRRIASKICCRHILSTVSNYFCPTQVGFGSKRGCEAAVHAARAFLTHDGGEVLLKVDIKNAFNSVDRSTLLTQIKQYVPDIYPYLWQSYSSPSKLIYKDNLLHSEVGCQQGDPLGPAIFSLAIHPAICNLNSKFNIWYLDDGTIGGKAITVLEDLKTLIQRFKDIGLELNFSKCELFVSDSVPTITKNEIINKFNNLAPGIKVLSKGSLYLLGAPVLDDSIPCFINDQIQKFCQSSDKLFKINSHMALLIVRFCLFVPKFTYALRCSQLFKFQTLLKSVDNILKNTLSKILNCSFVDDRVWNQASLPICYGGLGIRKISSVSLPAFLSSAYSTENLFLSVIRPSLGSVEVPCLTDARNAWLSVCPSTNLPTSTFSQKHWDEPLCKNVHLQLLDSCSTEKDRSRLLAVSEKESGHWLKVIPSKNLGTLIDNTTLSLIVSLRLGARTNLLHRCRCGDLVDVLGHHGLSCLCSAGRMSRHAALNDVIRRALVAAGVPAVLEPVGIVRSDGRRPDGLTLIPWKLGRSLVWDATCVDTLAVSHVPATSKSAGAAASTAENLKRRKYATLSESFIFTPFAVETLGPWGPEAHRLVSDICKRLVEASGDRRAGSFFRQRISLAIQRGNAASLLGTLSNDSFLSGNFEEVYYLR

SEQ ID NO: 18787 - protein, 984 aa, Zeuzera pyrina
MLPALTSSPSSSSHIIINDTSLENLIKCEQCSQPRFFRGNRGLKIHVGRVHKRCDTAGIASGPTSLSVPSQSNNLTNSSNSNHNRTPFWKYIGSLKNNVCLIKRIPRGARISVAKSLNLIIQRILNRNDKCDWEELLIFGYRTLCLEQNDKDKISLTQKIKHKCSNSSVPSIHVRPISKSFNSDSIPKIETKISDGDLRGAAHLLFSSVVLAPNTAETLFALRSKHPSSSVACCLPDPPHPNDVSTRATEEDVLAAINSFKSGSAGGLDGLTPQHYKDLITGSVGDTGKTLLSSLTALINVMLAGKVPPEITDILYGANLCALKKKDGGVRPIAVGTTIRRIASKICCRHILSTVSNYFCPTQVGFGSKRGCEAAVHAARAFLTHDGGEVLLKVEVKNAFNSVDRSTLLTQIKQHVPDIYPYLWQSYSSPSKLIYKDNLLHSEVGCQQGDPLGPAIFSLAIHPAICNLNSKFNIWYLDDGTIGGKAITVLEDLKTLIQRFKDIGLELNFSKCELFVSDSVPTITKNEIINKFNNLAPGIKVLSKESLYLLGAPVLDDSIPCFINDQIQKFSQSSDKLFKINSHMALLIVRFCLFVPKLTYALRCSQLFKFQTLLNSVDNILKNTLSKILNCSFVDDRVWNQASLPICYGGLGIRKISSVSLPAFLSSAYSTENLFLSVIRPSLGSVEVPCLTDARNAWLSVCPSTNLPTSTFSQKHWDEPLCKNVHLQLLDSCSTEKDRSRLLAVSEKESGHWLKVIPSKNLGTLIDNTTLSLIVSLRLGARTNLLHRCRCGDLVDVLGHHGLSCLRSAGRMSRHAALNDVIRRALVAAGVPAVLEPVGIVRSDGRRPDGLTLIPWKLGRSLVWDATCVDTLAVSHVPATSKSAGAAASTAENLKRRKYATLSESFIFTPFAVETLGPWGPEAHRLVSDICKRLVEASGDRRAGSFFRQRISLAIQRGNAASLLGTLSNDSFLSGNFKEVYYLR

SEQ ID NO: 18788 - protein, 984 aa, Zeuzera pyrina
MLPALTSSPSSSSHIIINDTSLENLIKCEQCSQPRFFRGNRGLKIHVGRVHKRCDTVGIASGPTSLSVPSQSNNLTNSSNSNHNRTPFWKYIGSLKNNVCLIKRIPRGARISVAKSLNLIIQRILNRNDKCDWEELLIFGYRTLCLEQNDKDKISLTQKIKHKCSNSSVPSIHVRPIYKSFNSDSIPKIETKISDGDLRGAAHLLFSSDVLAPNTAETLFALRSKHPSSSVACCLPDPPHPNDVSTRATEEDVLAAINSFKSGSAGGLDGLTPQHYKDLITGSVGDTGKTLLSSLTALINVMLAGKVPPEITDILYGANLCALKKKDGGVRPIAVGATIRRIASKICCRHILSTVSNYFCPTQVGFGSKRGCEAAVHAARAFLTHDGGEVLLKVDIKNAFNSVDRSTLLTQIKQHVPDIYPYLWQSYSSPSKLIYKDNLLHSEVGCQQGDPLGPAIFSLAIHPAICNLNSKFNIWYLDDGTIGGKAITVLEDLKTLIQRFKDIGLELNFSKCELFVSDSVPTITKNEIINKFNNLAPGIKVLSKGSLYLLGAPVLDDSIPCFINDQIQKFSQSSDKLFKINSHMALLIVRFCLFVPKFTYALRCSQLFKFQTLLKSVDNILKNTLSKILNCSFVDDRVWNQASLPICYGGLGIRKISSVSLPAFLSSAYSTENLFLSVIRPSLGSVEVPCLTDARNAWLSVCPSTNLPTSTFSQKHWDEPLCKNVHLQLLDSCSTEKDRSRLLAVSEKESGHWLKVIPSKNLGTLIDNTTLSLIVSLRLGARTNLLHHCRCGDLVDVLGHHGLSCLRSAGRMSRHAALNDVIRRALVAAGVPAVLEPVGIVRSDGRRPDGLTLIPWKLGRSLVWDATCVDTLAVSHVPATSKSAGAAASTAENLKRRKYATLSESFIFTPFAVETLGPWGPEAHRLVSDICKRLVEASGDRRAGSFFRQRISLAIQRGNAASLLGTLSNDSFLSGNFEEVYYLR

SEQ ID NO: 18789 - protein, 984 aa, Zeuzera pyrina
MLPALTSSPSSSSHIIINDTSLENLIKCEQCSQPRFFRGNRGLKIHVGRVHKRCDTAGIASGPTSLSVPSQSNNLTNSSNSNHNRTPFWKYIGSLKNNVCLIKRIPRGARISVAKSLNLIIQRILNRNDKCDWEELLIFGYRTLCLEQNDKDKISLTRKIKHKCSNSSVPSIHVRPIYKSFNSDSIPKIETKISDGDLRGAAHLLFSSDVLAPNTAETLFALRSKHPSSSVACCLPDPPHPNDVSTRATEEDVLAAINSFKSGSAGGLDGLTPQHYKDLITGSVGDTGKTLLSSLTALINVMLAGKVPPEITDILYGANLCGLKKKDGGVRPIAVGATIRRIASKICCRHILSTVSNYFCPTQVGFGSKRGCEAAVHAARAFLTHDGGEVLLKVDVKNAFNSVDRSTLLTQIKQHVPDIYPYLWQSYSSPSKLIYKDNLLHSEVGCQQGDPLGPAIFSLAIHPAICNLNSKFNIWYLDDGTIGGKAITVLEDLKTLIQRFKDIGLELNFSKCELFVSDSVPTITKNEIINKFNNLAPDIKVLSKESLYLLGAPVLDDSIPCFINDQIQKFSQSSDKLFKINSHMALLIVRFCLFVPKLTYALRCSQLFKFQTLLKSVDNILKNTLSKILNCSFVDDRVWNQASLPICYGGLGIRKISSVSLPAFLSSAYSTENLFLSVIRPSLGSVEVPCLTDARNAWLSVCPSTNLPTSTFSQKHWDEPLCKNVHLQLLDSCSTEKDRSRLLAVSEKESGHWLKVIPSKNLGTLIDNTTLSLIVSLRLGARTNLLHRCRCGDLVDVLGHHGLSCLRSAGRMSRHAALNDVIRRALVAAGVPAVLEPVGIVRSDGRRPDGLTLIPWKLGRSLVWDATCVDTLAVSHVPATSKSAGAAASTAENLKRRKYATLSESFIFTPFAVETLGPWGPEAHRLVSDICKRLVEASGDRRAGSFFRQRISLAIQRGNAASLLGTLSNDSFLSGNFEEVYYLR

SEQ ID NO: 18790 - protein, 984 aa, Zeuzera pyrina
MLPALTSSPSSSSHIIINDTSLENLIKCEQCSQPRFFRGNRGLKIHVGRVHKRCDTAGIASGPTSLSVPSQSNNLTNSSNSNHNRTPFWKYIGSLKNNVCLIKRIPRGARISVAKSLNLIIQRILNRNDKCDWEELLIFGYRTLCLEQNDKDKISLTQKIKHECSNSSVPSIHVRPIYKSFNSDSIPKIETKISDGDLRGAAHLPFSSDVLAPNTAETLFALRSKHPSSSVACCLPDPPHPNDVSTRTTEEDVLAAINSFKSGSAGGLDGLTPQHYKDLITGSVGDTGKTLLSSLTALINVMLAGKVPPEITDILYGANLCALKKKDGGVRPIAVGATIRRIASKICCRHILSTVSNYFCPTQVGFGSKRGYEAAVHAARAFLTHDGGEVLLKVDIKNAFNSVDRSTLLTQIKQHVPDIYPYLWKSYSSPSKLIYKDNLLHSEVGCQQGDPLGPAIFSLAIHPAICNLNSKFNIWYLDDGTIGGKAITVLEDLKTLIQRFKDIGLELNFSKCELFVSDSVPTITKNEIINKFNNLAPGIKVLSKESLYLLGAPVLDVSIPCFINDQIQKFSQSSDKLFKINSYMALLIVRFCLFVPKLTYALRCSQLFKFQTLLKSVDNILKNALSKILNCSFVDDRVWNQASLPICYGGLGIRKISSVSLPAFLSSAYSTENLFLSVIRPSLGSVEVPCLTDARNAWLSVCPSTNLPTSTFSQKHWDEPLCKNVHLQLLDSCSTEKDRSRLLAVSEKESEHWLKVIPSKNLGTLIDNTTLSLIVSLRLGARTNLLHRCRCGDLVDVLGHHGLSCLRSAGRMSRHAALNDVIRRALVAAGVPAVLEPVGIVRSDGRRPDGLTLIPWKLGSSLVWDATCVDTLAVSHVPATSKSAGAAASTAVNLKRRKYAILSESFIFTPFAVETLGPWGPEAHRLVSDICKRLVEASGDRRAGSFFRQRISLAIQRGNAASLLGTLSNDSFLSGNFEEVYYLR

SEQ ID NO: 18791 - protein, 984 aa, Zeuzera pyrina
MLPALTSSPSSSSHIIINDTSLENLIKCEQCSQPRFFRGNRGLKIHVGRVHKRCDTAGIASGPTSLSVPSQSNNLTNSSNSNHNRTPFWKYIGSLKNNVCLIKRIPRGARISVAKSLNLIIQRILNRNDKCDWEELLIFGYRTLCLEQNDKDKISLTQKIKHKCSNSSVPSIHVRPIYKSFNSDSIPKIETKISDGDLRGAAHLLFSSDVLAPNTAETLFALRSKHPSSSVACCLPDPPHPNDVSTRATEEDVLAAINSFKSGSAGGFDGLTPQHYKDLITGSVGDTGKTLLSSLTALINVMLAGKVPPEITDILYGANLCALKKKDGGVRPIAVGATIRRIASKICCRHILSTVSNYFCPTQVGFGSKRGCEAAVHAARAFLTHDGGEVLLKVDIKNAFNSVDRSTLLTKIKQHVPDIYPYLWQSYSSPSKLIYKDNLLHSEVGCQQGDPLGPAIFSLAIHPAICNLNSKFNIWYLDDGTIGGKAITVLEDLKTIIQRFKDIGLELNFSKCELFVSDSVPTITKNEIINKFNNLAPGIKVLSKESLYLLGAPVLDDSIPCFINDQIQKFSQSSDKLFKINSHMALLIVRFCLFVPKLTYALRCSQLFKFQMLLKSVDNILKNTLSKILNCSFVDDRVWNQASLPICYGGLGIRKISSVSLPAFLSSVYSTENLFLSVIRPSLGSVEVPCLTDARNAWLSVCPSTNLPTSTFSQKHWDEPLCKNVHLQLLDSCSTEKDRSRLLAVSEKESGHWLKVIPSKNLGTLIDNTTLSLIVSLRLGARTNLLHRCRCGDLVDVLGHHGLSCLRSAGRMSRHAALNDVIRRALVAAGVPAVLEPVGIVRSDGRRPDGLTLIPWKLGRSLVCDATCVDTLAVSHVPATSKSAGAAASTAENLKRHKYATLSESFIFTPFAVETLGPWGPEAHRLVSDICKRLVEASGDRRAGSFFRQRISLAIQRGNAASLLGTLSNDSFLSGNFEEVYYLR

SEQ ID NO: 18792 - protein, 984 aa, Zeuzera pyrina
MLPALTSSPSSSSHIIINDTSLENLIKCEQCSQPRFFRGNRGLKIHVGRVHKRCDTAGIASGPTSLSVPSQSNNLTNSSNSNHNRTPFWKYIGSLKNNVCLIKRIPRGARISVVKSLNLIIQRILNRNDKCDWEELLIFGYRTLCLEQNDKDKISLTQKIKHKCSNSSVPSIHVRPIYKSFNSDSIPKIETKISDGDLRGAAHLLFSSDVLAPNTAETLFALRSKHPSSSVACCLPDPPHPNDVSTRATEEDVLAAINSFKSGSAGGLDGLTPQHYKDLITGSVGDTGKTLLSSLTALINVMLAGKVPPEITDILYGANLCALKKKDGGVRPIAVGATIRRIASKICCRHILSTVSNYFCPTQVGFGSKRGCEAAVHAARAFLTHDGGEVLLKVDVKNAFNSVDRSTLLTQIKQHVPDIYPYLWQSYSSPSKLIYKDNLLHSEVGCQQGDPLGLAIFSLAIHPAICNLNSKFNIWYLDDGTIGGKAITVLEDLKTLIQRFKDNGLELNFSTCELFVSDSVPTITKNEIINKLNNLAPGIKVLSKESLYLLGAPVLDDSIPCFINDQIQKFSQSSDKLFKINSHMALLIVRFCLFVPKLTYALRCSQLFKFQTLLKSVDNILKNTLSKILNCSFVDDRVWNQASLPICYGGLGIRKISSVSQPAFLSSAYSTENLFLSVIRPSLGSVEVPCLTDARNAWLSVCPSTNLPTSTFSQKQWDEPLCKNVHLQLLDSCSTEKDRSRLLAVSEKESGHWLKVIPSKNLGTLIDNTTLSLIVSLRLGARTNLLHRCRCGDLVDVLGHHGLSCLRSAGRMSRHAALNDVIRRALVAAGVPAVLEPVGIVRSDGRRPDGLTLIPWKLGRSLLWDATCVDTLAVSHVPVTSKSAGAAASTAENLKRRKYATLSESFIFTPFAVETLGPWGPEAHRLVSDICKRLVEASGDRRAGSFFRQRISLAIQRGNAASLLGTLSNDSFLSGNFEEVYYLR

SEQ ID NO: 18793 - protein, 984 aa, Zeuzera pyrina
MLPALTSSPSSSSHIIINDTSLENLIKCEQCSQPRFFRGNRGLKIHVGRVHKRCDTAGIASGPTSLSVPSQSNNLTNSSNSNHNRTPFWKYIGSLKNNVCLIKRIPRGARISVAKSLNLIIQRILNRNDKCDWEELLIFGYRTLCLEQNDKDKISLTQKIKHKCSNSSVPSIHVRPIYKSFNSDSIPKIETKISDGDLRGAAHLLFSSDVLAPNTAETLFALRSKHPSSSVTCCLPDPPHPNDVSTRATEEDVLAAINSFKSGSAGGLDGLTPQHYKDLITGSVGDTGKTLLSSLTALINVMLAGKVPPEITDILYGANLCALKKKDGGVRPIAVGATIRRIASKICCRHILSTVSNYFCPTQVGFGSKRGCEAAVHAARAFLTHDGGEILLKVDVKNAFNSVDRSTLLTQIKQHVPDIYPYLWQSYSSPSKLIYKDNLLHSEVGCQQGDPLGPAIFSLAIHPAICNLNSKFNIWYLDDGTIGGKAITVLEDLKTLIQRFKDIGLELNFSKCELFVSDSVPTITKNEIINKFNNLAPGIKVLSKESLYLLGAPVLDDSIPCFINDQIQKFSQSSDKLFKINSHMALLIVRFCLFVPKLTYALRCSQLFKFQTLLKSVDNILKNTLSKILNCSFVDDRVWNQASLPICYGGLGIRKISSVSLPAFLSSAYSTENLFLSVIRPSLGSVEVPCLTDARNAWLSVCPSTNLPTSTFSQKHWDEPLCKNVHLQLLDSCSTEKDRSRLLAVSEKESGHWLKVIPSKNLGTLIDNTTLSLIVSLRLGARTNLLHRCRCGDLVDVLGHHGLSCLRSAGRMSRHAALNDVIRRALVAAGVPAVLEPVGIVRSDGRRPDGLTLIPWKLGRSLVWDATCVDTLAVSHVPATSKSAGAAASTAENLKRRKYATLSESFIFTPFAVETLGPWGPEAHRLVSDICKRLVEASGDRRAGSFFRQRISLAIQRGNAASLLGTLSNDSFLSGNFEEVYYLR

SEQ ID NO: 18794 - protein, 984 aa, Zeuzera pyrina
MLPALTSSPSSSSHIIINDTSLENLIKCEQCSQPRFFRGNRGLKIHVGRVHKRCDTAGIASGPTSLSVPSQSNNLTNSSNSNHNRTPFWKYIGSLKNNVCLIKRIPRGARISVAKSLNLIIQRILNRNDKCDWEELLIFGYRTLCLEQNDKDKISLTQKIKHKCSNSSVPSIHVRPIYKSFNSDSIPKIETKISDGDLRGAAHLLFSSDALAPNTAETLFALRSKHPSSSVACCLPDPPHPNDVSTRATEEDVLAAINSFKSGSAGGLDGLTPQHYKDLITGSVGDTGKTLLSSLTALINVMLAGKVPPEITDILYGANLCALKKKDGGVRPIAVGATIRRIASKICCRHILSTVSNYFCPTQVGFGSKRGCEAAVHAARAFLTHDGGEVLLKVDIKNAFNSVDRSTLLTQIKQHVPDIYPYLWQSYSSPSKLIYKDNLLHSEVGCQQGDPLGPAIFSLAIHPAICNLNSKFNIWYLDDGTIGGKAITVLEDLKTLIQRFKDIGLELNFSKCELFVSDSVPTITKNEIINKFNNLAPGIKVLSKGSLYLLGAPVLDDSIPCFINDQIQKFSQSSDKLFKINSHMALLIVRFCLFVPKFTYALRCSQLFKFQTLLKSVDNILKNTLSKILNCSFVDDRVWNQASLPICYGGLGIRKISSVSLPAFLSSAYSTENLFLSVIRPSLGSVEVPCLTDARNAWLSVCPSTNLPTSTFSQKHWDEPLCKNVHLQLLDSCSTEKDRSRLLAVSEKESGHWLKVIPSKNLGTLIDNTTLSLIVSLRLGARTNLLHRCRCGDLVDVLGHHGLSCLRSAGRMSRHAALNDVIRRALVAAGVPAVLEPVGIVRSDGRRPDGLTLIPWKLGRSLVWDATCVDTLAVSHVPATSKSAGAAASTAENLKRRKYATLSESFIFTPFAVETLGPWGPEAHRLVSDICKRLVEASGDRRAGSFFRQRISLAIQRGNAASLLGTLSNDSFLSGNFEEVYYLR

SEQ ID NO: 18795 - protein, 983 aa, Zeuzera pyrina
MLPALTSSPSSSSHIIINDTSLENLIKCEQCSQSRFFRGNRGLKIHVGRVHKRCDTAGIASGPTSLSVPSQSNNLTNSSNSNHNRTPFWKYIGSLKNNVCLIKRIPRGARISVAKSLNLIIQRILNRNDKCDWEELLIFGYRTLCLEQNDKDKISLTQKIKHKCSNSSVPSIHVRPIYKSFNSDSIPKIETKISDGDLRGAAHLLFSSDVLAPNTAETLFALRSKHPSSSVACCLPDPPHPNDVSTRATEEDVLAAINSFKSGSAGGLDGLTPQHYKDLITGSVGDTGKTLLSSLTALINVMLAGKVPPEITDILYGANLCALKKKDGGVRPIAVGATIRRIACKICCRHILSTVSNYFCPTQVGFGSKRGCEAAVHAARAFLTHDGGEVLLKVDIKNAFNSVDRSTLLTQIKQHVPDIYPYLWQSYSSPSKLIYKDNLLHSEVGCQQGDPLGPAIFSLAIHPAICNLNSKFNIWYLDDGTIGGKAITVLEDLKTLIQRFKDIGLELNFSKCELFVSDSVPTITKNEIINKFNNLAPGIKVLSKESLYLLGAPVLDDSIPCFINDQIQKFSQSSDKLFKINSHMALLIVRFCLFVPKLTYALRCSQLFKFQTLLKSVDNILKNTLSKILNCSFVDDRVWNQASLPICYGGLGIRKISSVSLPAFLSSAYSTENLFLSVIRPSLGSVEVPCLTDARNAWLSVCPSTNLPTSTFSQKHWDEPLCKNVHLQLLDSCSTEKDRSRLLAVSEKESGHWLKVIPSKNLGTLIDNTTLSLIVSLRLGARTNLLHRCRCGDLVDVLGHHGLSCLRSAGMSRHAALNDVIRRALVAAGVPAVLEPVGIVRSDGRRPDGLTLIPWKLGRSLVWDATCVDTLAVSHVPATSKSAGAAASTAENLKRRKYVTLSESFIFTPFAVETLGPWGPEAHRLVSDICKRLVEASGDRRAGSFFRQRISLAIQRGNAASLLGTLSNDSFLSGNFEEVYYLR

SEQ ID NO: 18796 - protein, 984 aa, Zeuzera pyrina
MLPALTSSPSSSSHIIINDTSLENLIKCEQCSQPRFFRGNRGLKIHVGRVHKLCDTAGIASGPTSLSVPSQSNNLTNSSNSNHNRTPFWKHIGSLKNNVYLIKRIPRGARISVAKSLNLIIQRILNRNDKCDWEELLIFGYRTLCLEQNDKDKISLTQKIKHKCSNSSVPSIHVRPIYKSFNSDSIPKIETKISDGDLRGAAHLLFSSDVLAPNTAETLFALRSKHPSSSVACCLPDPPHPNDVSTRATEEDVLAAINSFKSGSAGGLDGLTPQHYKDLITGSVGDTGKTLLSSLTALINLMLAGKVPPEITDILYGANLCALKKKDGGVRPIAVGATIRRIASKICCRHILSTVSNYFCPTQVGFGSKRGCEAAVHAARAFLTHDGGEVLLKVDIKNAFNSVDRSTLLTQIKQHVPDIYPYLWQSYSSPSKLIYKDNLLHSEVGCQQGDPLGPAIFSQAIHPAICNLNSKFNIWYLDDGTIGGKAITVLEDLKTLIQRFKDIGLELNFSKCELFVSDSVPTITKNEIINKFNNLAPGIKVLSKESLYLLGAPVLDDSIPCFINDQIQKFSQSSDKLFKINSHMALLIVRFCFFVPKLTYALRCSQLFKFQTLLKSVDNILKNTLSKILNCSFVDDRVWNQASLPICYGGLGIRKISSVSLPAFLSSAYSTENLFLSVIRPSLGSVEVPCLTDARNAWLSVCPSTNLPTSTFSQKHWDEPLCKNVHLQLLDSCSTEKDRSRLLAVSEKESGHWLKVIPSKNLGTLIDNTTLSLIVSLRLGARTNLLHRCRCGDLVDVLGHHGISCLRSAGRMSRHAALNDVIRRALVAAGVPAVLEPVGIVRSDGRRPDGLTLIPWKLGRSLVWDATCVDTLAVSHVPATSKSAGAAASTAENLKRRKYATLSESFIFTPFAVETLGPWGPEAHRLVSDICKRLVEASGDRRAGSFFRQRISLAIQRGNAASLLGTLSNDSFLSCNFEEVYYLR

SEQ ID NO: 18797 - protein, 935 aa, Zeuzera pyrina
MLPALTSSPSSSSHIIINDTSLENLIKCEQCSQSRFFRGNRGLKIHVGRVHKRCDTAGIASGPTSLSVPSQSNNLTNSSNSNHNRTPFWKYIGSLKNNVCLIKRIPRGARISVAKSLNLIIQRILNRNDKCDWEELLIFGYRTLCLEQNDKDKISLTQKIKHKCSNSSVPSIHVRPIYKSFNSDSIPKIETKISDGDLRGAAHLLFSSDVLAPNTAETLFALRSKHPSSSVACCLPDPPHPNDVSTRATEEDVLAAINSFKSGSAGGLDGLTPQHYKDLITGSVGDTGKTLLSSLTALINVMLAGKVPPEITDILYGANLCALKKKDGGVRPIAVGATIRRIACKICCRHILSTVSNYFCPTQVGFGSKRGCEAAVHAARAFLTHDGGEVLLKVDIKNAFNSVDRSTLLTQIKQHVPDIYPYLWQSYSSPSKLIYKDNLLHSEVGCQQGDPLGPAIFSLAIHPAICNLNSKFNIWYLDDGTIGGKAITVLEDLKTLIQRFKDIGLELNFSKCELFVSDSVPTITKNEIINKFNNLAPGIKVLSKESLYLLGAPVLDDSIPCFINDQIQKFSQSSDKLFKINSHMALLIVRFCLFVPKLTYALRCSQLFKFQTLLKSVDNILKNTLSKILNCSFVDDRVWNQASLPICYGGLGIRKISSVSLPAFLSSAYSTENLFLSVIRPSLGSVEVPCLTDARNAWLSVCPSTNLPTSTFSQKHWDEPLCKNVHLQLLDSCSTEKDRSRLLAVSEKESGHWLKVIPSKNLGTLIDNTTLSLIVSLRLGARTNLLHRCRCGDLVDVLGHHGLSCLRSAGMSRHAALNDVIRRALVAAGVPAVLEPVGIVRSDGRRPDGLTLIPWKLGRSLVWDATCVDTLAVSHVPATSKSAGAAASTAENLKRRKYVTLSESFIFTPFAVETLGPWGPEAHRLVSLNTNFGYI

SEQ ID NO: 18798 - protein, 984 aa, Zeuzera pyrina
MLPALTSSPSSSSHTIINDTSLENLIKCEQCSQPRFFRGNRGLKIHVGRVHKRCDTAGIASGPTSLSVPSQSNNLTNSSNSNHNRTPFWKYIGSLKNNVCLIKRIPRGARISVAKSLNLIIQRILNRNDKCDWEELLIFGYRTLCLEQNDKDKISLTQKIKHKCSNSSVPSIHVRPIYKSFNSDSIPKIETKISDGDLRGAAHLLFSSDVLAPNTAETLFALRSKHPSSSVACCLPDPPHPNDVSTRATEEDVLAAINSFKSGSAGGLDGLTPQHYKDLITGSVGDTGKTLLSSLTALINVMLAGKVPPEITDILYGANLCALKKKDGGVRPIAVGATIRRIASKICCRHILSTVSNYFCPTQVGFGSKRGCEAAVHAARAFLTHDGGEVLLKVDIKNAFNSVDRSTLLTQIKQHVPDIYPYLWQSYSSPSKLIYKDNLLHSEVGCQQGDPLGPAIFSLAIHPAICNLNSKFNIWYLDDGTIGGKAITVLEDLKTLIQRFKDIGLELNFSKCELFVSDSVPTITKNEIINKFNNLAPGIKVLSKESLYLLGAPVLDDSIPCFINDQIQKFSQSSDKLFKINSHMALLVVRFCLFVPKFSYALRCSQLFKFQTLLKSVDNILKNTLSKILNCSFVDDRVWNQASLPICYGGLGIRKISSVSLPAFLSSAYSTENLFLSVIRPSLGSVEVPCLTDARNAWLSVCPSTNLPTSTFSQKHWDEPLCKNVHLQLLDSCSTEKDRSRLLAVSEKESGHWLKVIPSKNLGTLIDNTTLSLIVSLRLGARTNLLHRCRCGDLVDVLGHHGLSCLRSAGRMSRHAALNDVIRRALVAAGVPAVLEPVGIVRSDGRRPDGLTLIPWKLGRSLVWDATCVDTLAVSHVPATSKSAGAAASTAENLKRRKYATLSESFIFTPFAVETLGPWGPEAHRLVSDICKRLVEASGDRRAGSFFRQRISLAIQRGNAASLLGTLSNDSLLSGNFEEVYYLR

SEQ ID NO: 18799 - protein, 984 aa, Zeuzera pyrina
MLPALTSSPSSSSHIIINDTSLENLIKCEQCSQPRFFRGNRGLKIHVGRVHKRCDTAGIASGPTSLSVPSQSNNLTNSSNSNHNRTPFWKYIGSLKNNVCLIKRIPRGARISVAKSLNLIIQRILNRNDKCDWEELLIFGYRTLCLEQNDKDKISLTQKIKHKCSNSSVPSIHVRPIYKSFNSDSIPKIETKISDGDLRGAAHLLFSSDVLAPNTAETLFALRSKHPSSSVACCLPDPPHPNNVSTRATKEDVLAAINSFKSGSAGGLDGLTPQHYKDLITGSVGDTGKTLLSSLTALINVMLAGKVPPEITDILYGANLCALKKKDGGVRPIAVGATIRRIASKICCRHILSTVSNYFCPTQVGFGSKRGCEAAVHAARAFLTHDGGEVLLKVDVKNAFNSVDRSTLLTQIKQHVPDIYPYLWQSYSSPSKLIYKDNLLHSEVGCQQGDPLGPAIFSLAIHPAICNLNSKFNIWYLDDGTIGGKAITVLEDLKTLIQSFKDIGLELNFSKCELFVSDSVPTITKNEIINKFNNLAAGIKVLSKESLYLLGAPVLDDSIPCFINDQIQKFSQSSDKLFKINSHMALLIVRFCLFVPKLTYALRCSQLFKFQTLLKSVDNILKNTLSKILNCSFVDDRVWNQASLPICYGGLGIRKISSVSLPAFLSSAYSTENLFLSVIRPSLGSVEVPCLTDARNAWLSVCPSTNLPTSTFSQKHWDEPLCKNVHLQLLDSCSTEKDRSRLLAVSEKESGHWLKVIPSKNLGTLIDNTTLSLIVSLRLGARTNLLHRCRCGDLVDVLGHHGLSCLRSAGRMSRHAALNDVIRRALVAAGVPAVLEPVGIVRSDGRRPDGLTLIPWKLGRSLVWDATCVDTLAVSHVPATSKSAGAAASTAENLKRRKYATLSESFIFTPFAVETLGPWGPKAHRLVSDICKRLVEASGDRRAGSFFRQRISLAIQRGNAASLLGTLSNDSFLSGNFEEVYYLR

SEQ ID NO: 18800 - protein, 918 aa, Zeuzera pyrina
MLPALTSSPSSSSHTIINDTSLENLIKCEQCSQPRFFRGNRGLKIHVGRVHKRCDTAGIASGPTSLSVPSQSNNLTNSSNSNHNRTPFWKYIGSLKNNVCLIKRIPRGARISVAKSLNLIIQRILNRNDKCDWEELLIFGYRTLCLEQNDKDKISLTQKIKHKCSNSSVPSIHVRPIYKSFNSDSIPKIETKISDGDLRGAAHLLFSSDVLAPNTAETLFALRSKHPSSSVACCLPDPPHPNDVSTRATEEDVLAAINSFKSGSAGGLDGLTPQHYKDLITGSVGDTGKTLLSSLTALINVMLAGKVPPEITDILYGANLCALKKKDGGVRPIAVGATIRRIASKICCRHILSTVSNYFCPTQVGFGSKRGCEAAVHAARAFLTHDGGEVLLKVDIKNAFNSVDRSTLLTQIKQHVPDIYPYLWQSYSSPSKFIYKDNLLHSEVGCQQGDPLGPAIFSLAIHPAICNLNSKFNIWYLDDGTIGGKAITVLEDLKTLIQRFKDIGLELNFSKCELFVSDSVPTITKNEIINKFNNLAPGIKVLSKESLYLLGAPVLDDSIPCFINDQIQKFSQSSDKLFKINSHMALLIVRFCLFVPKFTYALRCSQLFKFQTLLKSVDNILKNTLSKILNCSFVDDRVWNQASLPICYGGLGIRKISSVSLPAFLSSAYSTENLFLSVIRPSLGSVEVPCLTDARNAWLSVCPSTNLPTSTFSQKHWDEPLCKNVHLQLLDSCSTEKDRSRLLAVSEKESGHWLKVIPSKNLGTLIDNTTLSLIVSLRLGARTNLLHRCRCGDLVDVLGHHGLSCLRSAGRMSRHAALNDVIRRALVAAGVPAVLEPVGIVRSDGRRPDGLTLIPWKLGRSLVWDATCVDTLAVSHVPATSKSAGAAASTAENLKRRKYATLSESFIFTPFAVETLGP

SEQ ID NO: 18801 - protein, 984 aa, Zeuzera pyrina
MLPALTSSPSSSSHIIINDTSLENLIKCEQCSQPRFFRGNRGLKIHVGRVHKRCDTAGIASGPTSLSVPSQSNNLTNFSNSNHNRTPFWKYIGSLKNNVCLIKRIPRGARISVAKSLNLIIQRILNRNDKCDWEELLIFGYRTLCLEQNDKDKISLTQKIKHKCSNSSVPSIHVRPIYKSFNSDSIPKIETKISDGDLRGAAHLLFSSDVLAPNTAETLFALRSKHPSSSVACCLPDPPHPNDVSTRATEEDVLAAINSFKSGSAGGLDGLTPQHYKDLITGSVGDTGKTLLSSLTALINVMLAGKVPPEITDILYGANLCALKKKDGGVRPIAVGATIRRIASKICCRHILSTVSNYFCPTQVGFGSKRGCEAAVHAARAFLTHDGGEVLLKVDIKNAFNSVDRSTLLTQIKQHVPDIYPYLWQSYSSPSKLIYKDNLLHSEVGCQQGDPLGPAIFSLAIHPAICNLNSKFNIWYLDDGTIGGKAITVLEDLKTLIQRFKDIGLELNFSKCELFVSDSVPTITKNEIINKFNNLAPGIKVLSKESLYLLGAPVLDDSIPCFINDQIQKFSQSSDKLFKINSHMALLIVRFCLFVPKLTYALRCSQLFKFQTLLKSVDNILKNTLSKILNCSFVDDRVWNQASLPICYGGLGIRKISSVSLPAFLSSAYSTENLFLSVIRPSLGSVEVPCLTDARNAWLSVCPSTNLPTSTFSQKHWDEPLCKNVHLQLLDSCSTEKDRSRLLAVSEKESGHWLKVIPSKNLGTLIDNTTLSLIVSLRLGARTNLLHRCRCGDLVDVLGHHGLSCLRSAGRMSRHAALNDVIRRALVAAGVPAVLEPVGIVRSNGRRPDGLTLIPWKLGRSLVWDATCVDTLAVSHVSATSKSAGAAASTAENLKRRKYATLSKSFIFTPVAVETLGPWGPEAHRLVSDICKRLVEASGDRRAGSFFRQRISLAIQRGNAASLLGTLSNDSFLSGNFEEVYYLR

SEQ ID NO: 18802 - protein, 984 aa, Zeuzera pyrina
MLPALTSSPSSSSHIIINDTSLENLIKCEQCSQPRFFRGNRGLKIHVGRVHKRCDTAGIASGPTSLSVPSQSNNLTNSSNSNHNRTPFWKYIGSLKNNVCLIKRIPRGARISVAKSLNLIIQRILNRNDKCDWEELLIFGYRTLCLEQNDKDKISLTQKIKHKCSNSSVPSIHVRPIYKSFNSDSIPKIETKISDGDLRGAAHLLFSSDVLAPNTAETLFALRSKHPSSSVACCLPDPPHPNDVSTRATEEDVLAAINSFKSGSAGGLDGLTSQHYKDLITSSVGDTGKTLLSSLTALINVMLAGKVPPEITDILYGANLCALKKKDGGVRPIAVGATIRRIASKICCRHILSTVSNYFCPTQVGFGSKRGCEAAVHAARAFLTHDGGEVLLKVDIKNAFNSVDRSTLLTQIKQHVPDIYPYLWQSYSSPSKLIYKDNLLHSEVGCQQGDPLGPAIFSLAIHPAICNLNSKFNIWYLDDGTIGGKAITVLEDLKTLIQRFKDIGLELNFSKCELFVSDSVPTITKNEIINKFNNLAPGIKVLSKESLYLLGAPVLDDSIPCFINDQIQKFSQSSDKLFKINSHMALLIVRFCLFVPKLTYALRCSQLFKFQTLLKSVDNILKNTLSKILNCSFVDDRVWNQASLPICYGGLGIRKISSVSLPAFLSSAYSTENLFLSVIRPSLGSVEVPCLTDARNAWLSVCPSTNLPTSTFSQKHWDEPLCKNVHLQLLDSCSTEKDRSRLLAVSEKESGHWLKVIPSKNLGTLIDNTTLSLIVSLRLGARTNLLHRCRCGDLVDVLGHHGLSCLRSAGRMSRHAALNDVIRRALVAAGVPAVLEPVGIVRSDGRRPDGLTLIPWKLGRSLVWDATCVDTLTVSHVPATSKSAGAAASTAENLKRRKYATLSESFIFTPFAVETLGPWGPEAHRLVSDICKRLVEASGDRRAGSFFRQRISLAIQRGNAASLLGTLSNDSFLSGNFEEVYYLR

SEQ ID NO: 18803 - protein, 984 aa, Zeuzera pyrina
MLPALTSSPSSSSHIIINDTSLENLIKCEQCSQPRFFRGNRGLKIHVGRVHKRCDTAGIASGPTSLSVPSQSNNLTNSSNSNHNRTPFWKYIGSLKNNVCLIKRIPRGARISVAKSLNLIIQRILNQNDKCDWEELLIFGYRTLCLEQNDKDKISLTQKIKHKCSNSSVPSIHVRPIYKSFNSDSIPKIETKISDGDLRGAAHLLFSSDVLAPNTAETLFALRSKHPSSSVACCLPDAPHPNDVSTRATEEDVLAAINSFKSGSAGGLDGLTPQHYKDLITASVGDTGKTLLSSLTALINVMLAGKVPPEMTDILYGANLCALKKKDGGVRPIAVGATIRRIASKICCRHILSTVSNYFCPTQVGFGSKRGCEAAVHAARAFLTHDGGEVLLKVDIKNAFNSVDRSTLLTQIKQHVPDIYPYLWQSYSSPSKLIYKDNLLHSEVGCQQGDPLGPAIFSLAIHPAICSLNSKFNIWYLDDGTIGGKAITVLEDLKTLIQRFKDIGLELNFSKCELFVSDSVPTITKNEIINKFNNLAPGIKVLSKESLYLLGAPVLDDSIPCFINDQIQKFSQSSDKLFKINSHMALLIVRFCLFVPKLTYALRCSQLFKFQTLLKSVDNILKNTLSKILNCSFVDDRVWNQASLPICYGGLGIRKISSVSLPAFLSSAYSTENLFLSVIRPSLGSVEVPCLTDARNAWLSVCPSTNLPTSTFSQKHWDEPLCKNVHLQLLDSCSTEKDRSRLLAVSEKESGHWLKVIPSKNLGTLIDNTTLSLIVSLRLGARTNLLHRCRCGDLVDVLGHHGLSCLRSAGRMSRHAALNDVIRRALVAAGVPAVLEPVGIVRSDGRRPDGLTLIPWKLGRSLVWDATCVDTLAVSHVPATSKSAGAAASTAENLKRRKYATLSESFIFTPFAVETLGPWGPEAHRLVSDICKRLVEASGDRRAGSFFRQRISLAIQRGNAASLLGTLSNDSFLSGNFEEVYYLR

SEQ ID NO: 18804 - protein, 984 aa, Zeuzera pyrina
MLPALTSSPSSSSHISNDTSLENLIKCEQCSQPRFFRGNRGLKIHVGRVHKRCDTAGIASGPTSLSVPSQSNNLTNSSNSNHNRTPFWKYIGSLKNNVCLIKRIPRGARISVAKSLNLIIQRILYRNDKCDWEELLVFGYRTLCLEQNDKDKISLTQKIKHKCSNYSVPSIHVRPIYKSFSSDSIPKIESKISDGDLRSAAHLLFSSDVLAPNTAETLFALRSKHTSSSVACCLPDPPHPNDMSTRATEEDVLAAINSFKSGSAGGLDGLTPQHYKDLITGSVGDTGKTLLSSLTALINIMLAGKVPPEITDILYGANLCALKKKHGGVRPTAVGATIRRIASKICCRHILPTVSKYFCPTQVGFGSKRECETAVHAARAFLTHDGGEVLLKVAIKNTFNSVDRSTLLTQIKQHVPDIYPYLWQSYSSPSKLIYKDNLLHSEVGCQQDDPLGPAIFSLAIHPAICNLNSKFNIWYLDDGTIERKAITVIEDLKTLIQRFKDIGLELNFSKCELFVSDSVSIITKNEIINKFNNLAPNIKVLSKESLYLLGAPVLDDSILYFINDQIQKFSQSSDKLLKINSHLALLIVRFCLFVLKCTYALRCSQLFKFQTLLKSVDNILKNTLSKILNCSFVDDRVWNQASLPICYGGLGIRKISSVSLPAFLSSAYSTENLFLAVIRPSLGSVEVPCLPDARNAWLSVCPSTNLPTSTFSQKHWDEPLLCKNFHLQLLDSCSTEKDRSRLLAVSEKESGHWLKVIPSKNLGTLIDNTTLSPIVSLRLGARTDLTHRCRCSDLVDVLGHHGFSCLRSAGRMSRHAALNDVIRRALVAAGVPAVLEPVGIARSDVRRPDGLTLIPWKLERSLVWDATYVDTLAVSHVPATSKSAGAAASAAENLKRRKYATLSESYIFTPFAVETLGPWGPEAHRLVSDICKRLVEASGDRRAGSFFRQRISLAIQRGNAASLLDTLSNYSFLSGNFEEVYYLR

SEQ ID NO: 18805 - protein, 966 aa, Ganaspis brasiliensis
MHRRSKHPEFADARINTERVRARWSDEELRLMARQEAQLAREGVRFMNQELATVFTERSLESIKSQRKAAKYKQMVAEISAELDESSNEDSTEDYESLHENDQLNPFVVFFRAVEQVQDQVEQDKYYRNELVQICNDVERDDKQRIMDRVALYLKKILPKPKPSLTTARGNRDNVIKSRREQRREEYARVQKQYSKNRSACINTILQGTASEKQPDRNLMEQYWCNVLTQVPDIAEPPVFEREEGQPLKEVWLPISLEEIGHSKMEVNTAPGPDGLTGREYNVMPDGVKQCLFILFLWSQQLPEVMLASRTIFIPKKGCEDDPAKYRPITISSVLVRGFHKILAKRIELATKIDERQRGFRTGVDGCRDNVFILDYILKQQNQLHKPLYMASLDVAKAFPSVSHEALLEGVRSFGASDQLFNYLSFVYQKGYTVLQGDTWCSGKVYPRRGVRQGDPLSSPLFNIITHKMLRVLPKETGVAVGVRKVNATSFVDDTNFYAETPRGLQLMIDVAVEFLQQCGLNINIDKSFTLGLKPSGRDKVTTVDIKTTFKIGNTRLKVMRRSDEWVYLGIHFNWAGRKRTVVKDELKQMIEKLSKGPLKPQQSLFALRVSVLPKLYYKLALGNVMLGTLKCADKTVRGAIRSWLKLPHDVPNAYIHAPVKEGGLGIPSMRWTAPLIRLQRLESIGANIIPNDDVYLGKELETCKRRLIQDRQLLSSRNQINSMWSKLLHKSVDGGGLSESVKTPGQHSWVADGTKFLSSSDFINSVKLRISALPTRSRVARGRRSDRNCRAGCYVPETLNHVLQVCHRTHKKRIDRHNAIVNYVARKLSQRGYEVQQEPRIQTSDGLRKPDILAWKDKHGFVLDAQVVGEQSELKAAHDRKVSYYNSNDIQNYVKSKLPEGGSFTFGYITLNWKGVWAVSSVENLKALKFGRNDFKILSSRAIIGGIAGFRMFNRTTRTIVGAGD

SEQ ID NO: 18806 - protein, 1099 aa, Campodea augens
MGYMRKMHDIWCQRHPELAHFSAQQLRDQVASTKKKHPAMFSNSQGTLTPSRGTQVPQTVTTSQPVASDAVTLECSIDIPKDLEQQFENIVNKTIIKKLEERQKISIPKHPSKDKVRQVDAVLNRYLQRHTDVWELNCAVYSAALLLQEKILKKDNKIQRRIEQVSKKILHCRQMASWLTCLIQNMRTGGKLSQRLEGIKTMVRRQFHSLNKSTLATVKQSYVDKVRSLSTARKTLQQRKKWAEDNFLFSESPSKFLNKDKTPIILNPPSLEETTAFWKNLYETASPFPSTAQWLGQFENYCSEKIHGRSVEPVFDTKLVSRTIQVQKSKSSPGPDGLQAHWWKTFPCLVHHLTKHFSSFLRGEVDIPQWLVEGRTVLIPKDGDLTNPKNYRPITCLNTQYKIFTGGLNELLLVTIQPVWEDTYEQRGSKRGMAGTKECLVVDRAVTTDAVYYKRHLSMAWLDYKKAFDTISHSLLKAVLRMLHVHPALQRCISDLLSLWRTRFVIKTGQQTISSEPILYKRGVYQGDSLSPLLFCISLLPLSQQLRTEPGYMAGEPTIRGHKITHMFYMDDLKLYAANRRYLKISLDITRQYTKDVGMEFGVDKCATLHLERGKIPSTAVDIVLVDGNVISHLDPDASYKYLGFQQSRSIEEKSVCRTLGDKYISCVRQIWSTQLSGPNKIKATNMLALPILQHSFGVLKWTREDLKVLDRSTRKTMTINRSLHPRSSVIRLYLPRQQGGRGLLGVEDMHDRLVFGMALRVMQGKDPLLQLVANHERNGNGTFLFKQAQTTARVVGMLLTTGLNPTMDGEAVADLKLSALSQKVKRQSHMINQIALKGKDIHGQFHNTLLEHNLDISLSHTWLQSSGLKSETEGFILAAQDGVLPVMAYRHGVWKENVNSICRACKQHPESIYHLLSACSHYAPTLYIHRHDAALRVLYYHLRHSYGIDPTLAIPYVEKNVPVVVNGEGCKIYWNYPVPTTRQLHATKPDILLFDYGRKEIFLIEFSCPAEYNIERKETDKKEKYIDLAFELEKQYSGYKAKIIVLLICSLGGANGSFLRNIRQIPHCLNNSLNLFKQMQKAILLGSMRLLRLHLSHH

SEQ ID NO: 18807 - protein, 1021 aa, Campodea augens
MWSLEQLKQLVSCYLESDPSKRGYMRKMHDIWCQRHPELAHFSAQQLRDQVASTKKKHPAMFSNSQGTLTPSRGTQVPQTVTTSQPVASDAVTLECSIDIPKDLEQQFENIVNKTIIKKLEERQKISIPKHPSKDKVRQVDAVLNRYLQRHTDVWELNCAVYSAALLLQEKILKKDNKIQRRIEQVSKKILHCRQMASWLTCLIQNMRTGGKLSQRLEGIKTMVRRQFHSLNKSTLATVKQSYVDKVRSLSTARKTLQQRKKWAEDNFLFSESPSKFLNKDKTPIILNPPSLEETTAFWKNLYETASPFPSTAQWLGQFENYCSEKIHGRSVEPVFDTKLVSRTIQVQKSKSSPGPDGLQAHWWKTFPCLVHHLTKHFSSFLRGEVDIPQWLVEGRTVLIPKDGDLTNPKNYRPITCLNTQYKIFTGGLNELLLVTIQPVWEDTYEQRGSKRGMAGTKECLVVDRAVTTDAVYYKRHLSMAWLDYKKAFDTISHSLLKAVLRMLHVHPALQRCISDLLSLWRTRFVIKTGQQTISSEPILYKRGVYQGDSLSPLLFCISLLPLSQQLRTEPGYMAGEPTIRGHKITHMFYMDDLKLYAANRRYLKISLDITRQYTKDVGMEFGVDKCATLHLERGKIPSTAVDIVLVDGNVISHLDPDASYKYLGFQQSRSIEEKSVCRTLGDKYISCVRQIWSTQLSGPNKIKATNMLALPILQHSFGVLKWTREDLKVLDRSTRKTMTINRSLHPRSSVIRLYLPRQQGGRGLLGVEDMHDRLVFGMALRVMQGKDPLLQLVANHERNGNGTFLFKQAQTTARVVGMLLTTGLNPTMDGEAVADLKLSALSQKVKRQSHMINQIALKGKDIHGQFHNTLLEHNLDISLSHTWLQSSGLKSETEGFILAAQDGVLPVMAYRHGVWKENVNSICRACKQHPESIYHLLSACSHYAPTLYIHRHDAALRVLYYHLRHSYGIDPTLAIPYVEKNVPVVVNGEGCKIYWNYPVPTTRQLHATKPDILLFDYSRK

SEQ ID NO: 18808 - protein, 1120 aa, Campodea augens
MWSLEQLKQLVSCYLESDPSKRGYMRKMHDIWCQRHPELAHFSAQQLRDQVASTKKKHPAMFSNSQGTLTPSRGTQVPQTVTTSQPVASDAVTLECSIDIPKDLEQQFENIVNKTIIKKLEERQKISIPKHPSKDKVRQVDAVLNRYLQRHTDVWELNCAVYSAALLLQEKILKKDNKIQRRIEQVSKKILHCRQMASWLTCLIQNMRTGGKLSQRLEGIKTMVRRQFHSLNKSTLATVKQSYVDKVRSLSTARKTLQQRKKWAEDNFLFSESPSKFLNKDKTPIILNPPSLEETTAFWKNLYETASPFPSTAQWLGQFENYCSEKIHGRSVEPVFDTKLVSRTIQVQKSKSSPGPDGLQAHWWKTFPCLVHHLTKHFSSFLRGEVDIPQWLVEGRTVLIPKDGDLTNPKNYRPITCLNTQYKIFTGGLNELLLVTIQPVWEDTYEQRGSKRGMAGTKECLVVDRAVTTDAVYYKRHLSMAWLDYKKAFDTISHSLLKAVLRMLHVHPALQRCISDLLSLWRTRFVIKTGQQTISSEPILYKRGVYQGDSLSPLLFCISLLPLSQQLRTEPGYMAGEPTIRGHKITHMFYMDDLKLYAANRRYLKISLDITRQYTKDVGMEFGVDKCATLHLERGKIPSTAVDIVLVDGNVISHLDPDASYKYLGFQQSRSIEEKSVCRTLGDKYISCVRQIWSTQLSGPNKIKATNMLALPILQHSFGVLKWTREDLKVLDRSTRKTMTINRSLHPRSSVIRLYLPRQQGGRGLLGVEDMHDRLVFGMALRVMQGKDPLLQLVANHERNGNGTFLFKQAQTTARVVGMLLTTGLNPTMDGEAVADLKLSALSQKVKRQSHMINQIALKGKDIHGQFHNTLLEHNLDISLSHTWLQSSGLKSETEGFILAAQDGVLPVMAYRHGVWKENVNSICRACKQHPESIYHLLSACSHYAPTLYIHRHDAALRVLYYHLRHSYGIDPTLAIPYVEKNVPVVVNGEGCKIYWNYPVPTTRQLHATKPDILLFDYGRKEIFLIEFSCPAEYNIERKETDKKEKYIDLAFELEKQYSGYKAKIIVLLICSLGGANGSFLRNIRQIPHCLNNSLNLFKQMQKAILLGSMRLLRLHLSHH

SEQ ID NO: 18809 - protein, 1054 aa, Campodea augens
MWSLEQLKQLVSCYLESDPSKRGYMRKMHDIWCQRHPELAHFSAQQLRDQVASTKKKHPAMFSNSQGTLTPSRGTQVPQTVTTSQPVASDAVTLECSIDIPKDLEQQFENIVNKTIIKKLEERQKISIPKHPSKDKVRQVDAVLNRYLQRHTDVWELNCAVYSAALLLQEKILKKDNKIQRRIEQVSKKILHCRQMASWLTCLIQNMRTGGKLSQRLEGIKTMVRRQFHSLNKSTLATVKQSYVDKVRSLSTARKTLQQRKKWAEDNFLFSESPSKFLNKDKTPIILNPPSLEETTAFWKNLYETASPFPSTAQWLGQFENYCSEKIHGRSVEPVFDTKLVSRTIQVQKSKSSPGPDGLQAHWWKTFPCLVHHLTKHFSSFLRGEVDIPQWLVEGRTVLIPKDGDLTNPKNYRPITCLNTQYKIFTGGLNELLLVTIQPVWEDTYEQRGSKRGMAGTKECLVVDRAVTTDAVYYKRHLSMAWLDYKKAFDTISHSLLKAVLRMLHVHPALQRCISDLLSLWRTRFVIKTGQQTISSEPILYKRGVYQGDSLSPLLFCISLLPLSQQLRTEPGYMAGEPTIRGHKITHMFYMDDLKLYAANRRYLKISLDITRQYTKDVGMEFGVDKCATLHLERGKIPSTAVDIVLVDGNVISHLDPDASYKYLGFQQSRSIEEKSVCRTLGDKYISCVRQIWSTQLSGPNKIKATNMLALPILQHSFGVLKWTREDLKVLDRSTRKTMTINRSLHPRSSVIRLYLPRQQGGRGLLGVEDMHDRLVFGMALRVMQGKDPLLQLVANHERNGNGTFLFKQAQTTARVVGMLLTTGLNPTMDGEAVADLKLSALSQKVKRQSHMINQIALKGKDIHGQFHNTLLEHNLDISLSHTWLQSSGLKSETEGFILAAQDGVLPVMAYRHGVWKENVNSICRACKQHPESIYHLLSACSHYAPTLYIHRHDAALRVLYYHLRHSYGIDPTLAIPYVEKNVPVVVNGEGCKIYWNYPVSTTRQLHATKPDILLFDYDRKYFFHIEFYCPAEYNIERKEMGNTLDTKQKLSFF

SEQ ID NO: 18810 - protein, 1827 aa, Medauroidea extradentata
MEMQQITIPLPNTTPIKCPSCPPQLRAQFVDWHRLSLHISTAHSTSWVTLQCQICDPPQRLAHTRAAQTHFRAIHEGTKLFVPAAGPATYTRKAVTAAARNVPATTEPTVNQHRTMSPMAETTPCQPTTTPHRQTSSPQPPRTATPKHPLLAQIIREEQLTPTIQPASLRRGTAGQAVTRLGYSQPCLAQQMGVRTLLVPVPVRRRIHCPTCPEGRKGARRTTGVFKTWPDFHKHMRKYHKEDGNLRVRFPCRHCQKAFDTMKRTQLHVTTCPHREDISSSDTESEDTELDSDDADDPGCPNETNPPCLKGRPRRNSHQTGSPQSPPEPLATPTNDGRPPITGLRPEAAPWHPPVEGLAVNEGHPIPPKLMPSAHTNLLTTPSVTLTPLGTLATVPMCHEARGALAGVHQACVSTAVTPTGPPKPPPLPGPPRPFRFKRRVLGKHASGLMVTPNNDDDSPEPGKTKALQPQVNTADSTASADNTMSHMAPGKGGIPLLPTESPSPTNTTIVVEVQVHNANDIRCDTQEQTVTSVSSTQREVSPPPKAKTMRQVPVRLANNHKTQVVNNLTEDPDEILPFPSQSSRNMPPIPTSDRHEQTHLSTYVRRDHAHLLPHPTPAPRSYPPGSNNTPVPGASGVRGLPARVSHPTHVLTQDMATQTDPVICPRTKTPDLSAPPDQPHTATPERNKATAHGSSHRRPHGRRGRAGRGRGGRMTHTPHVTHDTRVPELTQQPPEGAVHTPPRLERGGNVAPPNANPRHGPGGDDPGHDGDPPDPEDPRRPHGAEPPPHPPELTAFQQLWLNRIAEVADNWVTLEQLCAELPQAMLTEAVQLTQGQEPEHAAQPGAGRGDGPPREPNARGRGPHGGRGRRRPANNPALNRRVVPGRGFDGEAASAIQRLYRESPKKAIQWILSEGSPYCQIPEARLHAHFEAAFRNDDYVLRPVPPGAELQVPPTTEDDIDWLQSRMSAAEISTRLRRMPNTAPGPDGVRYRQLQRADPGCAVMEALYNAVQQHSRIPRTWKDSNTILLFKEGDRDDPTNWRPISLSATIAKVYLGTLADRIGRWAARTGRVSRQQKGFQEFEGCLEHNFVLQAIIDDCRQRRSQVAIAWLDLENAFGSMPHTYLMSVLREAGVPHSICATIEDLYSGGSTRIRTPDGHTEPIPIRAGVRQGCPLSPVLFNLGMEPIIRAISRLEAARGYQVAGQSHAILAYADDLVLLAKTPQDLQHLLDTVYHTARWAGLRFKPRKCATLHLHRAEGRTRPEALPTSFNIGGTEVRMLREGDAYRHLGVPTGYRAPQTPEEEVARMRGDLSLISNSLLAPWQKIDATHTFLMSRLQFIMRGGRVRKTALAGFDKHLRACAKTWLNLPHRATPLLTHVARTDGGAGILPLGDQADIATVAHSYRLLTSRDPTIGELAWHQLRATVAMKAGRRVQEVDHQLVTSYLSGVEEAPFNRDPGAAESMWTFTRNAGRRLRASVGIQWGWCNELQQLHLDLPMPEGRPPNRILLGPRQRHQVSRRLADSVKRRYRESVRQMPDQGKVLDAACRDPVSNHFVPTGKFTRFADWRFIHRARLNVVPLRGAYRGGQHGRGLACRVCGYQRETLAHVLNHCRRHSAAWQNRHDAIVERLRRAARLEEGTQIRVNQQVPHTNSPLRPDLVVINETRRTALLVDVAVPFDNRYGALEAARWEKCRKYQPLLDQLRMRGFEAEVEAILVGSLGSWDPKNEPVLRKLGVGWRYAQLMRRLMVSDTIRWSRDIYIEHVTGQRQYQTAPGEPDEVDQQPADEPYQPPDGNHPRDEPPLPGRGHPRGRRPGAWRRPRRRPMP

SEQ ID NO: 18811 - protein, 1269 aa, Sardina pilchardus
MFESALRPRKRQLTELNTSEIGNIPQLAHDNNNIIVQPRKKPRLGANFLASLSQSKVSSQAKSQLTSSTTTINKPLIDIDEKDDTSPSTPIKNSQNSENSENSNNLKNSNNSENIENENPFGASCSSTQLPSSNDVDNFVESMKNKIPTCIYVDEAAIQASANLSLDKSISFEPEAQELDLNFSEKSIHLSFCDSSSILNKSNTENDEIVNKSAPEPKIDEGIVVRPETTQELYELLREFNGKAPIIDRTTVPTTSRAAMAEDNEDIEYINYFDDKPAEVIQVNEDNEERQPPQQDTRAKSKTKYQERKEREDTFLKSAAQMLKIVVNQNSRELDCEELYEKFISTATKCAQDVNLFYCPPKNRNENQQPTEENSSQDPNAPPRLPRQLPLTRRAHEKRLRGLYRTNMKRCFNEVVSDPPHWCTASPAAIAEAYTLPPLDVPPNDLPEEDIIVCNDNNDEHAPGNLDEREAYNFMQNYSDLYISAEDVLVSLERSKKDTACGTDGIQMSFWKRVPQIEYTLAPLFNFFLSKSVVPQSWMESRLVLLPKSEDPDTSNPLDYRPISITQTLYRVFMSCLNRLLRPLIQLSPSQKGFRESDGCVEHAFALQEVLDDSRRARTKLNVVWIDIQKAFDSVPHYLIVANLKNHKIPTKIVNLITFLYNGSYNLIQDRDGNTAQWLPNGRGVRQGCPLSPLLFNAVIDPLLNEINQGGIGYPILGERIGVQGFADDIVLISSNVEDMQRLLSTTEAFLSRSHLQVNHRKCASLQITYPSGRRCINQDILRSHQLFGSHIPPIKDFYRYLGTQANLVSFKNLPPCFDDFVKKLERLSKSPLFPFQKINLLKIYLLPTLEFVMKNHILRIEDLDKIDATILKNIRTWLNLPNSSTTHFFHVPVCSGGLGIRKLSKDYAALRLAAGLNVINSNDETIQTIAKKSLQDIVNKRSKNTMTPLDYVHEDKEPDPRCRDIRSLLSSIRLNRKSVAVDLCQLSDDNNRLDIDDESLLPPLNPPKNPAIKLSRTKKLRWHLHSTYFKKWTEQLDQGRSLKCFSAHKESNTWLRTGNIKIKAYRFGVMGRINVLPSKTVLFRAHSTLDTQCRRCNCQVETLGHILNGCKHGLERIILRHDAILDLVISSLKKFGKKYQLSVNARFPSTGSERRPDIQLLHVQSKTLIVCDISVAYESSLERLDQVRTHKLRKYEPEFQVLRNQGYTILSTALIYGSLGSHHHRNGEAYILLQLSSERKQKTLQKNITKTLLEESHMIWNDHVRTQK

SEQ ID NO: 18812 - protein, 959 aa, Morbakka virulenta
MTVTEINRLLYAGSYVVASRLGVMGKNKTVRKKKPWWQRRLEKSIGEWRKDLGRIEEIKQGNKVRQVVRDRLNRKYELVVKGTMTVSTMLKNKISSASAKIRQFVGKSLARRQNNLFKNNQCQLYKELNGNGHKMESSVPNADEAREFWSIIWSEEKEHDKEASWLGDVREKFADVEKQEDIMVALQDVKAGIRKMANWKAPGPDWVRGYWFKKFTSLHLSIATTLQECLTSGVVPDWMVKGRTVLIQKDSGKGTAASNYRPIACLPLMWKLLSGIFAEKIYGHLVNNNLLPEEQKGCRKKSRGTKDQLMIDKAILHEVRAMKRNLSMCWIDYKKAYDMVPHSWILEMLDMVGVAENVRSLLKGSMAEWKTVLTANNEVLGEVNINRGIFQGDSLSPLIFVIAMIPLSILLNREKLGYFFGHGRVLVNHLLFMDDLKLFGRSKRELEALVEVVRVYSRDIGMEFGLDKCAVLEIRRGERAECEGIELPSGELMKEVDEDGYKYLGVLEGAKVMQKKMKKKIGNEYLRRVKLLAKSRLYAGNLVRGINAWAVSVVRYSSGILDWSDAELRKLDTKTRKILTMNGAFHRNSSVDRLYIGRKDGGRGLISVEDCVRQEELGLEEYVHATEETILEQVPGMIMHGRETKKHYKTRVVEERKERLMEKAMHGRFFREMDENATERSVQWVKGGFLAKSTEAFVFAAQEQALRTRLAQSKWDGGVSPMCRICGIESESVWHVACGCKVLAQKEYKRRHDRMGLRIYWELCKKYGLKCAGKWFEEVPDKVRKSEDGRFEVWWDRSVETMQQVESNRPDVVVVDRTKKRWLVVDFAVPSDRNVTAKEEEKITKYSPLAQQIRKLHSVCTSVVPIVVGSLGVVTKRLERSLKELGIPDVLGGLQTSTIIGTTNILRKVLNPESEWSVAGVKFARPAGEYHLPVRAVMLDMNFVYYYYYYYYYYYYNRL

SEQ ID NO: 18813 - protein, 1213 aa, Morbakka virulenta
MPGPCTQNYSNIYYYYYYYYYYYSGSISELLFANSRVVSMSFLKKKPTEGKPGSRRVSDDPQERVLIRTGEVSRPEASENVESSKDGSRTEEPMGRKGWKGEKRGKMGRTGLFKSKWSHFERKVLWECFVRSGGRRADGYIGKVKEMWDGRDVSVRSVASLLSQLKQIEANGLLSVVERGEIERMVREEALVEEESSEGEVDFCIRPESGLGEMEIENVVVANDAEERDLRVVIERVDVWRRGDDMRALSNDESGALALLREVYHSEDVVEVPSLKAQDGRKIGEEVKLVDGLMHNLVRDSMTVTEINRLLYAGSYVVASRLGVMGKNKTVRKKKPWWQRRLEKSIGEWRKDLGRIEEIKQGNKVRQVVRDRLNRKYELVVKGTMTVSTMLKNKISSASAKIRQFVGKSLARRQNNLFKNNQCQLYKELNGNGHKMESSAPNADEAREFWSIIWSEEKEHDKEASWLGDVREKFADVEKQEDIMVALQDVKAGIRKMANWKAPGPDWVRGYWFKKFTSLHLSIATTLQECLTSGVVPDWMVKGRTVLIQKDSGKGTAASNYRPIACLPLMWKLLSGIFAEKIYGHLVNNNLLPEEQKGCRKKSRGTKDQLMIDKAILHEVRAMKRNLSMCWIDYKKAYDMVPHSWILEMLDMVGVAENVRSLLKGSMAEWKTVLTANNEVLGEVNINRGIFQGDSLSPLIFVIAMIPLSILLNREKLGYFFGHGRVLVNHLLFMDDLKLFGRSKRELEALVEVVRVYSRDIGMEFGLDKCAVLEIRRGERAECEGIELPSGELMKEVDEDGYKYLGVLEGAKVMQKKMKEKIGNEYLRRVKLLAKSRLYAGNLVRGINAWAVSVVRYSSGILDWSDAELRKLDTKTRKILTMNGAFHRNSSVDRLYIGRKDGGRGLISVEDCVRQEELGLEEYVHATEETILEQVAGMIMHGRETKKHYKTRVVEERKERLMEKALHGRFFREMDENATERSVQWVKGGFLAKSTEAFVFAAQEQALRTRLAQSKWDGGVSPMCRICGIESESVWHVACGCKVLAQKEYKRRHDRMGLRIYWELCKKYGLKCAGKWFEEVPDKVRKSEDGRFEVWWDRSVETMQQVESNRPDVVVVDRTKKRWLVVDFAVPSDRNVTAKEEEKITKYSPLAQQIRKLHSVCTSVVPIVVGSLGVVTKRLERSLKELGIPDVLGGLQTSTIIGTTNILRKVLNL

SEQ ID NO: 18814 - protein, 1174 aa, Morbakka virulenta
MSFLKKKPTEGKPGSRRVSDDPQERVLIRTGEVSRPEASENVESSKDGSRTEEPMGRKGWKGEKRGKMGRTGLFKSKWSHFERKVLWECFVRSGGRRADGYIGKVKEMWDGRDVSVRSVASLLSQLKQIEANGLLSVVERGEIERMVREEALVEEESSEGEVDFCIRPESGLGEMEIENVVVANDAEERDLRVVIERVDVWRRGDDMRALSNDESGALALLREVYHSEDVVEVPSLKAQDGRKIGEEVKLVDGLMHNLVRDSMTVTEINRLLYAGSYVVASRLGVMGKNKTVRKKKPWWQRRLEKSIGEWRKDLGRIEEIKQGNKVRQVVRDRLNRKYELVVKGTMTVSTMLKNKISSASAKIRQFVGKSLARRQNNLFKNNQCQLYKELNGNGHKMESSAPNADEAREFWSIIWSEEKEHDKEASWLGDVREKFADVEKQEDIMVALQDVKAGIRKMANWKAPGPDWVRGYWFKKFTSLHLSIATTLQECLTSGVVPDWMVKGRTVLIQKDSGKGTAASNYRPIACLPLMWKLLSGIFAEKIYGHLVNNNLLPEEQKGCRKKSRGTKDQLMIDKAILHEVRSMKRNLSMCWIDYKKAYDMVPHSWILEMLDMVGVAENVRSLLKGSMAEWKTVLTANNEVLGEVNINRGIFQGDSLSPLIFVIAMIPLSILLNREKLGYFFGHGRVLVNHLLFMDDLKLFGRSKRELEALVEVVRVYSRDIGMEFGLDKCAVLEIRRGERAECEGIELPSGELMKEVDEDGYKYLGVLEGAKVMQKKMKEKIGNEYLRRVKLLAKSRLYAGNLVRGINAWAVSVVRYSSGILDWSDAELRKLDTKTRKILTMNGAFHRNSSVDRLYIGRKDGGRGLISVEDCVRQEELGLEEYVHATEETILEQVAGMIMHGRETKKHYKTRVVEERKERLMEKALHGRFFREMDENATERSVQWVKGGFLAKSTEAFVFAAQEQALRTRLAQSKWDGGVSPMCRICGIESESVWHVACGCKVLAQKEYKRRHDRMGLRIYWELCKKYGLKCAGKWFEEVPDKVRKSEDGRFEVWWDRSVETMQQVESNRPDVVVVDRTKKRWLVVDFAVPSDRNVTAKEEEKVTKYSPLAQQIRKLHSVCTSVVPIVVGSLGVVTKRLERSLKELGIPDVLGGLQTSTIIGTTNILRKVLNL

SEQ ID NO: 18815 - protein, 1174 aa, Morbakka virulenta
MSFLKKKPTEGKPGSRRVSDDPQERVLIRTGEVSRPEASENVESSKDGSRTEEPMGRKGWKGEKRGKMGRTGLFKSKWSHFERKVLWECFVRSGGRRADGYIGKVKEMWDGRDVSVRSVASLLSQLKQIEANGLLSVVERGEIERMVREEALVEEESSEGEVDFCIRPESGLGEMEIENVVVANDAEERDLRVVIERVDVWRRGDDMRALSNDESGALALLREVYHSEDVVEVPSLKAQDGRKIGEEVKLVDGLMHNLVRDSMTVTEINRLLYAGSYVVASRLGVMGKNKTVRKKKPWWQRRLEKSIGEWRKDLGRIEEIKQGNKVRQVVRDRLNRKYELVVKGTMTVSTMLKNKISSASAKIRQFVGKSLARRQNNLFKNNQCQLYKELNGNGHKMESSAPNADEAREFWSIIWSEEKEHDKEASWLGDVREKFADVEKQEDIMVALQDVKAGIRKMANWKAPGPDWVRGYWFKKFTSLHLSIATTLQECLTSGVVPDWMVKGRTVLIQKDSGKGTAASNYRPIACLPLMWKLLSGIFAEKIYGHLVNNNLLPEEQKGCRKKSRGTKDQLMIDKAILHEVRAMKRNLSMCWIDYKKAYDMVPHSWILEMLDMVGVAENVRSLLKGSMAEWKTVLTANNEVLGEVNINRGIFQGDSLSPLIFVIAMIPLSILLNREKLGYFFGHGRVLVNHLLFMDDLKLFGRSKRELEALVEVVRVYSRDIGMEFGLDKCAVLEIRRGERAECEGIELPSGELMKEVDEDGYKYLGVLEGAKVMQKKMKEKIGNEYLRRVKLLAKSRLYAGNLVRGINAWAVSVVRYSSGILDWSDAELRKLDTKTRKILTMNGAFHRNSSVDRLYIGRKDGGRGLISVEDCVRQEELGLEEYVHATEETILEQVAGMIMHGRETKKHYKTRVVEERKERLMEKALHGRFFREMDENATERSVQWVKGGFLAKSTEAFVFAAQEQALRTRLAQSKWDGGVSPMCRICGIESESVWHVACGCKVLAQKEYKRRHDRMGLRIYWELCKKYGLKCAGKWFEEVPDKVRKSEDGRFEVWWDRSVETMQQVECNRPDVVVVDRTKKRWLVVDFAVPSDRNVTAKEEEKITKYSPLAQQIRKLHSVCTSVVPIVVGSLGVVTKRLERSLKELGIPDVLGGLQTSTIIGTTNILRKVLNL

SEQ ID NO: 18816 - protein, 1174 aa, Morbakka virulenta
MSFLKKKPTEGKPGSRRVSDDPQERVLIRTGEVSRPEASENVESSKDGSRTEEPMGRKGWKGEKRGKMGRTGLFKSKWSHFERKVLWECFVRSGGRRADGYIGKVKEMWDGRDVSVRSVASLLSQLKQIEANGLLSVVERGEIERMVREEALVEEESSEGEVDFCIRPESGLGEMEIENVVVANDAEERDLRVVIERVDVWRRGDDMRALSNDESGALALLREVYHSEDVVEVPSLKAQDGRKIGEEVKLVDGLMHNLVRDSMTVTEINRLLYAGSYVVASRLGVMGKNKTVRKKKPWWQRRLEKSIGEWRKDLGRIEEIKQGNKVRQVVRDRLNRKYELVVKGTMTVSTMLKNKISSASAKIRQFVGKSLARRQNNLFKNNQCQLYKELNGNGHKMESSAPNADEAREFWSIIWSEEKEHDKEASWLGDVREKFADVEKQEDIMVALQDVKAGIRKMANWKAPGPDWVRGYWFKKFTSLHLSIATTLQECLTSGVVPDWMVKGRTVLIQKDSGKGTAASNYRPIACLPLMWKLLSGIFAEKIYGHLVNNNLLPEEQKGCRKKSRGTKDQLMIDKAILHEVRAMKRNLSMCWIDYKKAYDMVPHSWILEMLDMVGVAENVRSLLKGSMAEWKTVLTANNEVLGEVNINRGIFQGDSLSPLIFVIAMIPLSILLNREKLGYFFGHGRVLVNHLLFMDDLKLFGRSKRELEALVEVVRVYSRDIGMEFGLDKCAVLEIRRGERAECEGIELPSGELMKEVDEDGYKYLGVLEGAKVMQKKMKEKIGNEYLRRVKLLAKSRLYAGNLVRGINAWAVSVVRYSSGILDWSDAELRKLDTKTRKILTMNGAFHRNSSVDRLYIGRKDGGRGLISVEDCVRQEELGLEEYVHATEETILEQVAGMIMHGRETKKHYKTRVVEERKERLMEKAMHGRFFREMDENATERSVQWVKGGFLAKSTEAFVFAAQEQALRTRLAQSKWDGGVSPMCRICGIESESVWHVACGCKVLAQKEYKRRHDRMGLRIYWELCKKYGLKCAGKWFEEVPDKVRKSEDGRFEVWWDRSVETMQQVESNRPDVVVVDRTKKRWLVVDFAVPSDRNVTAKEEEKITKYSPLAQQIRKLHSVCTSVVPIVVGSLGVVTKRLERSLKELGIPDVLGGLQTSTIIGTTNILRKVLNL

SEQ ID NO: 18817 - protein, 1174 aa, Morbakka virulenta
MSFLKKKPTEGEPGSRRVSDDPQERVLIRTGEVSRPGASENVESSKDGSRTEEPMGRKGWIGEKRGKMGRTGLFKSKWSHFERKVLWECFVRSGGRRADGYIGKVKEMWDGRDVSVRSVASLLSQLKQIEANGLLSVVERGEIERMVREEALVEEESSEGEVDFCIRPESGLGEMEIENVVVANDAEERDLRVVIERVDVWRRGDDMRALSNDESGALALLREVYHSEDVVEVPSLKAQDGRKIGEEVKLVDGLMHNLVRDSMTVTEINRLLYAGSYVVASRLGVMGKNKTVRKKKPWWQRRLEKSIGEWRKDLGRIEEIKQGNKVRQVVRDRLNRKYELVVKGTMTVSTMLKNKISSASAKIRQFVGKSLARRQNNLFKNNQCQLYKELNGNGHKMESSAPNADEAREFWSIIWSEEKEHDKEASWLGDVREKFADVEKQEDIMVALQDVKAGIRKMANWKAPGPDWVRGYWFKKFTSLHLSIATTLQECLTSGVVPDWMVKGRTVLIQKDSGKGTAASNYRPIACLPLMWKLLSGIFAEKIYGHLVNNNLLPEEQKGCRKKSRGTKDQLMIDKAILHEVRAMKRNLSMCWIDYKKAYDMVPHSWILEMLDMVGVAENVRSLLKGSMAEWKTVLTANNEVLGEVNINRGIFQGDSLSPLIFVIAMIPLSILLNREKLGYFFGHGRVLVNHLLFMDDLKLFGRSKRELEALVEVVRVYSRDIGMEFGLDKCAVLEIRRGERAECEGIELPSGELMKEVDEDGYKYLGVLEGAKVMQKKMKEKIGNEYLRRVKLLAKSRLYAGNLVRGINAWAVSVVRYSSGILDWSDAELRKLDTKTRKILTMNGAFHRNSSVDRLYIGRKDGGRGLISVEDCVRQEELGLEEYVHATEETILEQVAGMIMHGRETKKHYKTRVVEERKERLMEKAMHGRFFREMDENATERSVQWVKGGFLAKSTEAFVFAAQEQALRTRLAQSKWDGGVSPMCRICGIESESVWHVACGCKVLAQKEYKRRHDRMGLRIYWELCKKYGLKCAGKWFEEVPDKVRKSEDGRFEVWWDRSVETMQQVESNRPDVVVVDRTKKRWLVVDFAVPSDRNVTAKEEEKITKYSPLAQQIRKLHSVCTSVVPIVVGSLGVVTKRLERSLKELGIPDVLGGLQTSTIIGTTNILRKVLNL

SEQ ID NO: 18818 - protein, 1174 aa, Morbakka virulenta
MSFLKKKPTEGKPGSRRVSDDPQERVLIRTGEVSRPEASENVESSKDGSRTEEPMGRKGWKGEKRGKMGRTGLFKSKWSHFERKVLWECFVRSGGRRADGYIGKVKEMWDGRDVSVRSVASLLSQLKQIEANGLLSVVERGEIERMVREEALVEEESSEGEVDFCIRPESGLGEMEIENVVVANDAEERDLRVVIERVDVWRRGDDMRALSNDESGALALLREVYHSEDVVEVPSLKAQDGRKIGEEVKLVDGLMHNLVRDSMTVTEINRLLYAGSYVVASRLGVMGKNKTVRKKKPWWQRRLEKSIGEWRKDLGRIEEIKQGNKVRQVVRDRLNRKYELVVKGTMTVSTMLKNKISSASAKIRQFVGKSLARRQNNLFKNNQCQLYKELNGNGHKMESSAPNADEAREFWSIIWSEEKEHDKEASWLGDVREKFADVEKQEDIMVALQDVKAGIRKMANWKAPGPDWVRGYWFKKFTSLHLSIATTLQECLTSGVVPDWMVKGRTVLIQKDSGKGTAASNYRPIACLPLMWKLLSGIFAEKIYGHLVNNNLLPEEQKGCRKKSRGTKDQLMIDKAILHEVRAMKRNLSMCWIDYKKAYDMVPHSWILEMLDMVGVAENVRSLLKGSMAEWKTVLTANNEVLGEVNINRGIFQGDSLSPLIFVIAMIPLSILLNREKLGYFFGHGRVLVNHLLFMDDLKLFGRSKRELEALVEVVRVYSRDIGMEFGLDKCAVLEIRRGERAECEGIELPSGELMKEVDEDGYKYLGVLEGAKVMQKKMKEKIGNEYLRRVKLLAKSRLYAGNLVRGINAWAVSVVRYSSGILDWSDAELRKLDTKTRKILTMNGAFYRNSSVGRLYIGRKDGGRGLISVEDCVRQEELGLEEYVHATEETILEQVAGMIMHGRETKKHYKTRVVEERKERLMEKAMHGRFFREMDENATERSVQWVKGGFLAKSTEAFVFAAQEQALRTRLAQSKWDGSVSPMCRICGIESESVWHVACGCKVLAQKEYKRRHDRMGLRIYWELCKKYGLKCAGKWFEEVPDKVRKSEDGRFEVWWDRSVETMQQVESNRPDVVVVDRTKKRWLVVDFAVPSDRNVTAKEEEKVTKYSPLAQQIRKLHSVCTSVVPIVVGSLGVVTKRLERSLKELGIPDVLGGLQTSTIIGTTNILRKVLNL

SEQ ID NO: 18819 - protein, 1174 aa, Morbakka virulenta
MSFLKKKPTEGKPGSRRVSDDPQERVLIRTGEVSRPEPSENVESSKDGSRTEEPMGRKGWKGEKRGKMGRTGLFKSKWSHFERKVLWECFVRSGGRRADGYIGKVKEMWDGRDVSVRSVASLLSQLKQIEANGLLSVVERGEIERMVREEALVEEESSEGEVDFCIRPESGLGEMEIENVVVANDAEERDLRVVIERVDVWRRGDDMRALSNDESGALALLREVYHSEDVVEVPSLKAQDGRKIGEEVKLVDGLMHNLVRDSMTVTEINRLLYAGSYVVASRLGVMGKNKTVRKKKPWWQRRLEKSIGEWRKDLGRIEEIKQGNKVRQVVRDRLNRKYELVVKGTMTVSTMLKNKISSASAKIRQFVGKSLARRQNNLFKNNQCQLYKELNGNGHKMESSAPNADEAREFWSIIWSEEKEHDKEASWLGDVREKFADVEKQEDIMVALQDVKAGIRKMANWKAPGPDWVRGYWFKKFTSLHLSIATTLQECLTSGVVPDWMVKGRTVLIQKDSGKGTAASNYRPIACLPLMWKLLSGIFAEKIYGHLVNNNLLPEEQKGCRKKSRGTKDQLMIDKAILHEVRAMKRNLSMCWIDYKKAYDMVPHSWILEMLDMVGVAENVRSLLKGSMAEWKTVLTANNEVLGEVNINRGIFQGDSLSPLIFVIAMIPLSILLNREKLGYFFGHGRVLVNHLLFMDDLKLFGRSKRELEALVEVVRVYSRDIGMEFGLDKCAVLEIRRGERAECEGIELPSGELMKEVDEDGYKYLGVLEGAKVMQKKMKEKIGNEYLRRVKLLAKSRLYAGNLVRGINAWAVSVVRYSSGILDWSDAELRKLDTKTRKILTMNGAFHRNSSVDRLYIGRKDGGRGLISVEDCVRQEELGLEEYVHATEETILEQVAGMIMHGRETKKHYKTRVVEERKERLMEKAMHGRFFREMDENATERSVQWVKGGFLAKSTEAFVFAAQEQALRTRLAQSKWDGGVSPMCRICGIESESVWHVACGCKVLAQKEYKRRHDRMGLRIYWELCKKYGLKCAGKWFEEVPDKVRKSEDGRFEVWWDRSVETMQQVESNRPDVVVVDRTKKRWLVVDFAVPSDRNVTAKEEEKITKYSPLAQQIRKLHSVCTSVVPIVVGSLGVVTKRLERSLKELGIPDVLGRLQTSTIIGTTNILRKVLNL

SEQ ID NO: 18820 - protein, 1120 aa, Morbakka virulenta
MGRKGWKGEKRGKMGRTGLFKSKWSHFERKVLWECFVRSGGRRADGYIGKVKEMWDGRDVSVRSVASLLSQLKQIEANGLLSVVERGEIERMVREEALVEEESSEGEVDFCIRPESGLGEMEIENVVVANDAEERDLRVVIERVDVWRRGDDMRALSNDESGALALLREVYHSEDVVEVPSLKAQDGRKIGEEVKLVDGLMHNLVRDSMTVTEINRLLYAGSYVVASRLGVMGKNKTVRKKKPWWQRRLEKSIGEWRKDLGRIEEIKQGNKVRQVVRDRLNRKYELVVKGTMTVSTMLKNKISSASAKIRQFVGKSLARRQNNLFKNNQCQLYKELNGNGHKMESSAPNADEAREFWSIIWSEEKEHDKEASWLGDVREKFADVEKQEDIMVALQDVKAGIRKMANWKAPGPDWVRGYWFKKFTSLHLSIATTLQECLTSGVVPDWMVKGRTVLIQKDSGKGTAASNYRPIACLPLMWKLLSGIFAEKIYGHLVNNNLLPEEQKGCRKKSRGTKDQLMIDKAILHEVRAMKRNLSMCWIDYKKAYDMVPHSWILEMLDMVGVAENVRSLLKGSMAEWKTVLTANNEVLGEVNINRGIFQGDSLSPLIFVIAMIPLSILLNREKLGYFFGHGRVLVNHLLFMDDLKLFGRSKRELEALVEVVRVYSRDIGMEFGLDKCAVLEIRRGERAECEGIELPSGELMKEVDEDGYKYLGVLEGAKVMQKKMKEKIGNEYLRRVKLLAKSRLYAGNLVRGINAWAVSVVRYSSGILDWSDAELRKLDTKTRKILTMNGAFHRNSSVDRLYIGRKDGGRGLISVEDCVRQEELGLEEYVHATEETILEQVAGMIMHGRETKKHYKTRVVEERKERLMEKAMHGRFFREMDENATERSVQWVKGGFLAKSTEAFVFAAQEQALRTRLAQSKWDGGVSPMCRICGIESESVWHVACGCKVLAQKEYKRRHDRMGLRIYWELCKKYGLKCAGKWFEEVPDKVRKSEDGRFEVWWDRSVETMQQVESNRPDVVVVDRTKKRWLVVDFAVPSDRNVTAKEEEKITKYSPLAQQIRKLHSVCTSVVPIVVGSLGVVTKRLERSLKELGIPDVLGGLQTSTIIGTTNILRKVLNL

SEQ ID NO: 18821 - protein, 1174 aa, Morbakka virulenta
MSFLKKKPTEGKPGSRRVSDDPQERVLIRTREVSRPEANENVESSKDGSRTEEPMGRKGWKGEKRGKMGRTGLFKSKWSHFERKVLWECFVRSGGRRADGYIGKVKEMWDGRDVSVRSVASLLSQLKQIEANGLLSVVERGEIERMVREEALVEEESSEGEVDFCIRPESGLGEMEIENVVVANDAEERDLRVVIERVDVWRRGDDMRALSNDESGALALLREVYHSEDVVEVPSLKAQDGRKIGEEVKLVDGLMHNLVRDSMTVTEINRLLYAGSYVVASRLGVMGKNKTVRKKKPWWQRRLEKSIGEWRKDLGRIEEIKQGNKVRQVVRDRLNRKYELVVKGTMTVSTMLKNKISSASAKIRQFVGKSLARRQNNLFKNNQCQLYKELNGNGHKMESSAPNADEAREFWSIIWSEEKEHDKEASWLGDVREKFADVEKQEDIMVALQDVKAGIRKMANWKAPGPDWVRGYWFKKFTSLHLSIATTLQECLTSGVVPDWMVKGRTVLIQKDSGKGTAASNYRPIACLPLMWKLLSGIFAEKIYGHLVNNNLLPEEQKGCRKKSRGTKDQLMIDKAILHEVRAMKRNLSMCWIDYKKAYDMVPHSWILEMLDMVGVAENVRSLLKGSMAEWKTVLTANNEVLGEVNINRGIFQGDSLSPLIFVIAMIPLSILLNREKLGYFFGHGRVLVNHLLFMDDLKLFGRSKRELEALVEVVRVYSRDIGMEFGLDKCAVLEIRRGERAECEGIELPSGELMKEVDEDGYKYLGVLEGAKVMQKKMKEKIGNEYLRRVKLLAKSRLYAGNLVRGINAWAVSVVRYSSGILDWSDAELRKLDTKTRKILTMNGAFHRNSSVDRLYIGRKDGGRGLISVEDCVRQEELGLEEYVHATEETILEQVAGMIMHGRETKKHYKTRVVEERKERLMEKAMHGRFFREMDENATERSVQWVKGGFLAKSTEAFVFAAQEQALRTRLAQSKWDGSVSPMCRICGIESESVWHVACGCKVLAQKEYKRRHDRMGLRIYWELCKKYGLKCAGKWFEEVPDKVRKSEDGRFEVWWDRSVETMQQVESNRPDVVVVDRTKKRWLVVDFAVPSDRNVTAKEEEKITKYSPLAQQIRKLHSVCTSVVPIVVGSLGVVTKRLERSLKELGIPDVLGGLQTSTIIGTTNILRKVLNL

SEQ ID NO: 18822 - protein, 1174 aa, Morbakka virulenta
MSFLKKKPTEGKPGSRRVSDDPQERVLIRTGEVSRPEASENVESSKDGSRTEEPMGRKGWKGEKRGKMGRTGLFKSKWSHFERKVLWECFVRSGGRRADGYIGKVKEMWDGRDVSVRSVASLLSQLKQIEANGLLSVVERGEIERMVREEALVEEESSEGEVDFCIRPESGLGEMEIENVVVANDAEERDLRVVIERVDVWRRGDDMRALSNDESGALALLREVYHSEDVVEVPSLKAQDGRKIGEEVKLVDGLMHNLVRDSMTVTEINRLLYAGSYVVASRLGVMGKNKTVRKKKPWWQRRLEKSIGEWRKDLGRIEEIKQGNKVRQVVRDRLNRKYELVVKGTMTVSTMLKNKISSASAKIRQFVGKSLARRQNNLFKNNQCQLYKELNGNGHKMESSVPNADEAREFWSIIWSEEKEHDKEASWLGDVREKFADVEKQEDIMVALQDVKAGIRKMANWKAPGPDWVRGYWFKKFTSLHLSIATTLQECLTSGVVPDWMVKGRTVLIQKDSGKGTAASNYRPIACLPLMWKLLSGIFAEKIYGHLVNNNLLPEEQKGCRKKSRGTKDQLMIDKAILHEVRAMKRNLSMCWIDYKKAYDMVPHSWILEMLDMVGVAENVRSLLKGSMAEWKTVLTANNEVLGEVNINRGIFQGDSLSPLIFVIAMIPLSILLNREKLGYFFGHGRVLVNHLLFMDDLKLFGRSKRELEALVEVVRVYSRDIGMEFGLDKCAVLEIRRGERAECEGIELPSGELMKEVDEDGYKYLEVLEGAKVMQKKMKEKIGNEYLRRVKLLAKSRLYAGNLVRGINAWAVSVVRYSSGILDWSDAELRKLDTKTRKILTMNGAFHRNSSVDCLYIGRKDGGRGLISVEDCVRQEELGLEEYVHATEETILEQVAGMIMHGRETKKHYKTRVVEERKERLMEKALHGRFFREMDENATERSVQWVKGGFLAKSTEAFVFAAQEQALRTRLAQSKWDGGVSPMCRICGIESESVWHVACGCKVLAQKEYKRRHDRMGLRIYWELCKKYGLKCAGKWFEEVPDKVRKSEDGRFEVWWDRSVETMQQVESNRPDVVVVDRTKKRWLVVDFAVPSDRNVTAKEEEKVTKYSPLAQQIRKLHSVCTSVVPIVVGSLGVVTKRLERSLKELGIPDVLGGLQTSTIIGTTNILRKVLNL

SEQ ID NO: 18823 - protein, 1048 aa, Morbakka virulenta
MEANWLLSVVEREEIERMVREETLVEEESGEGEVDFCIRPESGLGKMEMENVVVANDIEERDLRVVIERVDVWRRGDDVRALINDESGALALLREVYHSEDVVEVPSLKAQNGRKIGEEVKLVDGLIHNLVRDGMTVTEINRLLYAGSYVVASRLGVTGKNKTVRKKKPWWQMWLEKSIGEWRKDLGRIEEIKQGNKVRQVVRDRLNRKYELEVKGTMTVSTMLKNKISSASAKIRQFVGKSLARRQNNLFKNNQCQLYKELNGNGHKMESSAPNADEAREFWSIIWSEEKEHDKEASWLGDVREKFADVEKQEDIMVALQDVKAGIRKMANWKAPGPDWVRGYWFKKFTSLHLSIATTLQECLTSGVVPDWMVKGRTVLIQKDSGKGTAASNYRPIACLPLMWKLLSGIFAEKIYGHLVNNNLLPEEQKGCRKKSRGTKDQLMIDKAILHEVRAMKRNLSMCWIDYKKAYDMVPHSWILEMLDMVGVAENVRSLLKGSMAEWKTVLTANNEVLGEVNINRGIFQGDSLSPLIFVIAMIPLSILLNREKLGYFFGHGRVLVNHLLFMDDLKLFGRSKRELEALVEVVRVYSRDIGMEFGLDKCAVLEIRRGERAECEGIELPSGELMKEVDEDGYKYLGVLEGAKVMQKKMKEKIGNEYLRRVKLLAKSRLYAGNLVRGINAWAVSVVRYSSGILDWSDAELRKLDTKTRKILTMNGAFHRNSSVDRLYIGRKDGGRGLISVEDCVRQEELGLEEYVHATEETILEQVAGMIMHGRETKKHYKTRVVEERKERLMEKAMHGRFFREMDENATERSVQWVKGGFLAKSTEAFVFAAQEQALRTRLAQSKWDGGVSPMCRICGIESESVWHVACGCKVLAQKEYKRRHDRMGLRIYWELCKKYGLKCAGKWFEEVPDKVRKSEDGRFEVWWDRSVETMQQVECNRPDVVVVDRTKKRWLVVDFAVPSDRNVTSKEEEKVTKYSPLAQQIRKLHSVCTSVVPIVVRSLGVVTKRLERSLKELGIPDVLGGLQTSTIIGTTNILRKVPNLES

SEQ ID NO: 18824 - protein, 1174 aa, Morbakka virulenta
MSFLKKKPTEGKPGRRRVSDDQQERVLIRTGEVSRSEASENVESSKDGSRTEEPMGRKGWKGEKRGKMGRTGLFKSKWSHFERKVLWECFVRSGGRRADGYIGKVKEMWDGRDVSVRSVASLLSQLKQIEANGLLSVVERGEIERMVREEALVEEESSEGEVDFCIRPESGLGEMEIENVVVANDAEERDLRVVIERVDVWRRGDDMRALSNDESGALALLREVYHSEDVVEVPSLKAQDGRKIGEEVKLVDGLMHNLVRDSMTVTEINRLLYAGSYVVASRLGVMGKNKTVRKKKPWWQRRLEKSIGEWRKDLGRIEEIKQGNKVRQVVRDRLNRKYELVVKGTMTVSTMLKNKISSASAKIRQFVGKSLARRQNNLFKNNQCQLYKELNGNGHKMESSAPNADEAREFWSIIWSEEKEHDKEASWLGDVREKFADVEKQEDIMVALQDVKAGIRKMANWKAPGPDWVRGYWFKKFTSLHLSIATTLQECLTSGVVPDWMVKGRTVLIQKDSGKGTAASNYRPIACLPLMWKLLSGIFAEKIYGHLVNNNLLPEEQKGCRKKSRGTKDQLMIDKAILHEVRAMKRNLSMCWIDYKKAYDMVPHSWILEMLDMVGVAENVRSLLKGSMAEWKTVLTANNEVLGEVNINRGIFQGDSLSPLIFVIAMIPLSILLNREKLGYFFGHGRVLVNHLLFMDDLKLFGRSKRELEALVEVVRVYSRDIGMEFGLDKCAVLEIRRGERAECEGIELPSGELMKEVDEDGYKYLGVLEGAKVMQKKMKEKIGNEYLRRVKLLAKSRLYAGNLVRGINAWAVSVVRYSSGILDWSDAELRKLDTKTRKILTMNGAFHRNSSVDRLYIGRKDGGRGLISVEDCVRQEELGLEEYVHATEETILEQVAGMIMHGRETKKHYKTRVVEERKERLMEKAMHGRFFREMDENATERSVQWVKGGFLAKSTEAFVFAAQEQALRTRLAQSKWDGGVSPMCRICGIESESVWHVACGCKVLAQKEYKRRHDRMGLRIYWELCKKYGLKCAGKWFEEVPDKVRKSEDGRFEVWWDRSVETMQQVESNRPDVVVVDRTKKRWLVVDFAVPSDRNVTAKEEEKITKYSPLAQQIRKLHSVCTSVVPIVVGSLGVVTKRLERSLKELGIPDVLGRLQTSTIIGTTNILRKVLNL

SEQ ID NO: 18825 - protein, 1106 aa, Morbakka virulenta
MSFLKKKPTEGKPGSRRVSDDPQERVLIRTGEVSRPEASENVESSKDGSRTEEPMGRKGWKGEKRGKMGRTGLFKSKWSHFERKVLWECFVRSGGRRADGYIGKVKEMWDGRDVSVRSVASLLSQLKQIEANGLLSVVERGEIERMVREEALVEEESSEGEVDFCIRPESGLGEMEIENVVVANDAEERDLRVVIERVDVWRRGDDMRALSNDESGALALLREVYHSEDVVEVPSLKAQDGRKIGEEVKLVDGLMHNLVRDSMTVTEINRLLYAGSYVVASRLGVMGKNKTVRKKKPWWQRRLEKSIGEWRKDLGRIEEIKQGNKVRQVVRDRLNRKYELVVKGTMTVSTMLKNKISSASAKIRQFVGKSLARRQNNLFKNNQCQLYKELNGNGHKMESSAPNADEAREFWSIIWSEEKEHDKEASWLGDVREKFADVEKQEDIMVSLQDVKAGIRKMANWKAPGPDWVRGYWFKKFTSLHLSIATTLQECLTSGVVPDWMVKGRTVLIQKDSGKGTAASNYRPIACLPLMWKLLSGIFAEKIYGHLVNNNLLPEEQKGCRKKSRGTKDQLMIDKAILHEVRAMKRNLSMCWIDYKKAYDMVPHSWILEMLDMVGVAENVRSLLKGSMAEWKTVLTANNEVLGEVNINRGIFQGDSLSPLIFVIAMIPLSILLNREKLGYFFGHGRVLVNHLLFMDDLKLFGRSKRELEALVEVVRVYSRDIGMEFGLDKCAVLEIRRGERAECEGIELPSGELMKEVDEDGYKYLGVLEGAKVMQKKMKEKIGNEYLRRVKLLAKSRLYAGNLVRGINAWAVSVVRYSSGILDWSDAELRKLDTKTRKILTMNGAFHRNSSVDRLYIGRKDGGRGLISVEDCVRQEELGLEEYVHATEETILEQVAGMIMHGRETKKHYKTRVVEERKERLMEKAMHGRFFREMDENATERSVQWVKGGFLAKSTEAFVFAAQEQALRTRLAQSKWDGGVSPMCRICGIESESVWHVACGCKVLAQKEYKRRHDRMGLRIYWELCKKYGLKCAGKWFEEVSDKVRKSEDGRFEVWWDRSVETMQQVECNRPDVVVVDHTEKRWLVVDFAVPSDRNVTVKEEEKGH

SEQ ID NO: 18826 - protein, 1167 aa, Morbakka virulenta
MSFLKKKPTEGKSGSRGVSVDPQERVLIRTGEVSRPEASENVESSKNGSRTEEPMGRKGWKGEKRGKMGRTGLFKSKWSHFERKVLWECFVRSGGRRADGYIEKVKEMWDGRDVSVRSVASLLSQLKQIEANGLLSVVERGEIERMVREEALVEEESSEGEVDFCIRPESGLGEMEIENVVVANDAEERDLRVVIERVDVWRRGDDMRALSNDESGALALLREVYHSEDVVEVPSLKAQDGRKIGEEVKLVDGLMHNLVRDSMTVTEINRLLYAGSYVVASRLGVMGKNKTVRKKKPWWQRRLEKSIGEWRKDLGRIEEIKQGNKVRQVVRDRLNRKYELVVKGTMTVSTMLKNKISSASAKIRQFVGKSLARRQNNLFKNNQCQLYKELNGNGHKMESSAPNADEAREFWSIIWSEEKEHDKEASWLGDVREKFADVEKQEDIMVALQDVKAGIRKMANWKAPGPDWVRGYWFKKFTSLHLSIATTLQECLTSGVVPDWMVKGRTVLIQKDSGKGTAASNYRPIACLPLMWKLLSGIFAEKIYGHLVNNNLLPEEQKGCRKKSRGTKDQLMIDKAILHEVRAMKRNLSMCWIDYKKAYDMVPHSWILEMLDMVGVAENVRSLLKGSMAEWKTVLTANNEVLGEVNINRGIFQGDSLSPLIFVIAMIPLSILLNREKLGYFFGHGRVLVNHLLFMDDLKLFGRSKRELEALVEVVRVYSRDIGMEFGLDKCAVLEIRRGERAECEGIELPSGELMKEVDEDGYKYLGVLEGAKVMQKKMKEKIGNEYLRRVKLLAKSRLYAGNLVRGINAWAVSVVRYSSGILDWSDAELRKLDTKTRKILTMNGAFHRNSSVDRLYIGRKDGGRGLISVEDCVRQEELGLEEYVHATEETILEQVAGMIMHGRETKKHYKTRVVEERKERLMEKAMHGRFFREMDENATERSVQWVKGGFLAKSTEAFVFAAQEQALRTRLAQSKWDGGVSPMCRICGIESESVWHVACGCKVLAQKEYKRRHDRMGLRIYWELCKKYGLKCAGKWFEEVPDKVRKSEDGRFEVWLDRSVETMQQVEFNRPDVVAVDRTKKRWLVVDFAVPSDRNVTAKEEEKVAKYSPLAQQIRKLHSVCTSVVPIVVGSLGVVTKRLERSLKSWASLMSWVDSKYLPSLELPTY

SEQ ID NO: 18827 - protein, 1174 aa, Morbakka virulenta
MSFLKKKPTEGKPGSRRVSDDPQERVLIRTGEVSRPEASENVESSKDGSRTEEPMGRKGWKGEKRGKMGRTGLFKSKWSHFERKVLWECFVRSGGRRADGYIGKVKEMWDGRDVSVRSVASLLSQLKQIEANGLLSVVERGEIERMVREEALVEEESSEGEVDFCIRPESGLGEMEIENVVVANDAEERDLRVVIERVDVWRRGDDMRALSNDESGALALLREVYHSEDVVEVPSLKAQDGRKIGEEVKLVDGLMHNLVRDSMTVTEINRLLYAGSYVVASRLGVMGKNKTVRKKKPWWQRRLEKSIGEWRKDLGRIEEIKQGNKVRQVVRDRLNRKYELVVKGTMTVSTMLKNKISSASAKIRQFVGKSLARRQNNLFKNNQCQLYKELNGNGHKMESSAPNADEAREFWSIIWSEEKEHDKEASWLGDVREKFADVEKQEDIMVSLQDVKAGIRKMANWKAPGPDWVRGYWFKKFTSLHLSIATTLQECLTSGVVPDWMVKGRTVLIQKDSGKGTAASNYRPIACLPLMWKLLSGIFAEKIYGHLVNNNLLPEEQKGCRKKSRGTKDQLMIDKAILHEVRAMKRNLSMCWIDYKKAYDMVPHSWILEMLDMVGVAENVRSLLKGSMAEWKTVLTANNEVLGEVNINRGIFQGDSLSPLIFVIAMIPLSILLNREKLGYFFGHGRVLVNHLLFMDDLKLFGRSKRELEALVEVVRVYSRDIGMEFGLDKCAVLEIRRGERAECEGIELPSGELMKEVDEDGYKYLGVLEGAKVMQKKMKEKIGNEYLRRVKLLAKSRLYAGNLVRGINAWAVSVVRYSSGILDWSDAELRKLDTKTRKILTMNGAFHRNSSVDRLYIGRKDGGRGLISVEDCVRQEELGLEEYVHATEETILEQVPGMIMHGRETKKHYKTRVVEERKERLMEKALHGRFFREMDENATERSVQWVKGDFLAKSTEAFVFAAQEQALRTRLAQSKWDGGVSPMCRICGIESESVWHVACGCKVLAQKEYKRRHDRMGLRIYWELCKKYGLKCAGKWFEEVPDKVRKSEDGRFEVWWDRSVETMQQVESNRPDVVVVDRTKKRWLVVDFAVPSDRNVTAKEEEKITKYSPLAQQIRKLHSVCTSVVPIVVGSLGVVTKRLERSLKELGIPDVLGGLQTSTIIGTTNILRKVLNL

SEQ ID NO: 18828 - protein, 1167 aa, Morbakka virulenta
MSFLKKKPTEGKPGSRRVSDDPQERVLIRTGEVSRPEASENVESSKDGSRTEEPMGRKGWKGEKRGKMGRTGLFKSKWSHFERKVLWECFVRSGGRRADGYIGKVKEMWDGRDVSVRSVASLLSQLKQIEANGLLSVVERGEIERMVREEALVEEESSEGEVDFCIRPESGLGEMEIENVVVANDAEERDLRVVIERVDVWRRGDDMRALSNDESGALALLREVYHSEDVVEVPSLKAQDGRKIGEEVKLVDGLMHNLVRDSMTVTEINRLLYAGSYVVASRLGVMGKNKTVRKKKPWWQRRLEKSIGEWRKDLGRIEEIKQGNKVRQVVRDRLNRKYELVVKGTMTVSTMLKNKISSASAKIRQFVGKSLARRQNNLFKNNQCQLYKELNGNGHKMESSAPNADEAREFWSIIWSEEKEHDKEASWLGDVREKFADVEKQEDIMVALQDVKAGIRKMANWKAPGPDWVRGYWFKKFTSLHLSIATTLQECLTSGVVPDWMVKGRTVLIQKDSGKGTAASNYRPIACLPLMWKLLSGIFAEKIYGHLVNNNLLPEEQKGCRKKSRGTKDQLMIDKAILHEVRAMKRNLSMCWIDYKKAYDMVPHSWILEMLDMVGVAENVRSLLKGSMAEWKTVLTANNEVLGEVNINRGIFQGDSLSPLIFVIAMIPLSILLNREKLGYFFGHGRVLVNHLLFMDDLKLFGRSKRELEALVEVVRVYSRDIGMEFGLDKCAVLEIRRGERAECEGIELPSGELMKEVDEDGYKYLGVLEGAKVMQKKMKEKIGNEYLRRVKLLAKSRLYAGNLVRGINAWAVSVVRYSSGILDWSDAELRKLDTKTRKILTMNGAFHRNSSVDRLYIGRKDGGRGLISVEDCVRQEELGLEEYVHATEETILEQVAGMIMHGRETKKHYKTRVVEERKERLMEKALHGRFFREMDENATERSVQWVKGGFLAKSTEAFVFAAQEQALRTRLAQSKWDGGVSPMCRICGIESESVWHVACGCKVLAQKEYKRRHDRMGLRIYWELCKKYGLKCAGKWFEEVPDKVRKSEDGRFEVWWDRSVETMQQVESNRPDVVVVDRTKKRWLVVDFAVPSNRNVTAKEEEKVTKYSPLAQQIRKFHSVCTIVAPIVVGSLGVVTKRLERSLKELGIPDVLGGLQASTIIGATNI

SEQ ID NO: 18829 - protein, 1174 aa, Morbakka virulenta
MSFLKKKPTEGKPGSRRVSDDPQERVLIRTGEVSRPEASENVESSKDGSRTEEPMGRKGWKGEKRGKMGRTGLFKSKWSHFERKVLWECFVRSGGRRADGYIGKVKEMWDGRDVSVRSVASLLSQLKQIEANGLLSVVERGEIERMVREEALVEEESSEGEVDFCIRPESGLGEMEIENVVVANDAEERDLRVVIERVDVWRRGDDMRALSNDESGALALLREVYHSEDVVEVPSLKAQDGRKIGEEVKLVDGLMHNLVRDSMTVTEINRLLYAGSYVVASRLGVMGKNKTVRKKKPWWQRRLEKSIGEWRKDLGRIEEIKQGNKVRQVVRDRLNRKYELVVKGTMTVSTMLKNKISSASAKIRQFVGKSLARRQNNLFKNNQCQLYKELNGNGHKMESSAPNADEAREFWSIIWSEEKEHDKEASWLGDVREKFADVEKQEDIMVSLQDVKAGIRKMANWKAPGPDWVRGYWFKKFTSLHLSIATTLQECLTSGVVPDWMVKGRTVLIQKDSGKGTAASNYRPIACLPLMWKLLSGIFAEKIYGHLVNNNLLPEEQKGCRKKSRGTKDQLMIDKAILHEVRAMKRNLSMCWIDYKKAYDMVPHSWILEMLDMVGVAENVRSLLKGSMAEWKTVLTANNEVLGEVNINRGIFQGDSLSPLIFVIAMIPLSILLNREKLGYFFGHGRVLVNHLLFMDDLKLFGRSKRELEALVEVVRVYSRDIGMEFGLDKCAVLEIRRGERAECEGIELPSGELMKEVDEDGYKYLGVLEGAKVMQKKMKEKIGNEYLRRVKLLAKSRLYAGNLVRGINAWAVSVVRYSSGILDWSDAELRKLDTKTRKILTMNGAFHRNSSVDRLYIGRKDGGRGLISVEDCVRQEELGLEEYVHATEETILEQVAGMIMHGRETKKHYKTRVVEERKERLMEKAMHGRFFREMDENATERSVQWVKGGFLAKSTEAFVFAAQEQALRTRLAQSKWDGGVSPMCRICGIESESVWHVACGCKVLAQKEYKRRHDRMGLRIYWELCKKYGLKCAGKWFEEVPDKVRKSEDGRFEVWWDRSVETMQQVECNRPDVVVVDRTKKRWLVVDFAVPSDRNVTAKEEEKVTKYSPLAQQIRKLHSVCTSVVPIVVGSLGVVTKRLERSLKELGIPDVLGGLQTSTIIGTTNILRKVLNL

SEQ ID NO: 18830 - protein, 1174 aa, Morbakka virulenta
MSFLKKKTTEGKPGSRRVSDDPQERVLIRTGEVSRPEASENVESSKDGSRTEEPMGRKGWKGEKRGKMGRTGLFKSKWSHFERKVLWECFVRSGGRRADGYIGKVKEMWDGRDVSVRSVASLLSQLKQIEANGLLSVVERGEIERMVREEALVEEESSEGEVDFCIRPESGLGEMEIENVVVANDAEERDLRVVIERVDVWRRGDDMRALSNDESGALALLREVYHSEDVVEVPSLKAQDGRKIGEEVKLVDGLMHNLVRDSMTVTEINRLLYAGSYVVASRLGVMGKNKTVRKKKPWWQRRLEKSIGEWRKDLGRIEEIKQGNKVRQVVRDRLNRKYELVVKGTMTVSTMLKNKISSASAKIRQFVGKSLARRQNNLFKNNQCQLYKELNGNGHKMESSAPNADEAREFWSIIWSEEKEHDKEASWLGDVREKFADVEKQEDIMVALQDVKAGIRKMANWKAPGPDWVRGYWFKKFTSLHLSIATTLQECLTSGVVPDWMVKGRTVLIQKDSGKGTAASNYRPIACLPLMWKLLSGIFAEKIYGHLVNNNLLPEEQKGCRKKSRGTKDQLMIDKAILHEVRAMKRNLSMCWIDYKKAYDMVPHSWILEMLDMVGVAENVRSLLKGSMAEWKTVLTANNEVLGEVNINRGIFQGDSLSPLIFVIAMIPLSILLNREKLGYFFGHGRVLVNHLLFMDDLKLFGRSKRELEALVEVVRVYSRDIGMEFGLDKCAVLEIRRGERAECEGIELPSGELMKEVDEDGYKYLGVLEGAKVMQKKMKEKIGNEYLRRVKLLAKSRLYAGNLVRGINAWAVSVVRYSSGILDWSDAELRKLDTKTRKILTMNGAFHRNSSVDRLYIGRKDGGRGLISVEDCVRQEELGLEEYVHATEETILEQVAGMIMHGRETKKHYKTRVVEERKERLMEKAMHGRFFREMDENATERSVQWVKGGFLAKSTEAFVFAAQEQALRTRLAQSKWDGGVSPMCRICGIESESVWHVACGCKVLAQKEYKRRHDRMGLRIYWELCKKYGLKCAGKWFEEVPDKVRKSEDGRFEVWWDRSVETMQQVESNRPDVVVVDRTKKRWLVVDFAVPSDRNVTAKEEEKITKYSPLAQQIRKLHSVCTSVVPIVVGSLGVVTKPLERSLKELGIPDVLGGLQISTIIGTTNILRKVLNL

SEQ ID NO: 18831 - protein, 1174 aa, Morbakka virulenta
MSFLKKKPTEGKPGSRRVSDDPQERVLIRTGEVSRPEASENVESSKDGSRMEEPMGRKGWKGEKRGKMGRTGLFKSKWSHFERKVLWECFVRSGGRRADGYIGKVKEMWDGRDVSVRSVASLLSQLKQIEANGLLSVVERGEIERMVREEALVEEESSEGEVDFCIRPESGLGEMEIENVVVANDAEERDLRVVIERVDVWRRGDDMRALSNDESGALALLREVYHSEDVVEVPSLKAQDGRKIGEEVKLVDGLMHNLVRDSMTVTEINRLLYAGSYVVASRLGVMGKNKTVRKKKPWWQRRLEKSIGEWRKDLGRIEEIKQGNKVRQVVRDRLNRKYELVVKGTMTVSTMLKNKISSASAKIRQFVGKSLARRQNNLFKNNQCQLYKELNGNGHKMESSAPNADEAREFWSIIWSEEKEHDKEASWLGDVREKFADVEKQEDIMVALQDVKAGIRKMANWKAPGPDWVRGYWFKKFTSLHLSIATTLQECLTSGVVPDWMVKGRTVLIQKDSGKGTAASNYRPIACLPLMWKLLSGIFAEKIYGHLVNNNLLPEEQKGCRKKSRGTKDQLMIDKAILHEVRAMKRNLSMCWIDYKKAYDMVPHSWILEMLDMVGVAENVRSLLKGSMAEWKTVLTANNEVLGEVNINRGIFQGDSLSPLIFVIAMIPLSILLNREKLGYFFGHGRVLVNHLLFMDDLKLFGRSKRELEALVEVVRVYSRDIGMEFGLDKCAVLEIRRGERAECEGIELPSGELMKEVDEDGYKYLGVLEGAKVMQKKMKEKIGNEYLRRVKLLAKSRLYAGNLVRGINAWAVSVVRYSSGILDWSDAELRKLDTKTRKILTMNGAFHRNSSVDRLYIGRKDGGRGLISVEDCVRQEELGLEEYVHATEETILEQVAGMIMHGRETKKHYKTRVVEERKERLMEKAMHGRFFREMDENATERSVQWVKGGFLAKSTEAFVFAAQEQALRTRLAQSKWDGGVSPMCRICGIESESVWHVACGCKVLAQKEYKRRHDRMGLRIYWELCKKYGLKCAGKWFEEVPDKVRKSEDGRFEVWWDRSVETMQQVESNRPDVVVVDRTKKRWLVVDFAVPSDRNVTAKEEEKITKYSPLAQQIRKLHSVCTSVVPIVVGSLGVVTKRLERSLKELGITDVLGGLQTSTIIETTNILRKVLNL

SEQ ID NO: 18832 - protein, 1174 aa, Morbakka virulenta
MSFLKKKPTEGKPGSRRVSDDPQERVLIRTGEVSRPEASENVESSKDGSRTEEPMGRKGRKGEKRGKMGRTGLFKSKWSHFERKVLWECFVRSGGRRADGYIGKVKEMWDGRDVSVRSVASLLSQLKQIEANGLLSVVERGEIERMVREEALVEEESSEGEVDFCIRPESGLGEMEIENVVVANDAEERDLRVVIERVDVWRRGDDMRALSNDESGALALLREVYHSEDVVEVPSLKAQDGRKIGEEVKLVDGLMHNLVRDSMTVTEINRLLYAGSYVVASRLGVMGKNKTVRKKKPWWQRRLEKSIGEWRKDLGRIEEIKQGNKVRQVVRDRLNRKYELVVKGTMTVSTMLKNKISSASAKIRQFVGKSLARRQNNLFKNNQCQLYKELNGNGHKMESSAPNADEAREFWSIIWSEEKEHDKEASWLGDVREKFADVEKQEDIMVALQDVKAGIRKMANWKAPGPDWVRGYWFKKFTSLHLSIATTLQECLTSGVVPDWMVKGRTVLIQKDSGKGTAASNYRPIACLPLMWKLLSGIFAEKIYGHLVNNNLLPEEQKGCRKKSRGTKDQLMIDKAILHEVRAMKRNLSMCWIDYKKAYDMVPHSWILEMLDMVGVAENVRSLLKGSMAEWKTVLTANNEVLGEVNINRGIFQGDSLSPLIFVIAMIPLSILLNREKLGYFFGHGRVLVNHLLFMDDLKLFGRSKRELEALVEVVRVYSRDIGMEFGLDKCAVLEIRRGERAECEGIELPSGELMKEVDEDGYKYLGVLEGAKVMQKKMKEKIGNEYLRRVKLLAKSRLYAGNLVRGINAWAVSVVRYSSGILDWSDAELRKLDTKTRKILTMNGAFHRNSSVDRLYIGRKDGGRGLISVEDCVRQEELGLEEYVHATEETILEQVAGMIMHGRETKKHYKTRVVEERKERLMEKAMHGRFFREMDENATERSVQWVKGGFLAKSTEAFVFAAQEQALRTRLAQSKWDGGVSPMCRICGIESESVWHVACGCKVLAQKEYKRRHDRMGLRIYWELCKKYGLKCAGKWFEEVPDKVRKSEDGRFEVWWDRSVETMQQVESNRPDVVVVDRTKKRWLVVDFAVPSDRNVTAKEEEKITKYSPLAQQIRKLHSVCTSVVPIVVGSLGVVTKRLERSLKELGIPDVLGGLQTSTIIGTTNILRKVLNL

SEQ ID NO: 18833 - protein, 1174 aa, Morbakka virulenta
MSFLKKKPTEGKPGSRRVSDGPQERVLIRTGEVSRPEASENVESSKDGSRTEEPMGRKGWKGEKRGKMGRTGLFKSKWSHFERKVLWECFVRSGGRRADGYIGKVKEMWDGRDVSVRSVASLLSQLKQIEANGLLSVVERGEIERMVREEALVEEESSEGEVDFCIRPESGLGEMEIENVVVANDAEERDLRVVIERVDVWRRGDDMRALSNDESGALALLREVYHSEDVVEVPSLKAQDGRKIGEEVKLVDGLMHNLVRDSMTVTEINRLLYAGSYVVASRLGVMGKNKTVRKKKPWWQRRLEKSIGEWRKDLGRIEEIKQGNKVRQVVRDRLNRKYELVVKGTMTVSTMLKNKISSASAKIRQFVGKSLARRQNNLFKNNQCQLYKELNGNGHKMESSAPNADEAREFWSIIWSEEKEHDKEASWLGDVREKFADVEKQEDIMVALQDVKAGIRKMANWKAPGPDWVRGYWFKKFTSLHLSIATTLQECLTSGVVPDWMVKGRTVLIQKDSGKGTAASNYRPIACLPLMWKLLSGIFAEKIYGHLVNNNLLPEEQKGCRKKSRGTKDQLMIDKAILHEVRAMKRNLSMCWIDYKKAYDMVPHSWILEMLDMVGVAENVRSLLKGSMAEWKTVLTANNEVLGEVNINRGIFQGDSLSPLIFVIAMIPLSILLNREKLGYFFGHGRVLVNHLLFMDDLKLFGRSKRELEALVEVVRVYSRDIGMEFGLDKCAVLEIRRGERAECEGIELPSGELMKEVDEDGYKYLGVLEGAKVMQKKMKEKIGNEYLRRVKLLAKSRLYAGNLVRGINAWAVSVVRYSSGILDWSDAELRKLDTKTRKILTMNGAFHRNSSVDRLYIGRKDGGRGLISVEDCVRQEELGLEEYVHATEETILEQVAGMIMHGRETKKHYKTRVVEERKERLMEKAMHGRFFREMDENATERSVQWVKGGFLAKSTEAFVFAAQEQALRTRLAQSKWDGGVSPMCRICGIESESVWHVACGCKVLAQKEYKRRHDRMGLRIYWELCKKYGLKCAGKWFEEVPDKVRKSEDGRFEVWWDRSVETMQQVESNRPDVVVVDRTKKRWLVVDFAVPSDRNVTAKEEEKVTKYSPLAQQIRKLHSVCTSVVPIVVGSLGVVTKRLERSLKELGIPDVLGGLQTSTIIGTTNILRKVLNL

SEQ ID NO: 18834 - protein, 840 aa, Morbakka virulenta
MHNLVRDGMAVTEINRLLYAGSYVVASRLGVMGKNKTVRKKKPWWQRRLEKSIGEWRKDLGRIEEIKQGNKVRQVVRDRLNRKYELVVKGTMTVSTMLKNKISSASAKIRQFVGKSLARRQNNLFKNNQCQLYKELNGNGHKMESSAPNADEAREFWSIIWSEEKEHDKEASWLGDVREKFADVEKQEDIMVSLQDVKAGIRKMANWKAPGPDWVRGYWFKKFTSLHLSIATTLQECLTSGVVPDWMVKGRTVLIQKDSGKGTAASNYRPIACLPLMWKLLSGIFAEKIYGHLVNNNLLPEEQKGCRKKSRGTKDQLMIDKAILHEVRAMKRNLSMCWIDYKKAYDMVPHSWILEMLDMVGVAENVRSLLKGSMAEWKTVLTANNEVLGEVNINRGIFQGDSLSPLIFVIAMIPLSILLNREKLGYFFGHGRVLVNHLLFMDDLKLFGRSKRELEALVEVVRVYSRDIGMEFGLDKCAVLEIRRGERAECEGIELPSGELMKEVDEDGYKYLGVLEGAKVMQKKMKEKIGNEYLRRVKLLAKSRLYAGNLVRGINAWAVSVVRYSSGILDWSDAELRKLDTKTRKILTMNGAFHRNSSVDRLYIGRKDGGRGLISVEDCVRQEELGLEEYVHATEETILEQVAGMIMHGRETKKHYKTRVVEERKERLMEKAMHGRFFREMDENATERSVQWVKGGFLAKSTEAFVFAAQEQALRTRLAQSKWDGGVSPMCRICGIESESVWHVACGCKVLAQKEYKRRHDRMGLRIYWELCKKYGLKCAGKWFEEVPDKVRKSEDGRFEVWWDRSVETMQQVECNRPDVVVVDRTKKRWLVVDFAVPSD

SEQ ID NO: 18835 - protein, 1174 aa, Morbakka virulenta
MSFLKKKPTEGKPGSRRVSDDPQERVLIRTGEVSRPEASENVESSKDGSRTEEPMGRKGWKGEKRGKMGRTGLFKSKWSHFERKVLWECFVRSGGRRADGYIGKVKEMWDGRDVSVRSVASLLSQLKQIEANGLLSVVERGEIERMVREEALVEEESSEGEVDFCIRPESGLGEMEIENVVVANDAEERDLRVVIERVDVWRRGDDMRALSNDESGALALLREVYHSEDVVEVPSLKAQDGRKIGEEVKLVDGLMHNLVRDSMTVTEINRLLYAGSYVVASRLGVMGKNKTVRKKKPWWQRRLEKSIGEWRKDLGRIEEIKQGNKVRQVVRDRLNRKYELVVKGTMTVSTMLKNKISSASAKIRQFVGKSLARRQNNLFKNNQCQLYKELNGNGHKMESSAPNADEAREFWSIIWSEEKEHDKEASWLGDVREKFADVEKQEDIMVALQDVKAGIRKMANWKAPGPDWVRGYWFKKFTSLHLSIATTLQECLTSGVVPDWMVKGRTVLIQKDSGKGTAASNYRPIACLPLMWKLLSGIFAEKIYGHLVNNNLLPEEQKGCRKKSRGTKDQLMIDKAILHEVRAMKRNLSMCWIDYKKAYDMVPHSWILEMLDMVGVAENVRSLLKGSMAEWKTVLTANNEVLGEVNINRGIFQGDSLSPLIFVIAMIPLSILLNREKLGYFFGHGRVLVNHLLFMDDLKLFGRSKRELEALVEVVRVYSRDIGMEFGLDKCAVLEIRRGERAECEGIELPSGELMKEVDEDGYKYLGVLEGAKVMQKKMKEKIGNEYLRRVKLLAKSRLYAGNLVRGINAWAVSVVRYSSGILDWSDAELRKLDTKTRKILTMNGAFHRNSSVDRLYIGRKDGGRGLISVEDCVRQEELGLEEYVHATEETILEQVAGMIMHGRETKKHYKTRVVEERKERLMEKAMHGRFFREMDENATERSVQWVKGGFLAKSTEAFVFAAQEQALRTRLAQSKWDGGVSPMCRICGIESESVWHVACGCKVLAQKEYKRRHDRMGLRIYWELCKKYGLKCAGKWFEEVPDKVRKSEDGRFEVWWDRSVETMQQVESNRPDVVVVDRTKKRWLVVDFAVPSDRNVTAKEEEKVTKYSPLAQQIRKLHSVCTSVVPIVVGSLGVVTKRLERSLKELGIPDVLGGLQTSTIIGTTNILRKVLNL

SEQ ID NO: 18836 - protein, 1174 aa, Morbakka virulenta
MSFLKKKPTEGKPGSRRVSDDPQERVLIRTGEVSRPEASENVESSKDGSRTEEPMGRKGWKGEKRGKMGRTGLFKSKWSHFERKVLWECFVRSGGRRADGYIGKVKEMWDGRDVSVRSVASLLSQLKQIEANGLLSVVERGEIERMVREEALVEEESSEGEVDFCIRPESGLGEMEIENVVVANDAEERDLRVVIERVDVWRRGDDMRALSNDESGALALLREVYHSEDVVEVPSLKAQDGRKIGEEVKLVDGLMHNLVRDSMTVTEINRLLYAGSYVVASRLGVMGKNKTVRKKKPWWQRRLEKSIGEWRKDLGRIEEIKQGNKVRQVVRDRLNRKYELVVKGTMTVSTMLKNKISSASAKIRQFVGKSLARRQNNLFKNNQCQLYKELNGNGHKMESSAPNADEAREFWSIIWSEEKEHDKEASWLGDVREKFADVEKQEDIMVSLQDVKAGIRKMANWKAPGPDWVRGYWFKKFTSLHLSIATTLQECLTSGVVPDWMVKGRTVLIQKDSGKGTAASNYRPIACLPLMWKLLSGIFAEKIYGHLVNNNLLPEEQKGCRKKSRGTKDQLMIDKAILHEVRAMKRNLSMCWIDYKKAYDMVPHSWILEMLDMVGVAENVRSLLKGSMAEWKTVLTANNEVLGEVNINRGIFQGDSLSPLIFVIAMIPLSILLNREKLGYFFGHGRVLVNHLLFMDDLKLFGRSKRELEALVEVVRVYSRDIGMEFGLDKCAVLEIRRGERAECEGIELPSGELMKEVDEDGYKYLGVLEGAKVMQKKMKEKIGNEYLRRVKLLAKSRLYAGNLVRGINAWAVSVVRYSSGILDWSDAELRKLDTKTRKILTMNGAFHRNSSVDRLYIGRKDGGRGLISVEDCVRQEELGLEEYVHATEETILEQVAGMIMHGRETKKHYKTRVVEERKERLMEKAMHGRFFREMDENATERSVQWVKGDFLAKSTEAFVFAAQEQALRTRLAQSKWDGGVSPMCRICGIESESVWHVACGCKVLAQKEYKRRHDRMGLRIYWELCKKYGLKCAGKWFEEVPDKVRKSEDGRFEVWWDRSVETMQQVESNRPDVVVVDRTKKRWLVVDFAVPSDRNVTAKEEEKITKYSPLAQQIRKLHSVCTSVVPIVVGSLGVVTKRLERSLKELGIPDVLGGLQTSTIIGTTNILRKVLNL

SEQ ID NO: 18837 - protein, 1174 aa, Morbakka virulenta
MSFLKKKPTEGKPGSRRVSDDPQERVLIRTGEVSRPEASENVESSKDGSRTEEPMGRKGWKGEKRGKMGRTGLFKSKWSHFERKVLWECFVRSGGRRADGYIGKVKEMWDGRDVSVRSVASLLSQLKQIEANGLLSVVERGEIERMVREEALVEEESSEGEVDFCIRPESGLGEMEIENVVVANDAEERDLRVVIERVDVWRRGDDMRALSNDESGALALLREVYHSEDVVEVPSLKAQDGRKIGEEVKLVDGLMHNLVRDSMTVTEINRLLYAGSYVVASRLGVMGKNKTVRKKKPWWQRRLEKSIGEWRKDLGRIEEIKQGNKVRQVVRDRLNRKYELVVKGTMTVSTMLKNKISSASAKIRQFVGKSLARRQNNLFKNNQCQLYKELNGNGHKMESSAPNADEAREFWSIIWSEEKEHDKEASWLGDVREKFADVEKQEDIMVALQDVKAGIRKMANWKAPGPDWVRGYWFKKFTSLHLSIATTLQECLTSGVVPDWMVKGRTVLIQKDSGKGTAASNYRPIACLPLMWKLLSGIFAEKIYGHLVNNNLLPEEQKGCRKKSRGTKDQLMIDKAILHEVRAMKRNLSMCWIDYKKAYDMVPHSWILEMLDMVGVAENVRSLLKGSMAEWKTVLTANNEVLGEVNINRGIFQGDSLSPLIFVIAMIPLSILLNREKLGYFFGHGRVLVNHLLFMDDLKLFGRSKRELEALVEVVRVYSRDIGMEFGLDKCAVLEIRRGERAECEGIELPSGELMKEVDEDGYKYLGVLEGAKVMQKKMKEKIGNEYLRRVKLLAKSRLYAGNLVRGINAWAVSVVRYSSGILDWSDAELRKLDTKTRKILTMNGAFHRNSSVDRLYIGRKDGGRGLISVEDCVRQEELGLEEYVHATEETILEQVAGMIMHGRETKKHYKTRVVEERKERLMEKAMHGRFFREMDENATERSVQWVKGDFLAKSTEAFVFAAQEQALRTRLAQSKWDGGVSPMCRICGIESESVWHVACGCKVLAQKEYKRRHDRMGLRIYWELCKKYGLKCAGKWFEEVPDKVRKSEDGRFEVWWDRSVETMQQVESNRPDVVVVDRTKKRWLVVDFAVPSDRNVTAKEEEKITKYSPLAQQIRKLHSVCTSVVPIVVGSLGVVTKRLERSLKELGIPDVLGGLQTSTIIGTTNILRKVLNL

SEQ ID NO: 18838 - protein, 1174 aa, Morbakka virulenta
MSFLKKKPTEGKPGSRRVSDDPQERVLIRTGEVSRPEASENVESSKDGSRTEEPMGRKGWKGEKRGKMGRTGLFKSKWSHFERKVLWECFVRSGGRRADGYIGKVKEMWDGRDVSVRSVASLLSQLKQIEANGLLSVVERGEIERMVREEALVEEESSEGEVDFCIRPESGLGEMEIENVVVANDAEERDLRVVIERVDVWRRGDDMRALSNDESGALALLREVYHSEDVVEVPSLKAQDGRKIGEEVKLVDGLMHNLVRDSMTVTEINRLLYAGSYVVASRLGVMGKNKTVRKKKPWWQRRLEKSIGEWRKDLGRIEEIKQGNKVRQVVRDRLNRKYELVVKGTMTVSTMLKNKISSASAKIRQFVGKSLARRQNNLFKNNQCQLYKELNGNGHKMESSAPNADEAREFWSIIWSEEKEHDKEASWLGDVREKFADVEKQEDIMVALQDVKAGIRKMANWKAPGPDWVRGYWFKKFTSLHLSIATTLQECLTSGVVPDWMVKGRTVLIQKDSGKGTAASNYRPIACLPLMWKLLSGIFAEKIYGHLVNNNLLPEEQKGCRKKSRGTKDQLMIDKAILHEVRAMKRNLSMCWIDYKKAYDMVPHSWILEMLDMVGVAENVRSLLKGSMAEWKTVLTANNEVLGEVNINRGIFQGDSLSPLIFVIAMIPLSILLNREKLGYFFGHGRVLVNHLLFMDDLKLFGRSKRELEALVEVVRVYSRDIGMEFGLDKCAVLEIRRGERAECEGIELPSGELMKEVDEDGYKYLGVLEGAKVMQKKMKEKIGNEYLRRVKLLAKSRLYAGNLVRGINAWAVSVVRYSSGILDWSDAELRKLDTKTRKILTMNGAFHRNSSVDRLYIGRKDGGRGLISVEDCVRQEELGLEEYVHATEETILEQVAGMIMHGRETKKHYKTRVVEERKERLMEKAMHGRFFREMDENATERSVQWVKGGFLAKSTEAFVFAAQEQALRTRLAQSKWDGGVSPMCRICGIESESVWHVACGCKVLAQKEYKRRHDRMGLRIYWELCKKYGLKCAGKWFEEVPDKVRKSEDGRFEVWWDRSVETMQQVESNRPDVVVVDRTKKRWLVVDFAVPSDRNVTAKEEEKITKYSPLAQQIRKLHSVCTSVVPIVVGSLGVVTKRLERSLKELGIPDVLGGLQASTIIGTTNILRKVLNL

SEQ ID NO: 18839 - protein, 1208 aa, Morbakka virulenta
MSFLKKNLTEEKSGSRRVSDDPQERVLIRTGEVSRPEASENVESSKDGSRTEEPMGRKGWKGEKRGKMGRTGLFKSKWSHFERKVLWECFVRSGGRRADGYIGKVKEMWDGRDVSVRSVASLLSQLKQIEANGLLSVVERGEIERMVREEALVEEESSEGEVDFCIRPESGLGEMEIENVVVANDAEERDLRVVIERVDVWRRGDDMRALSNDESGALALLREVYHSEDVVEVPSLKAQDGRKIGEEVKLVDGLMHNLVRDSMTVTEINRLLYAGSYVVASRLGVMGKNKTVRKKKPWWQRRLEKSIGEWRKDLGRIEEIKQGNKVRQVVRDRLNRKYELVVKGTMTVSTMLKNKISSASAKIRQFVGKSLARRQNNLFKNNQCQLYKELNGNGHKMESSVPNADEAREFWSIIWSEEKEHDKEASWLGDVREKFADVEKQEDIMVSLQDVKAGIRKMANWKAPGPDWVRGYWFKKFTSLHLSIATTLQECLTSGVVPDWMVKGRTVLIQKDSGKGTAASNYRPIACLPLMWKLLSGIFAEKIYGHLVNNNLLPEEQKGCRKKSRGTKDQLMIDKAILHEVRAMKRNLSMCWIDYKKAYDMVPHSWILEMLDMVGVAENVRSLLKGSMAEWKTVLTANNEVLGEVNINRGIFQGDSLSPLIFVIAMIPLSILLNREKLGYFFGHGRVLVNHLLFMDDLKLFGRSKRELEALVEVVRVYSRDIGMEFGLDKCAVLEIRRGERAECEGIELPSGELMKEVDEDGYKYLGVLEGAKVMQKKIKEKIGNEYLRRVKLLAKSRLYAGNLVRGINAWAVSVVRYSSGILDWSDAELRKLDTKTRKILTMNGAFHRNSSVDRLYIGRKDGGRGLISVEDCVRQEELGLEEYVHATEETILEQVAGMIMHGRETKKHYKTRVVEERKERLMEKAMHGRFFREMDENATERSVQWVKGGFLAKSTEAFVFAAQEQALRTRLAQSKWDGGVSPMCRICGIESESVWHVACGCKVLAQKEYKRRHDRMGLRIYWELCKKYGLKCAGKWFEEVPDKVRKSEDGRFEVWWDRSVETMQQVECNRPDVVVVDRTKKRWLIVDFAVPCDRNVTAKEEEKVTKYSPLAQQIRKLHSVCISVVPIVVGSLGVVTKRLERSLKELGIPDVLGGLQTSTTIGTTNILRKVLNLVLNFSRLAGEYHLPVQAVMLDKNFVYYYYSKMLL

SEQ ID NO: 18840 - protein, 833 aa, Morbakka virulenta
MKGTMTVSTMLKNKISSASAKIRQFVGKSLATTQNNLFKNNQSQLYKELNGNGHKMESSAPNADEAREFWSIIWSEEKEHDKEASWLGDVREKFADVEKQEDIMVSLQDVKAGIRKMANWKAPGPDWVRGYWFKKFTSLHLSIATTLQECLTSGVVPDWMVKGRTVLIQKDSGKGTAASNYRPIACLPLMWKLLSGIFAEKIYGHLVNNNLLPEEQKGCRKKSRGTKDQLMIDKAILHEVRAMKRNLSMCWIDYKKAYDMVPHSWILEMLDMVGVAENVRSLLKGSMAEWKTVLTANNEVLGEVNINRGIFQGDSLSPLIFVIAMIPLSILLNREKLGYFFGHGRVLVNHLLFMDDLKLFGRSKRELEALVEVVRVYSRDIGMEFGLDKCAVLEIRRGERAECEGIELPSGELMKEVDEDGYKYLGVLEGAKVMQKKMKEKIGNEYLRRVKLLAKSRLYAGNLVRGINAWAVSVVRYSSGILDWSDAELRKLDTKTRKILTMNGAFHRNSSVDRLYIGRKDGGRGLISVEDCVRQEELGLEEYVHATEETILEQVAGMIMHGRETKKHYKTRVVEERKERLMEKAMHGRFFREMDENATERSVQWVKGGFLAKSTEAFVFAAQEQALRTRLAQSKWDGGVSPMCRICGIESESVWHVACGCKVLAQKEYKRRHDRMGLRIYWELCKKYGLKCAGKWFEEVPDKVRKSEDGRFEVWWDRSVETMQQVECNRPDVVVVDRTKKRWLVVDFAVPSDRNVTAKEEGKVTKYSPLAQQIRKLHSVCTIVVPIVVGSLGVVTKRLERSLKKLGIPDVLGGLQTSTIIGTTNILRKVLNL

SEQ ID NO: 18841 - protein, 1072 aa, Morbakka virulenta
MMPPHYWDGRDVSVRSVASLLSQLKQIEANGLLSVVERGEIERMVREEALVEEESSEGEVDFCIRPESGLGEMEIENVVVANDAEERDLRVVIERVDVWRRGDDMRALSNDESGALALLREVYHSEDVVEVPSLKAQDGRKIGEEVKLVDGLMHNLVRDSMTVTEINRLLYAGSYVVASRLGVMGKNKTVRKKKPWWQRRLEKSIGEWRKDLGRIEEIKQGNKVRQVVRDRLNRKYELVVKGTMTVSTMLKNKISSASAKIRQFVGKSLARRQNNLFKNNQCQLYKELNGNGHKMESSAPNADEAREFWSIIWSEEKEHDKEASWLGDVREKFADVEKQEDIMVSLQDVKAGIRKMANWKAPGPDWVRGYWFKKFTSLHLSIATTLQECLTSGVVPDWMVKGRTVLIQKDSGKGTAASNYRPIACLPLMWKLLSGIFAEKIYGHLVNNNLLPEEQKGCRKKSRGTKDQLMIDKAILHEVRAMKRNLSMCWIDYKKAYDMVPHSWILEMLDMVGVAENVRSLLKGSMAEWKTVLTANNEVLGEVNINRGIFQGDSLSPLIFVIAMIPLSILLNREKLGYFFGHGRVLVNHLLFMDDLKLFGRSKRELEALVEVVRVYSRDIGMEFGLDKCAVLEIRRGERAECEGIELPSGELMKEVDEDGYKYLGVLEGAKVMQKKMKEKIGNEYVRRVKLLAKSRLYAGNLVRGINAWAVSVVRYSSGILDWSDAELRKLDTKTRKILTMNGAFHRNSSVDCLYIGRKDGGRGLISVEDCVRQEELGLEEYVHATEETILEQVAGMIMHGRETKKHYKTRVVEERKERLMEKALHGRFFREMDENATERSVQWVKGGFLAKSTEAFVFAAQEQALRTRLAQSKWDGGVSPMCRICGIESESVWHVACGCKVLAQKEYKRRHDRMGLRIYWELCKKYGLKCAGKWFEEVPDKVRKSEDGRFEVWWNRSVETMQQVECNRPDVVVVDRTKKRWLVVDFAVPSDRNVTAKEEEKVTKYSPLAQQIRKLHSVCTSVVPIVVGSLGVVTKRLERSLKELGIPDVLGGLQTSTIIGTTNILRKVLNL

SEQ ID NO: 18842 - protein, 1174 aa, Morbakka virulenta
MSFLKKKTTEGKPGSRRVSDDPQERVLIRTGEVSRPEASENVESSKDGSRTEEPMGRKGWKGEKRGKMGRTGLFKSKWSHFERKVLWECFVRSGGRRADGYIGKVKEMWDGRDVSVRSVASLLSQLKQIEANGLLSVVERGEIERMVREEALVEEESSEGEVDFCIRPESGLGEMEIENVVVANDAEERDLRVVIERVDVWRRGDDMRALSNDESGALALLREVYHSEDVVEVPSLKAQDGRKIGEEVKLVDGLMHNLVRDSMTVTEINRLLYAGSYVVASRLGVMGKNKTVRKKKPWWQRRLEKSIGEWRKDLGRIEEIKQGNKVRQVVRDRLNRKYELVVKGTMTVSTMLKNKISSASAKIRQFVGKSLARRQNNLFKNNQCQLYKELNGNGHKMESSAPNADEAREFWSIIWSEEKEHDKEASWLGDVREKFADVEKQEDIMVALQDVKAGIRKMANWKAPGPDWVRGYWFKKFTSLHLSIATTLQECLTSGVVPDWMVKGRTVLIQKDSGKGTAASNYRPIACLPLMWKLLSGIFAEKIYGHLVNNNLLPEEQKGCRKKSRGTKDQLMIDKAILHEVRAMKRNLSMCWIDYKKAYDMVPHSWILEMLDMVGVAENVRSLLKGSMAEWKTVLTANNEVLGEVNINRGIFQGDSLSPLIFVIAMIPLSILLNREKLGYFFGHGRVLVNHLLFMDDLKLFGRSKRELEALVEVVRVYSRDIGMEFGLDKCAVLEIRRGERAECEGIELPSGELMKEVDEDGYKYLGVLEGAKVMQKKMKEKIGNEYLRRVKLLAKSRLYAGNLVRGINAWAVSVVRYSSGILDWSDAELRKLDTKTRKILTMNGAFHRNSSVDRLYIGRKDGGRGLISVEDCVRQEELGLEEYVHATEETILEQVAGMIMHGRETKKHYKTRVVEERKERLMEKAMHGRFFREMDENATERSVQWVKGGFLAKSTEAFVFAAQEQALRTRLAQSKWDGGVSPMCRICGIESESVWHVACGCKVLAQKEYKRRHDRMGLRIYWELCKKYGLKCAGKWFEEVPDKVRKSEDGRFEVWWDRSVETMQQVECNRPDVVVVDRTKKRWLVVDFAVPSDRNVTAKEEEKITKYSPLAQQIRKLHSVCTSVVPIVVGSLGVVTKRLERSLKELGIPDVLGGLQTSTIIGTTNILRKVLNL

SEQ ID NO: 18843 - protein, 1174 aa, Morbakka virulenta
MSFLKKNMTEGEPGSRRVSDDPQKRVLIRTGEVYRPKASENVESSRDGSRTEEPMGKKGWKGEKRGKMGRTGLFKSKWSHFERKVLWECFVRSGGRRADGYIGKVKEMWDGRDVSVRSVASLLSQLKQIEANGLLSVVERGEIERMVREEALVEEESSEGEVDFCIRPESGLGEMEIENVVVANDAEERDLRVVIERVDVWRRGDDMRALSNDESGALALLREVYHSEDVVEVPSLKAQDGRKIGEEVKLVDGLMHNLVRDSMTVTEINRLLYAGSYVVASRLGVMGKNKTVRKKKPWWQRRLEKSIGEWRKDLGRIEEIKQGNKVRQVVRDRLNRKYELVVKGTMTVSTMLKNKISSASAKIRQFVGKSLARRQNNLFKNNQCQLYKELNGNGHKMESSAPNADEAREFWSIIWSEEKEHDKEASWLGDVREKFADVEKQEDIMVALQDVKAGIRKMANWKAPGPDWVRGYWFKKFTSLHLSIATTLQECLTSGVVPDWMVKGRTVLIQKDSGKGTAASNYRPIACLPLMWKLLSGIFAEKIYGHLVNNNLLPEEQKGCRKKSRGTKDQLMIDKAILHEVRAMKRNLSMCWIDYKKAYDMVPHSWILEMLDMVGVAENVRSLLKGSMAEWKTVLTANNEVLGEVNIDRGIFQGDSLSPLIFVIAMIPLSILLNREKLGYFFGHGRVLVNHLLFMDDLKLFGRSKRELEALVEVVRVYSRDIGMEFGLDKCAVLEIRRGERAECEGIELPSGELMKEVDEDGYKYLGVLEGAKVMQKKMKEKIGNEYLRRVKLLAKSRLYAGNLVRGINAWAVSVVRYSSGILDWSDAELRKLDTKTRKILTMNGAFHRNSSVDRLYIGRKDGGRGLISVEDCVRQEELGLEEYVHATEETILEQVAGMIMHGRETKKHYKTRVVEERKERLMEKAMHGRFFREMDENATERSVQWVKGGFLAKSTEAFVFAAQEQALRTRLAQSKWDGGVSPMCRICGIESESVWHVACGCKVLAQKEYKRRHDRMGLRIYWELCKKYGLKCAGKWFKEVPDKVRKSEDGRLDVWWDRSVETTQQVEFNRPDVVVVDRTKKRWLVVDFAVPSDRNVTAKEDEKVTKYSPLAQKIRKLHSVCTSVVPIVVGSLGVVTKRLERSLKELVIPDVLGGLQTSTIIGTTNILRKVLNL

SEQ ID NO: 18844 - protein, 920 aa, Morbakka virulenta
MHNLVRDGMTVTEINRLLYAGSYVVASRLGVMGKNKTVRKKKPWWQRRLEKSIGEWRKDLGRIEEIKQGNKVRQVVRDRLNRKYELVVKGTMTVSTMLKNKISSASAKIRQFVGKSLARRQNNLFKNNQCQLYKELNGNGHKMESSAPNADEAREFWSIIWSEEKEHDKEASWLGDVREKFADVEKQEDIMVALQDVKAGIRKMANWKAPGPDWVRGYWFKKFTSLHLSIATTLQECLTSGVVPDWMVKGRTVLIQKDSGKGTAASNYRPIACLPLMWKLLSGIFAEKIYGHLVNNNLLPEEQKGCRKKSRGTKDQLMIDKAILHEVRAMKRNLSMCWIDYKKAYDMVPHSWILEMLDMVGVAENVRSLLKGSMAEWKTVLTANNEVLGEVNINRGIFQGDSLSPLIFVIAMIPLSILLNREKLGYFFGHGRVLVNHLLFMDDLKLFGRSKRELEALVEVVRVYSRDIGMEFGLDKCAVLEIRRGERAECEGIELPSGELMKEVDEDGYKYLGVLEGAKVMQKKMKEKIGNEYLRRVKLLAKSRLYAGNLVRGINAWAVSVVRYSSGILDWSDAELRKLDTKTRKILTMNGAFHRNSSVDRLYIGRKDGGRGLISVEDCVRQEELGLEEYVHATEETILEQVAGMIMHGRETKKHYKTRVVEERKERLMEKAMHGRFFREMDENATERSVQWVKGGFLAKSTEAFVFAAQEQALRTRLAQSKWDGGVSPMCRICGIESESVWHVACGCKVLAQKEYKRRHDRMGLRIYWELCKKYGLKCAGKWFEEVPDKVRKSEDGRFEVWWDRSVETMQQVESNRPDVVVVDRTKKRWLVVDFAVPSDRNVTAKEEEKVTKYSPLAQQIRKLHSVCTSVVPIVVGSLGVVTKRLERSLKELGIPDVLGGLQTSTIIGTTNILRKVLNL

SEQ ID NO: 18845 - protein, 1174 aa, Morbakka virulenta
MSFLKKKPTEGKPGSRRVSDDPQERVLIRTGEVSRPEASENVESSKDGSRTEEPMGRKGWKGEKRGKMGRTGLFKSKWSHFERKVLWECFVRSGGRRADGYIGKVKEMWDGRDVSVRSVASLLSQLKQIEANGLLSVVERGEIERMVREEALVEEESSEGEVDFCIRPESGLGEMEIENVVVANDAEERDLRVVIERVDVWRRGDDMRALSNDESGALALLREVYHSEDVVEVPSLKAQDGRKIGEEVKLVDGLMHNLVRDSMTVTEINRLLYAGSYVVASRLGVMGKNKTVRKKKPWWQRRLEKSIGEWRKDLGRIEEIKQGNKVRQVVRDRLNRKYELVVKGTMTVSTMLKNKISSASAKIRQFVGKSLARRQNNLFKNNQCQLYKELNGNGHKMESSAPNADEAREFWSIIWSEEKEHDKEASWLGDVREKFADVEKQEDIMVSLQDVKAGIRKMANWKAPGPDWVRGYWFKKFTSLHLSIATTLQECLTSGVVPDWMVKGRTVLIQKDSGKGTAASNYRPIACLPLMWKLLSGIFAEKIYGHLVNNNLLPEEQKGCRKKSRGTKDQLMIDKAILHEVRAMKRNLSMCWIDYKKAYDMVPHSWILEMLDMVGVAENVRSLLKGSMAEWKTVLTANNEVLGEVNINRGIFQGDSLSPLIFVIAMIPLSILLNREKLGYFFGHGRVLVNHLLFMDDLKLFGRSKRELEALVEVVRVYSRDIGMEFGLDKCAVLEIRRGERAECEGIELPSGELMKEVDEDGYKYLGVLEGAKVMQKKMKEKIGNEYLRRVKLLAKSRLYAGNLVRGINAWAVSVVRYSSGILDWSDAELRKLDTKTRKILTMNGAFHRNSSVDRLYIGRKDGGRGLISVEDCVRQEELGLEEYVHATEETILEQVAGMIMHGRETKKHYKTRVVEERKERLMEKAMHGRFFREMDENATERSVQWVKGGFLAKSTEAFVFAAQEQALRTRLAQSKWDGSVSPMCRICGIESESVWHVACGCKVLAQKEYKRRHDRMGLRIYWELCKKYGLKCAGKWFEEVPDKVRKSEDGRFEVWWDRSVETMQQVESNRPDVVVVDRTKKRWLVVDFAVPSDRNVTAKEEEKITKYSPLAQQIRKLHSVCTSVVPIVVGSLGVVTKRLERSLKELGIPDVLGGLQTSTIIGTTNILRKVLNL

SEQ ID NO: 18846 - protein, 1174 aa, Morbakka virulenta
MSFLKKKPTEGKPGSRRVSDDPQERVLIRTGEVSRPEASENVESSKDGSRTEEPMGRKGWKGEKRGKMGRTGLFKSKWSHFERKVLWECFVRSGGRRADGYIGKVKEMWDGRDVSVRSVASLLSQLKQIEANGLLSVVERGEIERMVREEALVEEESSEGEVDFCIRPESGLGEMEIENVVVANDAEERDLRVVIERVDVWRRGDDMRALSNDESGALALLREVYHSEDVVEVPSLKAQDGRKIGEEVKLVDGLMHNLVRDSMTVTEINRLLYAGSYVVASRLGVMGKNKTVRKKKPWWQRRLEKSIGEWRKDLGRIEEIKQGNKVRQVVRDRLNRKYELVVKGTMTVSTMLKNKISSASAKIRQFVGKSLARRQNNLFKNNQCQLYKELNGNGHKMESSVPNADEAREFWSIIWSEEKEHDKEASWLGDVREKFADVEKQEDIMVALQDVKAGIRKMANWKAPGPDWVRGYWFKKFTSLHLSIATTLQECLTSGVVPDWMVKGRTVLIQKDSGKGTAASNYRPIACLPLMWKLLSGIFAEKIYGHLVNNNLLPEEQKGCRKKSRGTKDQLMIDKAILHEVRAMKRNLSMCWIDYKKAYDMVPHSWILEMLDMVGVAENVRSLLKGSMAEWKTVLTANNEVLGEVNINRGIFQGDSLSPLIFVIAMIPLSILLNREKLGYFFGHGRVLVNHLLFMDDLKLFGRSKRELEALVEVVRVYSRDIGMEFGLDKCAVLEIRRGERAECEGIELPSGELMKEVDEDGYKYLGVLEGAKVMQKKMKKKIGNEYLRRVKLLAKSRLYAGNLVRGINAWAVSVVRYSSGILDWSDAELRKLDTKTRKILTMNGAFHRNSSVDRLYIGRKDGGRGLISVEDCVRQEELGLEEYVHATEEKILEQVAGMIMHGRETKKHYKTRVVEERKERLMEKAMHGRFFREMDENATERSVQWVKGGFLAKSTEAFVFAAQEQALRTRLAQSKWDGGVSPMCRICGIESESVWHVACGCKVLAQKEYKRRHDRMGLRIYWELCKKYGLKCAGKWFEEVPDKVRKSEDGRFEVWWDRSVETMQQVESNRPDVVVVDRTKKRWLVVDFAVPSDRNVTAKEEEKVTKYSPLAQQIRKLHSVCTSVVPIVVGSLGVVTKRLERSLKELGIPDVLGGLQTSTIIGTTNISRKVLNL

SEQ ID NO: 18847 - protein, 1174 aa, Morbakka virulenta
MSFLKKKPTEGKPGSRRVSVDRQERVLIRTGEVSRPEASENVESSKDGSRTEEPIGRKGWKGEKRGKMGRTGLFKSKWSHFERKVLWECFVRSGGRRADGYIGKVKEMWDGRDVSVRSVASLLSQLKQIEANGLLSVVERGEIERMVREEALVEEESSEGEVDFCIRPESGLGEMEIENVVVANDAEERDLRVVIERVDVWRRGDDMRALSNDESGALALLREVYHSEDVVEVPSLKAQDGRKIGEEVKLVDGLMHNLVRDSMTVTEINRLLYAGSYVVASRLGVMGKNKTVRKKKPWWQRRLEKSIGEWRKDLGRIEEIKQGNKVRQVVRDRLNRKYELVVKGTMTVSTMLKNKISSASAKIRQFVGKSLARRQNNLFKNNQCQLYKELNGNGHKMESSAPNADEAREFWSIIWSEEKEHDKEASWLGDVREKFADVEKQEDIMVALQDVKAGIRKMANWKAPGPDWVRGYWFKKFTSLHLSIATTLQECLTSGVVPDWMVKGRTVLIQKDSGKGTAASNYRPIACLPLMWKLLSGIFAEKIYGHLVNNNLLPEEQKGCRKKSRGTKDQLMIDKAILHEVRAMKRNLSMCWIDYKKAYDMVPHSWILEMLDMVGVAENVRSLLKGSMAEWKTVLTANNEVLGEVNINRGIFQGDSLSPLIFVIAMIPLSILLNREKLGYFFGHGRVLVNHLLFMDDLKLFGRSKRELEALVEVVRVYSRDIGMEFGLDKCAVLEIRRGERAECEGIELPSGELMKEVDEDGYKYLGVLEGAKVMQKKMKEKIGNEYLRRVKLLAKSRLYAGNLVRGINAWAVSVVRYSSGILDWSDAELRKLDTKTRKILTMNGAFHRNSSVDRLYIGRKDGGRGLISVEDCVRQEELGLEEYVHATEETILEQVAGMIMHGRETKKHYKTRVVEERKERLMEKAMHGRFFREMDENATERSVQWVKGGFLAKSTEAFVFAAQEQALRTRLAQSKWDGGVSPMCRICGIESESVWHVACGCKVLAQKEYKRRHDRMGLRIYWELCKKYGLKCAGKWFEEVPDKVRKSEDGRFEVWWDRSVETMQQVESNRPDVVVVDRTKKRWLVVDFAVPSDRNVTAKEEEKITKYSPLAQQIRKLHSVCTSVVPIVVGSLGVVTKRLERSLKELGIPDVLGGLQTSTIIGTTNILRKVLNL

SEQ ID NO: 18848 - protein, 1174 aa, Morbakka virulenta
MRFLKKKPTEGKPGSRRVSDDPQERVLIRTGEVSRPEASENVESSKDGSRTEEPMGRKGWKGEKRGKMGRTGLFKSKWSHFERKVLWECFVRSGGRRADGYIGKVKEMWDGRDVSVRSVASLLSQLKQIEANGLLSVVERGEIERMVREEALVEEESSEGEVDFCIRPESGLGEMEIENVVVANDAEERDLRVVIERVDVWRRGDDMRALSNDESGALALLREVYHSEDVVEVPSLKAQDGRKIGEEVKLVDGLMHNLVRDSMTVTEINRLLYAGSYVVASRLGVMGKNKTVRKKKPWWQRRLEKSIGEWRKDLGRIEEIKQGNKVRQVVRDRLNRKYELVVKGTMTVSTMLKNKISSASAKIRQFVGKSLARRQNNLFKNNQCQLYKELNGNGHKMESSAPNADEAREFWSIIWSEEKEHDKEASWLGDVREKFADVEKQEDIMVSLQDVKAGIRKMANWKAPGPDWVRGYWFKKFTSLHLSIATTLQECLTSGVVPDWMVKGRTVLIQKDSGKGTAASNYRPIACLPLMWKLLSGIFAEKIYGHLVNNNLLPEEQKGCRKKSRGTKDQLMIDKAILHEVRAMKRNLSMCWIDYKKAYDMVPHSWILEMLDMVGVAENVRSLLKGSMAEWKTVLTANNEVLGEVNINRGIFQGDSLSPLIFVIAMIPLSILLNREKLGYFFGHGRVLVNHLLFMDDLKLFGRSKRELEALVEVVRVYSRDIGMEFGLDKCAVLEIRRGERAECEGIELPSGELMKEVDEDGYKYLGVLEGAKVMQKKMKEKIGNEYLRRVKLLAKSRLYAGNLVRGINAWAVSVVRYSSGILDWSDAELRKLDTKTRKILTMNGAFHRNSSVDCLYIGRKDGGRGLISVEDCVRQEELGLEEYVHATEETILEQVAGMIMHGRETKKHYKTRVVEERKERLMEKAMHGRFFREMDENATERSVQWVKGGFLAKSTEAFVFAAQEQALRTRLAQSKWDGGVSPMCRICGIESESVWHVACGCKVLAQKEYKRRHDRMGLRIYWELCKKYGLKCAGKWFEEVPDKVRKSEDGRFEVWWDRSVETMQQVESNRPDVVVVDRTKKRWLVVDFAVPSDRNVTAKEEEKITKYSPLAQQIRKLHNVCTSVVPIVVGSLGVVTKRLERSLKELGIPDVLGGLQTSTIIGTTNILRKVLNL

SEQ ID NO: 18849 - protein, 1157 aa, Morbakka virulenta
MSFLKKKPTEGEPESRRVSDDPQERVLIRTGEVSRPEASENVKSSKDGSRTEEPMGRKGWKGEKRGKMGRTGLFKSKWSHFERKVLWECFVMSGGRRADGYIGKVKEMWDGRDVSVRSVASLLSQLKQIEANGLLSVVERGEIERMVREEALVEEESSEGEVDFCIRPESGLGEMEIENVVVANDAEERDLRVVIERVDVWRRGDDMRALSNDESGALALLREVYHSEDVVEVPSLKAQDGRKIGEEVKLVDGLMHNLVRDSMTVTEINRLLYAGSYVVASRLGVMGKNKTVRKKKPWWQRRLEKSIGEWRKDLGRIEEIKQGNKVRQVVRDRLNRKYELVVKGTMTVSTMLKNKISSASAKIRQFVGKSLARRQNNLFKNNQCQLYKELNGNGHKMESSAPNADEAREFWSIIWSEEKEHDKEASWLGDVREKFADVEKQEDIMVALQDVKAGIRKMANWKAPGPDWVRGYWFKKFTSLHLSIATTLQECLTSGVVPDWMVKGRTVLIQKDSGKGTAASNYRPIACLPLMWKLLSGIFAEKIYGHLVNNNLLPEEQKGCRKKSRGTKDQLMIDKAILHEVRAMKRNLSMCWIDYKKAYDMVPHSWILEMLDMVGVAENVRSLLKGSMAEWKTVLTANNEVLGEVNINRGIFQGDSLSPLIFVIAMIPLSILLNREKLGYFFGHGRVLVNHLLFMDDLKLFGRSKRELEALVEVVRVYSRDIGMEFGLDKCAVLEIRRGERAECEGIELPSGELMKEVDEDGYKYLGVLEGAKVMQKKMKEKIGNEYLRRVKLLAKSRLYAGNLVRGINAWAVSVVRYSSGILDWSDAELRKLDTKTRKILTMNGAFHRNSSVDRLYIGRKDGGRGLISVEDCVRQEELGLEEYVHATEETILEQVAGMIMHGRETKKHYKTRVVEERKERLMEKAMHGRFFREMDENATERSVQWVKGGFLAKSTEAFVFAAQEQALRTRLAQSKWDGGVSPMCRICGIESESVWHVACGCKVLAQKEYKRRHDRMGLRIYWELCKKYGLKCAGKWFEEVPDKVRKSEDGRFEVWWDRSVETMQQVECNRPDDVVVVDRTKKRWLVVDFAVPSGRNVIAKEEEKVTKYSPLPQQIQKLHSVCSSVVPIVVGSLGVVTKRLEGSLKELGIPEVLGGL

SEQ ID NO: 18850 - protein, 1174 aa, Morbakka virulenta
MSFLKKKPTEGKPGSRRVSDDPQERVLIRTGEVSRPEASENVESSKDGSRTEEPMGRKGWKGEKRGKMGRTGLFKSKWSHFERKVLWECFVRSGGRRADGYIGKVKEMWDGRDVSVRSVASLLSQLKQIEANGLLSVVERGEIERMVREEALVEEESSEGEVDFCIRPESGLGEMEIENVVVANDAEERDLRVVIERVDVWRRGDDMRALSNDESGALALLREVYHSEDVVEVPSLKAQDGRKIGEEVKLVDGLMHNLVRDSMTVTEINRLLYAGSYVVASRLGVMGKNKTVRKKKPWWQRRLEKSIGEWRKDLGRIEEIKQGNKVRQVVRDRLNRKYELVVKGTMTVSTMLKNKISSASAKIRQFVGKSLARRQNNLFKNNQCQLYKELNGNGHKMESSAPNADEAREFWSIIWSEEKEHDKEASWLGDVREKFADVEKQEDIMVALQDVKAGIRKMANWKAPGPDWVRGYWFKKFTSLHLSIATTLQECLTSGVVPDWMVKGRTVLIQKDSGKGTAASNYRPIACLPLMWKLLSGIFAEKIYGHLVNNNLLPEEQKGCRKKSRGTKDQLMIDKAILHEVRAMKRNLSMCWIDYKKAYDMVPHSWILEMLDMVGVAENVRSLLKGSMAEWKTVLTANNEVLGEVNINRGIFQGDSLSPLIFVIAMIPLSILLNREKLGYFFGHGRVLVNHLLFMDDLKLFGRSKRELEALVEVVRVYSRDIGVEFGLDKCAVLEIRRGERAECEGIELPSGELMKEVDEDGYKYLGVLEGAKVMQKKMKEKIGNEYLRRVKLLAKSRLYAGNLVRGINAWAVSVVRYSSGILDWSDAELRKLDTKTRKILTMNGAFHRNSSVDRLYIGRKDGGRGLISVEDCVRQEELGLEEYVHATEETILEQVAGMIMHGRETKKHYKTRVVEERKERLMEKAMHGRFFREMDENATERSVQWVKGGFLAKSTEAFVFAAQEQALRTRLAQSKWDGGVSPMCRICGIESESVWHVACGCKVLAQKEYKRRHDRMGLRIYWELCKKYGLKCAGKWFEEVPDKVRKSEDGRFEVWWDRSVETMQQVESNRPDVVVVDRTKKRWLVVDFAVPSDRNVTAKEEEKITKYSPLAQQIRKLHSVCTSVVPIVVGSLGVVTKRLERSLKELGIPDVLGGLQTSTIIGTTNILRKVLNL

SEQ ID NO: 18851 - protein, 1174 aa, Morbakka virulenta
MSFLKKKPTEGKPGSRRVSDDPQERVLIRTGEVSRPEASENVESSKDGSRTEEPMGRKGWKGEKRGKMGRTGLFKSKWSHFERKVLWECFVRSGGRRADGYIGKVKEMWDGRDVSVRSVASLLSQLKQIEANGLLSVVERGEIERMVREEALVEEESSEGEVDFCIRPESGLGEMEIENVVVANDAEERDLRVVIERVDVWRRGDDMRALSNDESGALALLREVYHSEDVVEVPSLKAQDGRKIGEEVKLVDGLMHNLVRDSMTVTEINRLLYAGSYVVASRLGVMGKNKTVRKKKPWWQRRLEKSIGEWRKDLGRIEEIKQGNKVRQVVRDRLNRKYELVVKGTMTVSTMLKNKISSASAKIRQFVGKSLARRQNNLFKNNQCQLYKELNGNGHKMESSAPNADEAREFWSIIWSEEKEHDKEASWLGDVREKFADVEKQEDIMVALQDVKAGIRKMANWKAPGPDWVRGYWFKKFTSLHLSIATTLQECLTSGVVPDWMVKGRTVLIQKDSGKGTAASNYRPIACLPLMWKLLSGIFAEKIYGHLVNNNLLPEEQKGCRKKSRGTKDQLMIDKAILHEVRAMKRNLSMCWIDYKKAYDMVPHSWILEMLDMVGVAENVRSLLKGSMAEWKTVLTANNEVLGEVNINRGIFQGDSLSPLIFVIAMIPLSILLNREKLGYFFGHGRVLVNHLLFMDDLKLFGRSKRELEALVEVVRVYSRDIGMEFGLDKCAVLEIRRGERAECEGIELPSGELMKEVDEDGYKYLGVLEGAKVMQKKMKEKIGNEYLRRVKLLAKSRLYAGNLVRGINAWAVSVVRYSSGILDWSDAELRKLDTKTRKILTMNGAFHRNSSVDRLYIGRKDGGRGLISVEDCVRQEELGLEEYVHATEETILEQVAGMIMHGRETKKHYKTRVVEERKERLMEKAMHGRFFREMDENATERSVQWVKGGFLAKSTEAFVFAAQEQALRTRLAQSKWDGGVSPMCRICGIESESVWHVACGCKVLAQKEYKRRHDRMGLRIYWELCKKYGLKCAGKWFEEVPDKVRKSEDGRFEVWWDRSVETMQQVESNRPDVVVVDRTKKRWLVVDFAVPSDRNVTAKEEEKITKYSPLAQQIRKLHSVCTSVVPIVVGSLGVVTKRLERSLKELGIPDVLGGLQKSTIIGTTNILRKVLNL

SEQ ID NO: 18852 - protein, 1174 aa, Morbakka virulenta
MSFLKKKPTEGKPGSRRVSDDPQERVLIRTGEVSRPEASENVESSKDGSRTEEPMGRKGWKGEKRGKMGRTGLFKSKWSHFERKVLWECFVRSGGRRADGYIGKVKEMWDGRDVSVRSVASLLSQLKQIEANGWLSVVERGEIERMVREEALVEEESSEGEVDFCIRPESGLGEMEIENVVVANDAEERDLRVVIERVDVWRRGDDMRALSNDESGALALLREVYHSEDVVEVPSLKAQDGRKIGEEVKLVDGLMHNLVRDSMTVTEINRLLYAGSYVVASRLGVMGKNKTVRKKKPWWQRRLEKSIGEWRKDLGRIEEIKQGNKVRQVVRDRLNRKYELVVKGTMTVSTMLKNKISSASAKIRQFVGKSLARRQNNLFKNNQCQLYKELNGNGHKMESSAPNADEAREFWSIIWSEEKEHDKEASWLGDVREKFADVEKQEDIMVALQDVKAGIRKMANWKAPGPDWVRGYWFKKFTSLHLSIATTLQECLTSGVVPDWMVKGRTVLIQKDSGKGTAASNYRPIACLPLMWKLLSGIFAEKIYGHLVNNNLLPEEQKGCRKKSRGTKDQLMIDKAILHEVRAMKRNLSMCWIDYKKAYDMVPHSWILEMLDMVGVAENVRSLLKGSMAEWKTVLTANNEVLGEVNINRGIFQGDSLSPLIFVIAMIPLSILLNREKLGYFFGHGRVLVNHLLFMDDLKLFGRSKRELEALVEVVRVYSRDIGMEFGLDKCAVLEIRRGERAECEGIELPSGELMKEVDEDGYKYLGVLEGAKVMQKKMKEKIGNEYLRRVKLLAKSRLYAGNLVRGINAWAVSVVRYSSGILDWSDAELRKLDTKTRKILTMNGAFHRNSSVDRLYIGRKDGGRGLISVEDCVRQEELGLEEYVHATEETILEQVAGMIMHGRETKKHYKTRVVEERKERLMEKALHGRFFREMDENATERSVQWVKGGFLAKSTEAFVFAAQEQALRTRLAQSKWDGGVSPMCRICGIESESVWHVACGCKVLAQKEYKRRHDRMGLRIYWELCKKYGLKCAGKWFEEVPDKVRKSEDGRFEVWWDRSVETMQQVESNRPDVVVVDRTKKRWLVVDFAVPSDRNVTAKEEEKVTKYSPLAQQIRKLHSVCTSVVPIVVGSLGVVTKRLERSLKELGIPDVLGGLQTSTIIGTTNILRKVLNL

SEQ ID NO: 18853 - protein, 1174 aa, Morbakka virulenta
MSFLKKKPTEGKPGSRRVSDDPQERVLIRTGEVSRPEASENVESSKDGSRTEEPMGRKGWKGEKRGKMGRTGLFKSKWSHFERKVLWECFVRSGGRRADGYIGKVKEMWDGRDVSVRSVASLLSQLKQIEANGLLSVVERGEIERMVREEALVEEESSEGEVDFCIRPESGLGEMEIENVVVANDAEERDLRVVIERVDVWRRGDDMRALSNDESGALALLREVYHSEDVVEVPSLKAQDGRKIGEEVKLVDGLMHNLVRDSMTVTEINRLLYAGSYVVASRLGVMGKNKTVRKKKPWWQRRLEKSIGEWRKDLGRIEEIKQGNKVRQVVRDRLNRKYELVVKGTMTVSTMLKNKISSASAKIRQFVGKSLARRQNNLFKNNQCQLYKELNGNGHKMESSAPNADEAREFWSIIWSEEKEHDKEASWLGDVREKFADVEKQEDIMVALQDVKAGIRKMANWKAPGPDWVRGYWFKKFTSLHLSIATTLQECLTSGVVPDWMVKGRTVLIQKDSGKGTAASNYRPIACLPLMWKLLSGIFAEKIYGHLVNNNLLPEEQKGCRKKSRGTKDQLMIDKAILHEVRAMKRNLSMCWIDYKKAYDMVPHSWILEMLDMVGVAENVRSLLKGSMAEWKTVLTANNEVLGEVNINRGIFQGDSLSPLIFVIAMIPLSILLNREKLGYFFGHGRVLVNHLLFMDDLKLFGRSKRELEALVEVVRVYSRDIGMEFGLDKCAVLEIRRGERAECEGIELPSGELMKEVDEDGYKYLGVLEGAKVMQKKMKEKIGNEYLRRVKLLAKSRLYAGNLVRGINAWAVSVVRYSSGILDWSDAELRKLDTKTRKILTMNGAFHRNSSVDRLYIGRKDGGRGLISVEDCVRQEELGLEEYVHATEETILEQVAGMIMHGRETKKHYKTRVVEERKERLMEKAMHGRFFREMDENATERSVQWVKGGFLAKSTEAFVFAAQEQALRTRLAQSKWDGGVSPMCRICGIESESVWHVACGCKVLAQKEYKRRHDRMGLRIYWELCKKYGLKCAGKWFEEVPDKVRKSEDGRFEVWWDRSVETMQQVESNRPDVVVVDRTKKRWLVVDFAVPSDRNVTAKEEEKITKYSPLAQQIRKLHSVCTSVVPIVVGSLGVVTKRLERSLKELGIPDVLGGLQTSTIIGTANILRKVLNL

SEQ ID NO: 18854 - protein, 912 aa, Morbakka virulenta
MTVTEINRLLYAGSYVVASRLGVIGKNKTVRKKKPWWQRRLEKSIGEWRKDLGRIEEIKQGNKVRQVVRDRLNRKYELVVKGTMTVSTMLKNKISSASAKIRQFVGKSLARRQNNLFKNNQCQLYKELNGNGHKMESSAPNADEAREFWSIIWSEEKEHDKEASWLGDVREKFADVEKQEDIMVALQDVKAGIRKMANWKAPGPDWVRGYWFKKFTSLHLSIATTLQECLTSGVVPDWMVKGRTVLIQKDSGKGTAASNYRPIACLPLMWKLLSGIFAEKIYGHLVNNNLLPEEQKGCRKKSRGTKDQLMIDKAILHEVRAMKRNLSMCWIDYKKAYDMVPHSWILEMLDMVGVAENVRSLLKGSMAEWKTVLTANNEVLGEVNINRGIFQGDSLSPLIFVIAMIPLSILLNREKLGYFFGHGRVLVNHLLFMDDLKLFGRSKRELEALVEVVRVYSRDIGMEFGLDKCAVLEIRRGERAECEGIELPSGELMKEVDEDGYKYLGVLEGAKVMQKKMKEKIGNEYLRRVKLLAKSRLYAGNLVRGINAWAVSVVRYSSGILDWSDAELRKLDTKTRKILTMNGAFHRNSSVDRLYIGRKDGGRGLISVEDCVRQEELGLEEYVHATEETILEQVAGMIMHGRETKKHYKTRVVEERKERLMEKAMHGRFFREMDENATERSVQWVKGGFLAKSTEAFVFAAQEQALRTRLAQSKWDGGVSPMCRICGIESESVWHVACGCKVLAQKEYKRRHDRMGLRIYWELCKKYGLKCAGKWFEEVPDKVRKSEDGRFEVWWDRSVETMQQVECNRPDVVVVDRTKKRWLVVDFAVPSDRNVTAKEEEKVTKYSPLAQQIRKLHSVCTSVVPIVVGSLGVVTKRLERSLKELGIPDVLGGLQTSTIIGTTNILRKVLNL

SEQ ID NO: 18855 - protein, 1162 aa, Morbakka virulenta
MSFLKKKPTEGKPGSRRVSDDPQERVLIRTGEVSRPEASENVESSKDGSRTEEPMGRKGWKGEKRGKMGRTGLFKSKWSHFERKVLWECFVRSGGRRADGYIGKVKEMWDGRDVSVRSVASLLSQLKQIEANGLLSVVERGEIERMVREEALVEEESSEGEVDFCIRPESGLGEMEIENVVVANDAEERDLRVVIERVDVWRRGDDMRALSNDESGALALLREVYHSEDVVEVPSLKAQDGRKIGEEVKLVDGLMHNLVRDSMTVTEINRLLYAGSYVVASRLGVMGKNKTVRKKKPWWQRRLEKSIGEWRKDLGRIEEIKQGNKVRQVVRDRLNRKYELVVKGTMTVSTMLKNKISSASAKIRQFVGKSLARRQNNLFKNNQCQLYKELNGNGHKMESSAPNADEAREFWSIIWSEEKEHDKEASWLGDVREKFADVEKQEDIMVALQDVKAGIRKMANWKAPGPDWVRGYWFKKFTSLHLSIATTLQECLTSGVVPDWMVKGRTVLIQKDSGKGTAASNYRPIACLPLMWKLLSGIFAEKIYGHLVNNNLLPEEQKGCRKKSRGTKDQLMIDKAILHEVRAMKRNLSMCWIDYKKAYDMVPHSWILEMLDMVGVAENVRSLLKGSMAEWKTVLTANNEVLGEVNINRGIFQGDSLSPLIFVIAMIPLSILLNREKLGYFFGHGRVLVNHLLFMDDLKLFGRSKRELEALVEVVRVYSRDIGMEFGLDKCAVLEIRRGERAECEGIELPSGELMKEVDEDGYKYLEVLEGAKVMQKKMKEKIGNEYLRRVKLLAKSRLYAGNLVRGINAWAVSVVRYSSGILDWSDAELRKLDTKTRKILTMNGAFHRNSSVDCLYIGRKDGGRGLISVEDCVRQEELGLEEYVHATEETILEQVAGMIMHGRETKKHYKTRVVEERKERLMEKALHGRFFREMDENATERSVQWVKGGFLAKSTEAFVFAAQEQALRTRLAQSKWDGGVSPMCRICGIESESVWHVACGCKVLAQKEYKRRHDRMGLRIYWELCKKYGLKCAGKWFEEVPDKVRKSEDGRFEVWWDRSVETMQQVESNRPDVVVVDRTKKRWLVVDFAVPSDRNVTAKEEEKVTKYSPLAQQIRKLHSVCTSVVPIVVGSLGVVTSGPHKTSLMSWVDFKHLPSLELPTY

SEQ ID NO: 18856 - protein, 1174 aa, Morbakka virulenta
MSFLKKKPTEGKPGSRRVSDDPQERVLIRTGEVSRPEASENVESSKDGSRTEEPMGRKGWKGEKRGKMGRTGLFKSKWSHFERKVLWECFVRSGGRRADGYIGKVKEMWDGRDVSVRSVASLLSQLKQIEANGLLSVVERGEIERMVREEALVEEESSEGEVDFCIRPESGLGEMEIENVVVANDAEERDLRVVIERVDVWRRGDDMRALSNDESGALALLREVYHSEDVVEVPSLKAQDGRKIGEEVKLVDGLMHNLVRDSMTVTEINRLLYAGSYVVASRLGVMGKNKTVRKKKPWWQRRLEKSIGEWRKDLGRIEEIKQGNKVRQVVRDRLNRKYELVVKGTMTVSTMLKNKISSASAKIRQFVGKSLARRQNNLFKNNQCQLYKELNGNGHKMESSAPNADEAREFWSIIWSEEKEHDKEASWLGDVREKFADVEKQEDIMVSLQDVKAGIRKMANWKAPGPDWVRGYWFKKFTSLHLSIATTLQECLTSGVVPDWMVKGRTVLIQKDSGKGTAASNYRPIACLPLMWKLLSGIFAEKIYGHLVNNNLLPEEQKGCRKKSRGTKDQLMIDKAILHEVRAMKRNLSMCWIDYKKAYDMVPHSWILEMLDMVGVAENVRSLLKGSMAEWKTVLTANNEVLGEVNINRGIFQGDSLSPLIFVIAMIPLSILLNREKLGYFFGHGRVLVNHLLFMDDLKLFGRSKRELEALVEVVRVYSRDIGMEFGLDKCAVLEIKRGERAECEGIELPSGELMKEVDEDGYKYLGVLEGAKVMQKKMKEKIGNEYLRRVKLLAKSRLYAGNLVRGINAWAVSVVRYSSGILDWSDAELRKLDTKTRKILTMNGAFHRNSSVDRLYIGRKDGGRGLISVEDCVRQEELGLEEYVHATEETILEQVPGMIMHGRETKKHYKTRVVEERKERLMEKALHGRFFREMDENATERSVQWVKGGFLAKSTEAFVFAAQEQALRTRLAQSKWDGGVSPMCRICGIESESVWHVACGCKVLAQKEYKRRHDRMGLRIYWELCKKYGLKCAGKWFEEVPDKVRKSEDGRFEVWWDRSVETMQQVESNRPDVVVVDRTKKRWLVVDFAVPSDRNVTAKEEEKITKYSPLAQQIRKLHSVCTSVVPIVVGSLGVVTKRLERSLKELGIPDVLGGLQTSTIIGTTNILRKVLNL

SEQ ID NO: 18857 - protein, 1174 aa, Morbakka virulenta
MSFLKKKPTEGKPGSRRVSDDPQERVLIRTGEVSRPEASENVESSKDGSRTEEPMGRKGWKGEKRGKMGRTGLFKSKWSHFERKVLWECFVRSGGRRADGYIGKVKEMWDGRDVSVRSVASLLSQLKQIEANGLLSVVERGEIERMVREEALVEEESSEGEVDFCIRPESGLGEMEIENVVVANDAEERDLRVVIERVDVWRRGDDMRALSNDESGALALLREVYHSEDVVEVPSLKAQDGRKIGEEVKLVDGLMHNLVRDSMTVTEINRLLYAGSYVVASRLGVMGKNKTVRKKKPWWQRRLEKSIGEWRKDLGRIEEIKQGNKVRQVVRDRLNRKYELVVKGTMTVSTMLKNKISSASAKIRQFVGKSLARRQNNLFKNNQCQLYKELNGNGHKMESSAPNADEAREFWSIIWSEEKEHDKEASWLGDVREKFADVEKQEDIMVALQDVKAGIRKMANWKAPGPDWVRGYWFKKFTSLHLSIATTLQECLTSGVVPDWMVKGRTVLIQKDSGKGTAASNYRPIACLPLMWKLLSGIFAEKIYGHLVNNNLLPEEQKGCRKKSRGTKDQLMIDKAILHEVRAMKRNLSMCWIDYKKAYDMVPHSWILEMLDMVGVAENVRSLLKGSMAEWKTVLTANNEVLGEVNINRGIFQGDSLSPLIFVIAMIPLSILLNREKLGYFFGHGRVLVNHLLFMDDLKLFGRSKRELEALVEVVRVYSRDIGMEFGLDKCAVLEIRRGERAECEGIELPSGELMKEVDEDGYKYLGVLEGAKVMQKKMKEKIGNEYLRRVKLLAKSRLYAGNLVRGINAWAVSVVRYSSGILDWSDAELRKLDTKTRKILTMNGAFHRNSSVDRLYIGRKDGGRGLISVEDCVRQEELGLEEYVHATEEKILEQVPGMIMHGRETKKHYKTRVVEERKERLMEKAMHGRFFREMDENATERSVQWVKGGFLAKSTEAFVFAAQEQALRTRLAQSKWDGGVSPMCRICGIESESVWHVACGCKVLAQKEYKRRHDRMGLRIYWELCKKYGLKCAGKWFEEVPDKVRKSEDGRFEVWWDRSVETMQQVESNRPDVVVVDRTKKRWLVVDFAVPSDRNVTAKEEEKVTKYSPLAQQIRKLHSVCTSVVPIVVGSLGVVTKRLERSLKELGIPDVLGGLQTSTIIGTTNILRKVLNL

SEQ ID NO: 18858 - protein, 1174 aa, Morbakka virulenta
MSFLKKKPTEGKPGSRRVSDDPQERVLIRTGEVSRPEASENVESSKDGSRTEEPMCRKGWKGEKRGKMGRTGLFKSKWSHFERKVLWECFVRSGGRRADGYIGKVKEMWDGRDVSVRSVASLLSQLKQIEANGLLSVVERGEIERMVREEALVEEESSEGEVDFCIRPESGLGEMEIENVVVANDAEERDLRVVIERVDVWRRGDDMRALSNDESGALALLREVYHSEDVVEVPSLKAQDGRKIGEEVKLVDGLMHNLVRDSMTVTEINRLLYAGSYVVASRLGVMGKNKTVRKKKPWWQRRLEKSIGEWRKDLGRIEEIKQGNKVRQVVRDRLNRKYELVVKGTMTVSTMLKNKISSASAKIRQFVGKSLARRQNNLFKNNQCQLYKELNGNGHKMESSAPNADEAREFWSIIWSEEKEHDKEASWLGDVREKFADVEKQEDIMVALQDVKAGIRKMANWKAPGPDWVRGYWFKKFTSLHLSIATTLQECLTSGVVPDWMVKGRTVLIQKDSGKGTAASNYRPIACLPLMWKLLSGIFAEKIYGHLVNNNLLPEEQKGCRKKSRGTKDQLMIDKAILHEVRAMKRNLSMCWIDYKKAYDMVPHSWILEMLDMVGVAENVRSLLKGSMAEWKTVLTANNEVLGEVNINRGIFQGDSLSPLIFVIAMIPLSILLNREKLGYFFGHGRVLVNHLLFMDDLKLFGRSKRELEALVEVVRVYSRDIGMEFGLDKCAVLEIRRGERAECEGIELPSGELMKEVDEDGYKYLGVLEGAKVMQKKMKEKIGNEYLRRVKLLAKSRLYAGNLVRGINAWAVSVVRYSSGILDWSDAELRKLDTKTRKILTMNGAFHRNSSVGRLYIGRKDGGRGLISVEDCVRQEELGLEEYVHATEETILEQVAGMIMHGRETKKHYKTRVVEERKERLMEKAMHGRFFREMDENATERSVQWVKGGFLAKSTEAFVFAAQEQASRTRLAQSKWDGGVSPMCRICGIESESVWHVACGCKVLAQKEYKRRHDRMGLRIYWELCKKYGLKCAGKWFEEVPDKVRKSEDGRFEVWWDRSVETMQQVECNRPDVVVVDRTKKRWLVVDFAVPSDRNVTAKEEEKVTKYSPLAQQIRKLHSVCTSVVPIVVGSLGVVTKRLERSLKELGIPDVLGGLQTSTIIGTTNILRKVLNL

SEQ ID NO: 18859 - protein, 1174 aa, Morbakka virulenta
MSFLKKKPTEGKPGSRRVSDDPQERVLIRTGEVSRPEASENVESSKDGSRTEEPMGRKGWKGEKRGKMGRTGLFKSKWSHFERKVLWECFVRSGGRRADGYIGKVKEMWDGRDVSVRSVASLLSQLKQIEANGLLSVVERGEIERMVREEALVEEESSEGEVDFCIRPESGLGEMEIENVVVANDAEERDLRVVIERVDVWRRGDDMRALSNDESGALALLREVYHSEDVVEVPSLKAQDGRKIGEEVKLVDGLMHNLVRDSMTVTEINRLLYAGSYVVASRLGVMGKNKTVRKKKPWWQRRLEKSIGEWRKDLGRIEEIKQGNKVRQVVRDRLNRKYELVVKGTMTVSTMLKNKISSASAKIRQFVGKSLARRQNNLFKNNQCQLYKELNGNGHKMESSAPNADEAREFWSIIWSEEKEHDKEASWLGDVREKFADVEKQEDIMVALQDVKAGIRKMANWKAPGPDWVRGYWFKKFTSLHLSIATTLQECLTSGVVPDWMVKGRTVLIQKDSGKGTAASNYRPIACLPLMWKLLSGIFAEKIYGHLVNNNLLPEEQKGCRKKSRGTKDQLMIDKAILHEVRTMKRNLSMCWIDYKKAYDMVPHSWILEMLDMVGVAENVRSLLKGSMAEWKTVLTANNEVLGEVNINRGIFQGDSLSPLIFVIAMIPLSILLNREKLGYFFGHGRVLVNHLLFMDDLKLFGRSKRELEALVEVVRVYSRDIGMEFGLDKCAVLEIRRGERAECEGIELPSGELMKEVDEDGYKYLGVLEGAKVMQKKMKEKIGNEYLRRVKLLAKSRLYAGNLVRGINAWAVSVVRYSSGILDWSDAELRKLDTKTRKILTMNGAFHRNSSVDRLYIGRKDGGRGLISVEDCVRQEELGLEEYVHATEETILEQVAGMIMHGRETKKHYKTRVVEERKERLMEKAMHGRFFREMDENATERSVQWVKGGFLAKSTEAFVFAAQEQALRTRLAQSKWDGGVSPMCRICGIESESVWHVACGCKVLAQKEYKRRHDRMGLRIYWELCKKYGLKCAGKWFEEVPDKVRKSEDGRFEVWWDRSVETMQQVESNRPDVVVVDRTKKRWLVVDFAVPSDRNVTAKEEEKITKYSPLAQQIRKLHSVCTSVVPIVVGSLGVVTKRLERSLKELGIPDVLGGLQTSTIIGTTSILRKVLNL

SEQ ID NO: 18860 - protein, 1145 aa, Morbakka virulenta
MSFLKKKPTEGKPGSRRVSDDPQERVLIRTGEVSRPEASENVESSKDGSRTEEPMGRKGWKGEKRGKMGRTGLFKSKWSHFERKVLWECFVRSGGRRADGYIGKVKEMWDGRDVSVRSVASLLSQLKQIEANGLLSVVERGEIERMVREEALVEEESSEGEVDFCIRPGSGLGEMEIENVVVANDAEERDLRVVIERVDVWRRGDDMRALSNDESGALALLREVYHSEDVVEVPSLKAQDGRKIGEEVKLVDGLMHNLVRDSMTVTEINRLLYAGSYVVASRLGVMGKNKTVRKKKPWWQRRLEKSIGEWRKDLGRIEEIKQGNKVRQVVRDRLNRKYELVVKGTMTVSTMLKNKISSASAKIRQFVGKSLARRQNNLFKNNQCQLYKELNGNGHKMESSAPNADEAREFWSIIWSEEKEHDKEASWLGDVREKFADVEKQEDIMVALQDVKAGIRKMANWKAPGPDWVRGYWFKKFTSLHLSIATTLQECLTSGVVPDWMVKGRTVLIQKDSGKGTAASNYRPIACLPLMWKLLSGIFAEKIYGHLVNNNLLPEEQKGCRKKSRGTKDQLMIDKAILHEVRAMKRNLSMCWIDYKKAYDMVPHSWILEMLDMVGVAENVRSLLKGSMAEWKTVLTANNEVLGEVNINRGIFQGDSLSPLIFVIAMIPLSILLNREKLGYFFGHGRVLVNHLLFMDDLKLFGRSKRELEALVEVVRVYSRDIGMEFGLDKCAVLEIRRGERAECEGIELPSGELMKEVDEDGYKYLGVLEGAKVMQKKMKEKIGNEYLRRVKLLAKSRLYAGNLVRGINAWAVSVVRYSSGILDWSDAELRKLDTKTRKILTMNGAFHRNSSVDRLYIGRKDGGRGLISVEDCVRQEELGLEEYVHATEETILEQVAGMIMHGRETKKHYKTRVVEERKERLMEKAMHGRFFREMDENATERSVQWVKGGFLAKSTEAFVFAAQEQALRTRLAQSKWDGGVSPMCRICGIESESVWHVACGCKVLAQKEYKRRHDRMGLRIYWELCKKYGLKCAGKWFEEVPDKVRKSEDGRFEVWWDRSVETMQQVESNRPDVVVVDRTKKRWLVVDFAVPSDRNVTAKEEEKVTKYSPLAQQIRKLHSVCTSVVPIVVGSLGVVTKRLERSFK

SEQ ID NO: 18861 - protein, 1174 aa, Morbakka virulenta
MSFLKKKPTEGKPGSRRVSDDPQERVLIRTGEVSRPEASENVESSKDGSRTEEPMGRKGWKGEKRGKMGRTGLFKSKWSHFERKVLWECFVRSGGRRADGYIGKVKEMWDGRDVSVRSVASLLSQLKQIEANGLLSVVERGEIERMVREEALVEEESSEGEVDFCIRPESGLGEMEIENVVVANDAEERDLRVVIERVDVWRRGDDMRALSNDESGALALLREVYHSEDVVEVPSLKAQDGRKIGEEVKLVDGLMHNLVRDSMTVTEINRLLYAGSYVVASRLGVMGKNKTVRKKKPWWQRRLEKSIGEWRKDLGRIEEIKQGNKVRQVVRDRLNRKYELVVKGTMTVSTMLKNKISSASAKIRQFVGKSLARRQNNLFKNNQCQLYKELNGNGHKMESSAPNADEAREFWSIIWSEEKEHDKEASWLGDVREKFADVEKQEDIMVSLQDVKAGIRKMANWKAPGPDWVRGYWFKKFTSLHLSIATTLQECLTSGVVPDWMVKGRTVLIQKDSGKGTAASNYRPIACLPLMWKLLSGIFAEKIYGHLVNNNLLPEEQKGCRKKSRGTKDQLMIDKAILHEVRAMKRNLSMCWIDYKKAYDMVPHSWILEMLDMVGVAENVRSLLKGSMAEWKTVLTANNEVLGEVNINRGIFQGDSLSPLIFVIAMIPLSILLNREKLGYFFGHGRVLVNHLLFMDDLKLFGRSKRELEALVEVVRVYSRDIGMEFGLDKCAVLEIRRGERAECEGIELPSGELMKEVDEDGYKYLGVLEGAKVMQKKMKEKIGNEYLRRVKLLAKSRLYAGNLVRGINAWAVSVVRYSSGILDWSDAELRKLDTKTRKILTMNGAFHRNSSVGRLYIGRKDGGRGLISVEDCVRQEELGLEEYVHATEETILEQVAGMIMHGRETKKHYKTRVVEERKERLMEKAMHGRFFREMDENATERSVQWVKGGFLAKSTEAFVFAAQEQALRTRLAQSKWDGSVSPMCRICGIESESVWHVACGCKVLAQKEYKRRHDRMGLRIYWELCKKYGLKCAGKWFEEVPDKVRKSEDGRFEVWWDRSVETMQQVESNRPDVVVVDRTKKRWLVVDFAVPSDRNVTAKEEEKITKYSPLAQQIRKLHSVCTSVVPIVVGSLGVVTKRLERSLKELGIPDVLGGLQTSTLIGTTNILRKVLNL

SEQ ID NO: 18862 - protein, 968 aa, Morbakka virulenta
MRALSNDESGALALLREVYHSEDVVEVPSLKAQDGRKIGEEVKLVDGLMHNLVRDSMTVTEINRLLYAGSYVVASRLGVMGKNKTVRKKKPWWQRRLEKSIGEWRKDLGRIEEIKQGNKVRQVVRDRLNRKYELVVKGTMTVSTMLKNKISSASAKIRQFVGKSLARRQNNLFKNNQCQLYKELNGNGHKMESSAPNADEAREFWSIIWSEEKEHDKEASWLGDVREKFADVEKQEDIMVALQDVKAGIRKMANWKAPGPDWVRGYWFKKFTSLHLSIATTLQECLTSGVVPDWMVKGRTVLIQKDSGKGTAASNYRPIACLPLMWKLLSGIFAEKIYGHLVNNNLLPEEQKGCRKKSRGTKDQLMIDKAILHEVRAMKRNLSMCWIDYKKAYDMVPHSWILEMLDMVGVAENVRSLLKGSMAEWKTVLTANNEVLGEVNINRGIFQGDSLSPLIFVIAMIPLSILLNREKLGYFFGHGRVLVNHLLFMDDLKLFGRSKRELEALVEVVRVYSRDIGMEFGLDKCAVLEIRRGERAECEGIELPSGELMKEVDEDGYKYLGVLEGAKVMQKKMKEKIGNEYLRRVKLLAKSRLYAGNLVRGINAWAVSVVRYSSGILDWSDAELRKLDTKTRKILTMNGAFHRNSSVDRLYIGRKDGGRGLISVEDCVRQEELGLEEYVHATEETILEQVAGMIMHGRETKKHYKTRVVEERKERLMEKAMHGRFFREMDENATERSVQWVKGGFLAKSTEAFVFAAQEQALRTRLAQSKWDGGVSPMCRICGIESESVWHVACGCKVLAQKEYKRRHDRMGLRIYWELCKKYGLKCAGKWFEEVPDKVRKSEDGRFEVWWDRSVETMQQVESNRPDVVVVDRTKKRWLVVDFAVPSDRNVTAKEEEKVTKYSPLAQQIRKLHSVCTSVVPIVVGSLGVVTKRLERSLKELGIPDVLGGLQTSTIIGTTNILRKVLNL

SEQ ID NO: 18863 - protein, 1174 aa, Morbakka virulenta
MSILKKKPTEGKPGSRRVSDDPQERVLIRTGEVSRPEASENVESSKDGSGTEEPMGRKGWKGEKRGKMGRTGLFKSIWSHFERKVLWECFVRSGGRRADGYIGKVKEMWDGRDVSVRSVASLLSQLKQIEANGLLSVVERGEIERMVREEALVEEESSEGEVDFCIRPESGLGEMEIENVVVANDAEERDLRVVIERVDVWRRGDDMRALSNDESGALALLREVYHSEDVVEVPSLKAQDGRKIGEEVKLVDGLMHNLVRDSMTVTEINRLLYAGSYVVASRLGVMGKNKTVRKKKPWWQRRLEKSIGEWRKDLGRIEEIKQGNKVRQVVRDRLNRKYELVVKGTMTVSTMLKNKISSASAKIRQFVGKSLARRQNNLFKNNQCQLYKELNGNGHKMESSAPNADEAREFWSIIWSEEKEHDKEASWLGDVREKFADVEKQEDIMVALQDVKAGIRKMANWKAPGPDWVRGYWFKKFTSLHLSIATTLQECLTSGVVPDWMVKGRTVLIQKDSGKGTAASNYRPIACLPLMWKLLSGIFAEKIYGHLVNNNLLPEEQKGCRKKSRGTKDQLMIDKAILHEVRAMKRNLSMCWIDYKKAYDMVPHSWILEMLDMVGVAENVRSLLKGSMAEWKTVLTANNEVLGEVNINRGIFQGDSLSPLIFVIAMIPLSILLNREKLGYFFGHGRVLVNHLLFMDDLKLFGRSKRELEALVEVVRVYSRDIGMEFGLDKCAVLEIRRGERAECEGIELPSGELMKEVDEDGYKYLGVLEGAKVMQKKMKEKIGNEYLRRVKLLAKSRLYAGNLVRGINAWAVSVVRYSSGILDWSDAELRKLDTKTRKILTMNGAFHRNSSVDRLYIGRKDGGRGLISVEDCVRQEELGLEEYVHATEETILEQVAGMIMHGRETKKHYKTRVVEERKERLMEKAMHGRFFREMDENATERSVQWVKGGFLAKSTEAFVFAAQEQALRTRLAQSKWDGGVSPMCRICGIESESVWHVACGCKVLAQKEYKRRHDRMGLRIYWELCKKYGLKCAGKWFEEVPDKVRKSEDGRFEVWWDRSVETMQQVESNRPDVVVVDRTKKRWLVVDFAVPSDRNVTAKEEEKITKYSPLAQQIRKLHSVCTSVVPIVVGGLGVVTKRLERSLKELGIPDVLGGLQTSTIIGTTNILRKVLNL

SEQ ID NO: 18864 - protein, 1174 aa, Morbakka virulenta
MSLLKNKPTEGKPGSRRVSDDPQERVLIRTGEVSRPEASKNVESSKDGSRTEEPMGRKGWKGEKRGKMGRTGLFKSKWSHFERKVLWECFVRSGGRRADGYIGKVKEMWDGRDVSVRSVASLLSQLKQIEANGLLSVVERGEIERMVREEALVEEESSEGEVDFCIRPESGLGEMEIENVVVANDAEERDLRVVIERVDVWRRGDDMRALSNDESGALALLREVYHSEDVVEVPSLKAQDGRKIGEEVKLVDGLMHNLVRDSMTVTEINRLLYAGSYVVASRLGVMGKNKTVRKKKPWWQRRLEKSIGEWRKDLGRIEEIKQGNKVRQVVRDRLNRKYELVVKGTMTVSTMLKNKISSASAKIRQFVGKSLARRQNNLFKNNQCQLYKELNGNGHKMESSAPNADEAREFWSIIWSEEKEHDKEASWLGDVREKFADVEKQEDIMVALQDVKAGIRKMANWKAPGPDWVRGYWFKKFTSLHLSIATTLQECLTSGVVPDWMVKGRTVLIQKDSGKGTAASNYRPIACLPLMWKLLSGIFAEKIYGHLVNNNLLPEEQKGCRKKSRGTKDQLMIDKAILHEVRAMKRNLSMCWIDYKKAYDMVPHSWILEMLDMVGVAENVRSLLKGSMAEWKTVLTANNEVLGEVNINRGIFQGDSLSPLIFVIAMIPLSILLNREKLGYFFGHGRVLVNHLLFMDDLKLFGRSKRELEALVEVVRVYSRDIGMEFGLDKCAVLEIRRGERAECEGIELPSGELMKEVDEDGYKYLGVLEGAKVMQKKMKEKIGNEYLRRVKLLAKSRLYAGNLVRGINAWAVSVVRYSSGILDWSDAELRKLDTKTRKILTMNGAFHRNSSVDRLYIGRKDGGRGLISVEDCVRQEELGLEEYVHATEETILEQVAGMIMHGRETKKHYKTRVVEERKERLMEKAMHGRFFREMDENATERSVQWVKGGFLAKSTEAFVFAAQEQALRTRLAQSKWDGGVSPMCRICGIESESVWHVACGCKVLAQKEYKRRHDRMGLRIYWELCKKYGLKCAGKWFEEVPDKVRKSEDGRFEVWWDRSVETMQQVECNRPDVVVVDCTKKRWLVVDFAVPSDRNVTAKEEEKVTKYSPLAQQIRKLHSVCTSVVSIVVGSLGVVTKCLERSLKELGIPDVLGGLQTSTIIGTTNILRKVLNL

SEQ ID NO: 18865 - protein, 1174 aa, Morbakka virulenta
MSFLKKKPTEGKPGSRRVSDDPQERVLIRTGEVSRPEASENVESSKDGSRTEEPMGRKGWKGEKRGKMGRTGLFKSKWSHFERKVLWECFVRSGGRRADGYIGKVKEMWDGRDVSVRSVASLLSQLKQIEANGLLSVVERGEIERMVREEALVEEESSEGEVDFCIRPESGLGEMEIENVVVANDAEERDLRVVIERVDVWRRSDDMRALSNDESGALALLREVYHSEDVVEVPSLKAQDGRKIGEEVKLVDGLMHNLVRDSMTVTEINRLLYAGSYVVASRLGVMGKNKTVRKKKPWWQRRLEKSIGEWRKDLGRIEEIKQGNKVRQVVRDRLNRKYELVVKGTMTVSTMLKNKISSASAKIRQFVGKSLARRQNNLFKNNQCQLYKELNGNGHKMESSAPNADEAREFWSIIWSEEKEHDKEASWLGDVREKFADVEKQEDIMVALQDVKAGIRKMANWKAPGPDWVRGYWFKKFTSLHLSIATTLQECLTSGVVPDWMVKGRTVLIQKDSGKGTAASNYRPIACLPLMWKLLSGIFAEKIYGHLVNNNLLPEEQKGCRKKSRGTKDQLMIDKAILHEVRAMKRNLSMCWIDYKKAYDMVPHSWILEMLDMVGVAENVRSLLKGSMAEWKTVLTANNEVLGEVNINRGIFQGDSLSPLIFVIAMIPLSILLNREKLGYFFGHGRVLVNHLLFMDDLKLFGRSKRELEALVEVVRVYSRDIGMEFGLDKCAVLEIRRGERAECEGIELPSGELMKEVDEDGYKYLGVLEGAKVMQKKMKKKIGNEYLRRVKLLAKSRLYAGNLVRGINAWAVSVVRYSSGILDWSDAELRKLDTKTRKILTMNGAFHRNSSVDRLYIGRKDGGRGLISVEDCVRQEELGLEEYVHATEETILEQVAGMIMHGRETKKHYKTRVVEERKERLMEKAMHGRFFREMDENATERSVQWVKGDFLAKSTEAFVFAAQEQALRTRLAQSKWDGSVSPMCRICGIESESVWHVACGCKVLAQKEYKRRHDRMGLRIYWELCKKYGLKCAGKWFEEVPDKVRKSEDGRFEVWWDRSVETMQQVESNRPDVVVVDRTKKRWLVVDFAVPSDRNVTAKEEEKITKYSPLAQQIRKLHSVCTSVVPIVVGSLGVVTKRLERSLKELGIPDVLGGLQTSTIIGTTNILRKVLNL

SEQ ID NO: 18866 - protein, 1029 aa, Morbakka virulenta
MVREEALVEEESSEGEVDFCIRPESGLGEMEIENVVVANDAEERDLRVVIERVDVWRRGDDMRALSNDESGALALLREVYHSEDVVEVPSLKAQDGRKIGEEVKLVDGLMHNLVRDSMTVTEINRLLYAGSYVVASRLGVMGKNKTVRKKKPWWQRRLEKSIGEWRKDLGRIEEIKQGNKVRQVVRDRLNRKYELVVKGTMTVSTMLKNKISSASAKIRQFVGKSLARRQNNLFKNNQCQLYKELNGNGHKMESSAPNADEAREFWSIIWSEEKEHDKEASWLGDVREKFADVEKQEDIMVSLQDVKAGIRKMANWKAPGPDWVRGYWFKKFTSLHLSIATTLQECLTSGVVPDWMVKGRTVLIQKDSGKGTAASNYRPIACLPLMWKLLSGIFAEKIYGHLVNNNLLPEEQKGCRKKSRGTKDQLMIDKAILHEVRAMKRNLSMCWIDYKKAYDMVPHSWILEMLDMVGVAENVRSLLKGSMAEWKTVLTANNEVLGEVNINRGIFQGDSLSPLIFVIAMIPLSILLNREKLGYFFGHGRVLVNHLLFMDDLKLFGRSKRELEALVEVVRVYSRDIGMEFGLDKCAVLEIRRGERAECEGIELPSGELMKEVDEDGYKYLGVLEGAKVMQKKMKEKIGNEYLRRVKLLAKSRLYAGNLVRGINAWAVSVVRYSSGILDWSDAELRKLDTKTRKILTMNGAFHRNSSVDRLYIGRKDGGRGLISVEDCVRQEELGLEEYVHATEETILEQVAGMIMHGRETKKHYKTRVVEERKERLMEKAMHGRFFREMDENATERSVQWVKGGFLAKSTEAFVFAAQEQALRTRLAQSKWDGGVSPMCRICGIESESVWHVACGCKVLAQKEYKRRHDRMGLRIYWELCKKYGLKCAGKWFEEVPDKVRKSEDGRFEVWWDRSVETMQQVESNRPDVVVVDRTKKRWLVVDFAVPSDRNVTAKEEEKITKYSPLAQQIRKLHSVCTSVVPIVVGSLGVVTKRLERSLKELGIPDVLGGLQTSTSIGTTNILRKVLNL

SEQ ID NO: 18867 - protein, 1120 aa, Morbakka virulenta
MGRKGWKGEKRGKMGRTGLFKSKWSHFERKVLWECFVRSGGRRADGYIGKVKEMWDGRDVSVRSVASLLSQLKQIEANGLLSVVERGEIERMVREEALVEEESSEGEVDFCIRPESGLGEMEIENVVVANDAEERDLRVVIERVDVWRRGDDMRALSNDESGALALLREVYHSEDVVEVPSLKAQDGRKIGEEVKLVDGLMHNLVRDSMTVTEINRLLYAGSYVVASRLGVMGKNKTVRKKKPWWQRRLEKSIGEWRKDLGRIEEIKQGNKVRQVVRDRLNRKYELVVKGTMTVSTMLKNKISSASAKIRQFVGKSLARRQNNLFKNNQCQLYKELNGNGHKMESSAPNADEAREFWSIIWSEEKEHDKEASWLGDVREKFADVEKQEDIMVALQDVKAGIRKMANWKAPGPDWVRGYWFKKFTSLHLSIATTLQECLTSGVVPDWMVKGRTVLIQKDSGKGTAASNYRPIACLPLMWKLLSGIFAEKIYGHLVNNNLLPEEQKGCRKKSRGTKDQLMIDKAILHEVRAMKRNLSMCWIDYKKAYDMVPHSWILEMLDMVGVAENVRSLLKGSMAEWKTVLTANNEVLGEVNINRGIFQGDSLSPLIFVIAMIPLSILLNREKLGYFFGHGRVLVNHLLFMDDLKLFGRSKRELEALVEVVRVYSRDIGMEFGLDKCAVLEIRRGERAECEGIELPSGELMKEVDEDGYKYLGVLEGAKVMQKKMKEKIGNEYLRRVKLLAKSRLYAGNLVRGINAWAVSVVRYSSGILDWSDAELRKLDTKTRKILTMNGAFHRNSSVDRLYIGRKDGGRGLISVEDCVRQEELGLEEYVHATEETILEQVAGMIMHGRETKKHYKTRVVEERKERLMEKALHGRFFREMDENATERSVQWVKGGFLAKSTEAFVFAAQEQALRTRLAQSKWDGGVSPMCRICGIESESVWHVACGCKVLAQKEYKRRHDRMGLRIYWELCKKYGLKCAGKWFEEVPDKVRKSEDGRFEVWWDRSVETMQQVESNRPDVVVVDRTKKRWLVVDFAVPSDRNVTAKEEEKVTKYSPLAQQIRKLHSVCTSVVPIVVGSLGVVTKHLERSLKEVGIPDVLGGLQTSTIIETTNILRKVLNL

SEQ ID NO: 18868 - protein, 1029 aa, Morbakka virulenta
MGRKGWKGEKRGKMGRTGLFKSKWSHFERKVLWECFVRSGGRRADGYIGKVKEMWDGRDVSVRSVASLLSQLKQIEANGLLSVVERGEIERMVREEALVEEESSEGEVDFCIRPGSGLGEMEIENVVVANDAEERDLRVVIERVDVWRRGDDMRALSNDESGALALLREVYHSEDVVEVPSLKAQDGRKIGEEVKLVDGLMHNLVRDSMTVTEINRLLYAGSYVVASRLGVMGKNKTVRKKKPWWQRRLEKSIGEWRKDLGRIEEIKQGNKVRQVVRDRLNRKYELVVKGTMTVSTMLKNKISSASAKIRQFVGKSLARRQNNLFKNNQCQLYKELNGNGHKMESSAPNADEAREFWSIIWSEEKEHDKEASWLGDVREKFADVEKQEDIMVSLQDVKAGIRKMANWKAPGPDWVRGYWFKKFTSLHLSIATTLQECLTSGVVPDWMVKGRTVLIQKDSGKGTAASNYRPIACLPLMWKLLSGIFAEKIYGHLVNNNLLPEEQKGCRKKSRGTKDQLMIDKAILHEVRAMKRNLSMCWIDYKKAYDMVPHSWILEMLDMVGVAENVRSLLKGSMAEWKTVLTANNEVLGEVNINRGIFQGDSLSPLIFVIAMIPLSILLNREKLGYFFGHGRVLVNHLLFMDDLKLFGRSKRELEALVEVVRVYSRDIGMEFGLDKCAVLEIRRGERAECEGIELPSGELMKEVDEDGYKYLGVLEGAKVMQKKMKEKIGNEYLRRVKLLAKSRLYAGNLVRGINAWAVSVVRYSSGILDWSDAELRKLDTKTRKILTMNGAFHRNSSVDRLYIGRKDGGRGLISVEDCVRQEELGLEEYVHATEETILEQVAGMIMHGRETKKHYKTRVVEERKERLMEKAMHGRFFREMDENATERSVQWVKGGFLAKSTEAFVFAAQEQALRTRLAQSKWDGGVSPMCRICGIESESVWHVACGCKVLAQKEYKRRHDRMGLRIYWELYKKYGLKCAGKWFEEVPDKVRKSEDGRFEVWWDRSVETMQQVEYNRPDVVVVDRTKKR

SEQ ID NO: 18869 - protein, 1120 aa, Morbakka virulenta
MGRKGWKGEKRGKMGRTGLFKSKWSHFERKVLWECFVRSGGRRADGYIGKVKEMWDGRDVSVRSVASLLSQLKQIEANGLLSVVERGEIERMVREEALVEEESSEGEVDFCIRPESGLGEMEIENVVVANDAEERDLRVVIERVDVWRRGDDMRALSNDESGALALLREVYHSEDVVEVPSLKAQDGRKIGEEVKLVDGLMHNLVRDSMTVTEINRLLYAGSYVVASRLGVMGKNKTVRKKKPWWQRRLEKSIGEWRKDLGRIEEIKQGNKVRQVVRDRLNRKYELVVKGTMTVSTMLKNKISSASAKIRQFVGKSLARRQNNLFKNNQCQLYKELNGNGHKMESSVPNADEAREFWSIIWSEEKEHDKEASWLGDVREKFADVEKQEDIMVALQDVKAGIRKMANWKAPGPDWVRGYWFKKFTSLHLSIATTLQECLTSGVVPDWMVKGRTVLIQKDSGKGTAASNYRPIACLPLMWKLLSGIFAEKIYGHLVNNNLLPEEQKGCRKKSRGTKDQLMIDKAILHEVRAMKRNLSMCWIDYKKAYDMVPHSWILEMLDMVGVAENVRSLLKGSMAEWKTVLTANNEVLGEVNINRGIFQGDSLSPLIFVIAMIPLSILLNREKLGYFFGHGRVLVNHLLFMDDLKLFGRSKRELEALVEVVRVYSRDIGMEFGLDKCAVLEIRRGERAECEGIELPSGELMKEVDEDGYKYLGVLEGAKVMQKKMKKKIGNEYLRRVKLLAKSRLYAGNLVRGINAWAVSVVRYSSGILDWSDAELRKLDTKTRKILTMNGAFHRNSSVDRLYIGRKDGGRGLISVEDCVRQEELGLEEYVHATEETILEQVAGMIMHGRETKKHYKTRVVEERKERLMEKAMHGRFFREMDENATERSVQWVKGGFLAKSTEAFVFAAQEQALRTRLAQSKWDGGVSPMCRICGIESESVWHVACGCKVLAQKEYKRRHDRMGLRIYWELCKKYGLKCAGKWFEEVPDKVRKSEDGRFEVWWDRSVETMQQVESNRPDVVVVDRTKKRWLVVDFAVPSDRNVTAKEEEKITKYSPLAQQIRKLHSVCTSVVPIVVGSLGVVTKRLERSLKELGIPDVLGGLQTSTIIGTTNILRKVLNL

SEQ ID NO: 18870 - protein, 1174 aa, Morbakka virulenta
MSFLKKKPTEGKPGSRRVSDDPQERVLIRTGEVSRPEASENVESSKDGSRTEEPMGRKGWKGEKRGKMGRTGLFKSKWSHFERKVLWECFVRSGGRRADGYIGKVKEMWDGRDVSVRSVASLLSQLKQIEANGLLSVVERGEIERMVREEALVEEESSEGEVDFCIRPGSGLGEMEIENVVVANDAEERDLRVVIERVDVWRRGDDMRALSNDESGALALLREVYHSEDVVEVPSLKAQDGRKIGEEVKLVDGLMHNLVRDSMTVTEINRLLYAGSYVVASRLGVMGKNKTVRKKKPWWQRRLEKSIGEWRKDLGRIEEIKQGNKVRQVVRDRLNRKYELVVKGTMTVSTMLKNKISSASAKIRQFVGKSLARRQNNLFKNNQCQLYKELNGNGHKMESSAPNADEAREFWSIIWSEEKEHDKEASWLGDVREKFADVEKQEDIMVALQDVKAGIRKMANWKAPGPDWVRGYWFKKFTSLHLSIATTLQECLTSGVVPDWMVKGRTVLIQKDSGKGTAASNYRPIACLPLMWKLLSGIFAEKIYGHLVNNNLLPEEQKGCRKKSRGTKDQLMIDKAILHEVRAMKRNLSMCWIDYKKAYDMVPHSWILEMLDMVGVAENVRSLLKGSMAEWKTVLTANNEVLGEVNINRGIFQGDSLSPLIFVIAMIPLSILLNREKLGYFFGHGRVLVNHLLFMDDLKLFGRSKRELEALVEVVRVYSRDIGMEFGLDKCAVLEIRRGERAECEGIELPSGELMKEVDEDGYKYLGVLEGAKVMQKKMKEKIGNEYLRRVKLLAKSRLYAGNLVRGINAWAVSVVRYSSGILDWSDAELRKLDTKTRKILTMNGAFHRNSSVDRLYIGRKDGGRGLISVEDCVRQEELGLEEYVHATEETILEQVAGMIMHGRETKKHYKTRVVEERKERLMEKAMHGRFFREMDENATERSVQWVKGGFLAKSTEAFVFAAQEQALRTRLAQSKWDGGVSPMCRICGIESESVWHVACGCKVLAQKEYKRRHDRMGLRIYWELCKKYGLKCAGKWFEEVPDKVRKSEDGRFEVWWDRSVETMQQVECNRPDVVVVDRTKKRWLVVDFAVPSDRNVTAKEEEKVTKYSPLAQQIRKLHSVCTSVVPIVVGSLGVVTKRLERSLKELGIPDVLGGLQTSTIIGTTNISRKVFNL

SEQ ID NO: 18871 - protein, 920 aa, Morbakka virulenta
MHNLVRDGMTVTEINRLKYAGSYVVASRLGVMGKNKTVRKKKPWWQRRLEKSIGEWRKDLGRIEEIKQGNKVRQVVRDRLNRKYELVVKGTMTVSTMLKNKISSASAKIRQFVGKSLARRQNNLFKNNQCQLYKELNGNGHKMESSAPNADEAREFWSIIWSEEKEHDKEASWLGDVREKFADVEKQEDIMVSLQDVKAGIRKMANWKAPGPDWVRGYWFKKFTSLHLSIATTLQECLTSGVVPDWMVKGRTVLIQKDSGKGTAASNYRPIACLPLMWKLLSGIFAEKIYGHLVNNNLLPEEQKGCRKKSRGTKDQLMIDKAILHEVRAMKRNLSMCWIDYKKAYDMVPHSWILEMLDMVGVAENVRSLLKGSMAEWKTVLTANNEVLGEVNINRGIFQGDSLSPLIFVIAMIPLSILLNREKLGYFFGHGRVLVNHLLFMDDLKLFGRSKRELEALVEVVRVYSRDIGMEFGLDKCAVLEIRRGERAECEGIELPSGELMKEVDEDGYKYLGVLEGAKVMQKKMKEKIGNEYLRRVKLLAKSRLYAGNLVRGINAWAVSVVRYSSGILDWSDAELRKLDTKTRKILTMNGAFHRNSSVGRLYIGRKDGGRGLISVEDCVRQEELGLEEYVHATEETILEQVAGMIMHGRETKKHYKTRVVEERKERLMEKAMHGRFFREMDENATERSVQWVKGGFLAKSTEAFVFAAQEQALRTRLAQSKWDDSVSPMCRICGIESESVWHVACGCKVLAQKEYKRRHDRMGLRIYWELCKKYGLKCAGKWFEEVPDKVRKSEDGRFEVWWDRSVETMQQVESNRPDVVVVDRTKKRWLVVDFAVPSDRNVTAKEEEKITKYSPLAQQIRKLHSVCTSVVPIVVGSLGVVTKRLERSLKELGIPDVLGGLQTSTIIGTTNILRKVLNL

SEQ ID NO: 18872 - protein, 1174 aa, Morbakka virulenta
MSFLKNKPTEGEPGSRRVSDDPQERILIRTREVSRPEASENVESTKDGSRTDEPMGRKGWKGEKRGKMGRTGLFKSKWSHFERKVLWECFVRSGGRRADGYIGKVKEMWDGRDVSVRSVASLLSQLKQIEANGLLSVVERGEIERMVREEALVEEESSEGEVDFCIRPESGLGEMEIENVVVANDAEERDLRVVIERVDVWRRGDDMRALSNDESGALALLREVYHSEDVVEVPSLKAQDGRKIGEEVKLVDGLMHNLVRDSMTVTEINRLLYAGSYVVASRLGVMGKNKTVRKKKPWWQRRLEKSIGEWRKDLGRIEEIKQGNKVRQVVRDRLNRKYELVVKGTMTVSTMLKNKISSASAKIRQFVGKSLARRQNNLFKNNQCQLYKELNGNGHKMESSAPNADEAREFWSIIWSEEKEHDKEASWLGDVREKFADVEKQEDIMVSLQDVKAGIRKMANWKAPGPDWVRGYWFKKFTSLHLSIATTLQECLTSGVVPDWMVKGRTVLIQKDSGKGTAASNYRPIACLPLMWKLLSGIFAEKIYGHLVNNNLLPEEQKGCRKKSRGTKDQLMIDKAILHEVRAMKRNLSMCWIDYKKAYDMVPHSWILEMLDMVGVAENVRSLLKGSMAEWKTVLTANNEVLGEVNINRGIFQGDSLSPLIFVIAMIPLSILLNREKLGYFFGHGRVLVNHLLFMDDLKLFGRSKRELEALVEVVRVYSRDIGMEFGLDKCAVLEIRRGERAECEGIELPSGELMKEVDEDGYKYLGVLEGAKVMQKKMKEKIGNEYLRRVKLLAKSRLYAGNLVRGINAWAVSVVRYSSGILDWSDAELRKLDTKTRKILTMNGAFHRNSSVDCLYIGRKDGGRGLISVEDCVRQEELGLEEYVHATEETILEQVAGMIMHGRETKKHYKTRVVEERKERLMEKAMHGRFFREMDENATERSVQWVKGGFLAKSTEAFVFAAQEQALRTRLAQSKWDGGVSPMCRICGIESESVWHVACGCKVLAQKEYKRRHDRMGLRIYWELCKKYGLKCAGKWFEEVPDKVRKNEDGRFEVWWDGSVETMQQVECNRLDVVVVDRTKKRWLVVDFAVPFDRNVTAKEEEKVTKYSPLAQQVRKLHSVCTSVVSIVVGSLGVVTKRLERSLKELGIPNILGGLQTSTIIGTTNILRKVLNL

SEQ ID NO: 18873 - protein, 968 aa, Morbakka virulenta
MRALSNDESGALALLREVYHSKDVVEVPSLKAQEGRKIGEEVKPVDGLMHNLVRDGMTVTEINRLLYAGSYVVASRLGVMGKNKTVRKKKPWWQRRLEKSIGEWRKDLGRIKEIKQGNKVRQVVRDRLNRKYELVVKGTMTVSTMLKNKISSASAKIRQFVGKSLARRQNNLFKNNQCQLYKELNGNGHKMESSVPNADEAREFWSIIWSEEKEHDKEASWLGDVREKFADVEKQEDIMVALQDVKAGIRKMANWKAPGPDWVRGYWFKKFTSLHLSIATTLQECLTSGVVPDWMVKGRTVLIQKDSGKGTAASNYRPIACLPLMWKLLSGIFAEKIYGHLVNNNLLPEEQKGCRKKSRGTKDQLMIDKAILHEVRAMKRNLSMCWIDYKKAYDMVPHSWILEMLDMVGVAENVRSLLKGSMAEWKTVLTANNEVLGEVNINRGIFQGDSLSPLIFVIAMIPLSILLNREKLGYFFGHGRVLVNHLLFMDDLKLFGRSKRELEALVEVVRVYSRDIGMEFGLDKCAVLEIKRGERAECEGIELPSGELMKEVDEDGYKYLGVLEGAKVMQKKMKEKIGNEYLRRVKLLAKSRLYAGNLVRGINAWAVSVVRYSSGILDWSDAELRKLDTKTRKILTMNGAFHRNSSVDRLYIGRKDGGRGLISVEDCVRQEELGLEEYVHATEETILEQVAGMIMHGRETKKHYKTRVVEERKERLMEKAMHGRFFREMDENATERSVQWVKGGFLAKSTEAFVFAAQEQALRTRLAQSKWDGGVSPMCRICGIESESVWHVACGCKVLAQKEYKRRHDRMGLRIYWELCKKYGLKCAGKWFEEVPDKVRKSEDGRFEVWWDRSVETMQQVESNRPDVVVVDRTKKRWLVVDFAVPSDRNVTAKEEEKITKYSPLAQQIRKLHSVCTSVVPIVVGSLGVVTKRLERSLKELGIPDVLGGLQTSTIIGTTNILRKVLNL

SEQ ID NO: 18874 - protein, 1052 aa, Bradysia odoriphaga
MDSDSDDPECICPICRRGFKSVAAIRQHWAKGHTSKEFEDAVHNNTQSHASQSIAPNSVDNNVVNGDTQSQPSVVLQAPAPINLELTNSNSSVETIRNRATCSICGFLAKNERGLKVHARTHCSLSSSGTSTSAVPQFVFDSLDEPSLIRKFGELLYKCKCSLPLVRIIQKSVRTAVCQELTKVVENVVSKQDILSWFRLLSFPIIVLNTVARNSCQSNHRPNFIRHNLSVFSRLTDIPSLVNELLTLLAIDLPKQKRSQSEKLLIKIAQRKIGEGDIGGAVRVLCSQEGIADYTPENIEKLKNKHPDESPEMDEESLADLQQFDTSSEQVINSIRHFPISSSGGIDGLRPRHLKDLISFTCGESASKLVSAIAKLTNVVRSGKICEKLLPIFYGAALIALAKKNGDIRPIAIGLVWRRLSGKIACFSIKDEQAESLGPIQNGFGVKGGAEAIVHAVRAFAKADHQGPVAIVKFDYRNAFNELFRKFFLGEIKREAPSLFPMLQQAYRCPSDLFFGDIVIQSKRGTQQGDPCASVAFCIALKRLTHALSSTLNTWFFDDGTIGDHFQAVLDDIEKVLAFGKESGLSLNPAKCEVFFVKATQSEQSEMMEKLNHLLPGIKQIDATTFQMLGAPILDEAMNEMLHNGFECVTTMCKRLPLIDIHPALRVLRCSLSSPRFQYLLRTSPTFLLSNRLAEIDDFYRRILEVITNNKFSDTSWTQASLPLHASGLGIRKLSDLAHPAYFSSVYQSESLSNQILAKAKLNILNPAFDSTIASYPVELVPKSPESLKHQNAWDNLRADNIYKQLLSSSGPVDRARITASSSKTSSKWLQAVPSQQLGLMLDNDTARIAVALRLGNRICEAHACVCGSMVNTNGHHGLACTKTKGIYCRHAEINRIISMAFSAAGFPNTTEPFGISRRDGKRPDGLTSFPWSSGKALIWDVTVVDTVASSNIMMTSNKCGAAADQAERNKHNHYIDLKQTYEFTPLAFESLGSVGPETELFLKKLGKLMKRNTGEPRSLDFLMQRISIAIQRGNAVCIRNTFCDNEANIFL

SEQ ID NO: 18875 - protein, 1248 aa, Pissodes strobi
MATWAQNELDIIRQCITQNAVITRQHHEALQLQLPNRSVAAIKKKCIELKNAPVNRAAPSKWTEEEGQRLVRTYKRGVEPRPGARIQNLLHDFPNRTAKAIATKLRERFPDVYYMRNVSSSSSSSASSPSPSTSSPPASSNTGDTQSSAEEDDVPEASQHQEETQEDPPIASNRPQPVDLSTISISDSDSETDNEDQEVRRAANTTPRSVRATSEGANATPPIPRIPPILDATALLLQEQFDKILRSTGNKKAKIKKFYLRPSNKSKLERVNQILEVKIAEIQESPHTQVAQRRAIKNAIYAAGVLLRKTILGKRANLKPKTVFLETKIKRLKTRIQNATEILEGNGRNLNRRLMNEIRAMRRLKSSPAEYISSTKERVRILEERLQTQQRRATVLETRHQFHINPSITILDKKEKKNELECRDTEEFFKKLYDKEKENHPTPAFSKWLKKLRKHSKQQQYNEQLEDVTLNDQLDKVLKKTAPWKAPGEDRIPVYLYKVLPAAKEYLARYIKSVLSCEAGFTEADVRANVVLLYKKGDPKNPANYRPISLLNTDYKATTAVITNYIKKGLPDWTIPAEQMAREGVWGTTHGLMLDKAISAVARLRRNGSYSSWYDFEKAYDSVYHKILKRLIDCLPLHRNIRRAFKSAMKLWSLRVQIDKTATKPILVRRGLLQGDSISPLLFVLVTACIISHLKTSPEINRLTRGKHRVLAFMDDFKWHSPTESGTRLISEQLEKAAEELGLKLNIDKCGLYHKDALNPDEAADPPFLPEVKDGYKYLGLEQLERDTLRNYERMEENMEGLLDKILSSDLTTFQKSTLINNTVVPAVIYVTGNIYASESRSSALKRCRDLDTKIRKKLVAHNVKGKTSSNAAVYMPISKGGLGVNSIEHETQKCFAKRGIYLMKHKDLKECREWCQALKRGGCRNPITDMEWVLEKFEVEADMSLDIAKCCRRVVNEMDRKHAEQQQQEWSRNMHYGKVVLQEETKISFPAHQSPNLDSWRRTMLLTASEEQIHGLGSNPHRRKCRRGCDRDETAYHVVSSCVTNAYITRHDYVVHWTLKTLLRSLNAPRHFTQQLQFGKANCHFRFNVNNRDHTITAGQKFLTEKRLYHNKPDIVVHLTNPDEMYVFEIAVSHIQNWRNQERLKRTRYEVNSVNHITEFQLATVTRDLNLVTELQNQYRCPVKLGIFVVGCYGELISSEEHREFCSTLRGKLKVSPRDLKTLLNKVSYSVAVSTTNMLLNRLGDRS

SEQ ID NO: 18876 - protein, 1248 aa, Pissodes strobi
MATWAQNELDIIRQCITQNAVITRQHHEALQLQLPNRSVAAIKKKCIELKNAPVNRAAPSKWTEEEVQRLVRTYKRGVEPRPGARIQNLLHDFPNRTAKAIATKLRERFPDVYYMRNVSSSSSSSASSPSPSTSSPPASSNTGDTQSSAEEDDVPEASQHQEEAQEDPPIASNRPQPVDLSTISISDSDSETDNEDQEVRRAANTTPRSVRATSEGANATPPIPRIPPILDATALLLQEQFDKILRSTGNKKAKIKKFYLRPSNKSKLERVNQILEVKIAEIQESPHTQVAQRRAIKNAIYAAGVLLRKTILGKRANLKPKTVFLETKIKRLKTRIQNATEILEGNGRNLNRRLMNEIRAMRRLKSSPAEYISSTKERVRILEERLQTQQRRATVLETRHQFHINPSITILDKKEKKNELECRDTEEFYKKLYEKEKENHPTPAFSKWLKKLRKHSKQQQYNEQLEDVTLNDQLDKVLKKTAPWKAPGEDRIPVYLYKVLPAAKEYLARYIKSVLSCEAGFTEADVRANVVLLYKKGDPKNPANYRPISLLNTDYKATTAVITNYIKKGLPDWTIPAEQMAREGVWGTTHGLMLDKAISAVARLRRNGSYSSWYDFEKAYDSVYHKILKRLIDCLPLHRNIRRAFKSAMKLWSLRVQIDKTATKPILVRRGLLQGDSISPLLFVLVTACIISHLKTSPEINRLTRGKHRVLAFMDDFKWHSPTESGTRLISEQLAKAAEELGLKLNIDKCGLYHKDALNPDEAADPPFLPEVKDGYKYLGLEQLERDTLRNYERMEENMEGLLDKILSSDLTTFQKSTLINNTVVPAVIYVTGNIYASESRSSALKRCRDLDTKIRKKLVAHNVKGKTSSNAAVYMPISKGGLGVNSIEHETQKCFAKRGIYLMKHKDLKECREWCQALKRGGCRNPITDMEWVLEKFEVEADTSLDIAKCCRRVVNEMDRKHAEQRQQEWSRNMHYGKVVLQEETKISFPAHQSPNLDSWRRTMLLTASEEQIHGLGSNPHQRKCRRGCDRDETAYHVVSSCVTNAYITRHDYVVHWTLKTLLRSLNAPRHFTQQLQFGKANCHFRFNVNNRDHTIIAGQKFLTEKRLYHNKPDIVVHLTNPDEMYVFEIAVSHIQNWRNQERLKRTRYEVNSVNHITEFQLATVTRDLNLVTELQNQYRCPVKLGIFVVGCYGELISSEEHREFCSTLRGKLKVSPRDLKTLLNKVSYSVAVSTTNMLLNRLGDRS

SEQ ID NO: 18877 - protein, 1234 aa, Ips typographus
MSTWKPDEINTLREFVQGRNILTKRDLEEAQNLLPGRSVAAIKKKCLEIKNPNQADRQGSSKWTQAELEQLVRAYKNRPEALPTARIRAILDNFPGRSLKAVAAKLRESYPDTYYMRNAESDIDNEPGEELPQNQQPQQEEARYDGDIQQELHSQDGQANADHQLQLEIRHNSQPSTSLAESETEGEEGHAQPPTPQTPHPARQEPLYQKTKAYFDKLLGRVSDKKPKIKRFLIRPQNKKTVRLVDAILEERIVEIQRQPSKTDVEKRKATKNAIYVATKVLRDTLVHNKPVKLAHRRTEEQICQLKKRIKIANEIRNTHGQNLTKQQLKQATIIKRLKMNIKDYITSAQEKLALLEKKLDRQKTRDEASTLRRKFHERPTIDVLQERPNTEGKLNTEDAERFYRKLYAKDRSENNTPVFHEWLRKMKRFSSARNFDQQTSPDYIKEKCEQAVARAAPWKAPGDDGIPNYTYKILPAAKSYLINSVRMILTGRQKLTETDVRARLVLIHKKGDEHDPENYRPISILNTDYKTVTAVITATLKESLPTWAIPPEQFAQADMWGTTHGLLEDKSITTLARKRDTTNYSAWYDFRKAYDSIHHSCLKKLVNVLPLHPNIKMATKLAIKLWSLRIQIHKERTTPIPVRRGILQGDSMSPLLFLLITAPLIHHVNTNPDIAKQSKGKHRILAYVDDIKCHAPTKKSLKTITNKLASAAAEVGLSLNTAKCGHYSRTAEVGNGDLEPFLPQVRQGYKYLGLIQLEKDTEENFNKMEIQLEEKLSLVLGSQLTTGQKVTLLNASVIPAVTYVTANIFSDEKRSTTLKRCRNLDKNIRKKLVEHKIKGKSSSNASVYLPIHTGGLGLTSIEDVTEISYAKKGIYLLKHKNLEKCRERYQVLQKAGWRNPLTDMEWVLKKYDVDIPVEDDIKKCCQSVSETLKTKMTQLRQEQWSQNMHYGRVVTREAKKMTIPAHTSPSLDTWRRTMLLNAAEEQLHGLCVGLERWKCRRGCRADETAYHVAAACVEGAYTTRHDCVVHWLLKTLFTSFRAPRGCSRRLQFGRANCQETFQCGQRKVTIKAGKKLLTDRPLYHNKPDVVVYLTNPDEIYVLEVAVSHLQNIRSQEKLKKTRYTVNSVLKTDNFEVQNITRDLNLVDELRHIHRCPVTFATCVIGCYGEILATEDFLEFRNLMKKSLRVTAREWQIFLNKISHSVAVSTTDILLRRITKHSGATLTQPPNEET

SEQ ID NO: 18878 - protein, 1253 aa, Ips typographus
MSTWKHQEINILREFMQGRTTITKRDLEEAQNLLPGRSTAAIKKKYLEIKNPNQAEKQNTNKWSEAELDELVRAYKSRPEPLATARIRAICDNFPNRTQKAIAAKLRESYPDVYYMRNTNPETDSDDVPDEETPQEQSNAGPTPALDLLEEEEQNDHHRHQELAEHEEHIFPEQQPEPGAHHNAVPSTSLAGHETEGEEGYAQPPIPRMNQPARQEPLCPKIKAYFDKLLRHVSDKKPKIKRFLIRPQNKKTVKLVDAVLEDKILEILAQASTTDREKRKAVKNAIYVATKVLRDSLVTKKPVKPAHKRTEEQIKRLNTRINIANEIRNSHGQNLSKRLHKQVKIIKRLKMSVKDYIISSRERLAILEKKLDRQKTRDEASAIRRRFYERPTIEVLQETPRPQDKLKADDAEKFYRGLYSRGRSDDQKPVFGEWLRKIKRFSSARNFDQQTSPDYIKEKCNEALARAAPWKAAGDDGIPNYAYKILPAARNYLVTTTQGTLTGKLKLNETDVRARLVLIYKKGDEQDPENYRPISILNTDYKIVTAVITATLKEALPNWAIPPEQFAQNDIWGTTHGLLEDKSITTLARKRNTKNYSAWYDFRKAFDSVHHSCLKRLIDALPLHQHIKQATKLAIKLWSLRIQLGKTRTAPIPVRRGILQGDSMSPLLFTLVTAALINHVNTGPDILKQTKGKHRILAYMDDIKCHAPTKTSLKTITDALKKAAAEIGLALNTDKCGHYSRTEEVGDGELEPFLPQVRQGYKYLGLVQLEKDTEQNYKKIEEQLEDKLQLVFASQLTTSQKVALLNSTIIPAVTYVTANIFSDEKRSTTLKRCRDLDKNIRKKLVEHKLKGKSSSNASVYLPLHMRGLGITSIERTTEIAHAKKGIYLLKHGNLEKCRERYRVLQKAGWRNPLTDMERVLNKYGVDIPAEEDIKRCCQQVSKAIKEKITQSLREEWCENMHYGRLVVREEKKLTIPAHTSPNLDSWRRTMLLNATEEQLHGLCVGMERWKCRRGCRADETAYHVAAACVEGAYTSRHDCVVHWLLKTLFVSLRAPRACSRRLQFGRANCQETFQCGQRKVTIKAGKKLLTDAPLYHNKPDVVVYLTNPDEIFVLEVAVSHLQNIRSQEKLKKTRYTVNSVLRTDNFDVQNVTRDQNLVDELRQLHRCPVTFAACVVGCYGEILATEDFLHFKDVLKKSLKVTAREWQVLLNRISHSIAVSTTNILLRRITKGSGRQDRGRPALRPPTGEPGGG

SEQ ID NO: 18879 - protein, 1045 aa, Ips nitidus
MNQPARQEPLCPKIKAYFDKLLRHVSDKKPKIKRFLIRPQNKKTVKLVDAVLEDKILEILAQASTTDREKRKAVKNAIYVATKVLRESLVTKKPVKPTHKRTEEQIKRLNTRINIANEIRNSHGQNLSKRLHKQVKVIKRLKMSVKDYIISSRERLAILEKKLDRQKTRDEASAIRRRFYERPTIEVLQETPRPQDKLKADDAEKFYRGLYSRGRSDDQKPVFGEWLRKIKRFSSARNFDQQTSPDYIKEKCNEALARAAPWKAAGDDGIPNYAYKILPAARNYLVTTTQGTLTGKLKLNETDVRARLVLIYKKGDEQDPENYRPISILNTDYKIVTAVITATLKEALPNWAIPPEQFAQNDIWGTTHGLLEDKSITTLARKRNTKNYSAWYDFRKAFDSVHHSCLKRLIDALPLHQHIKQATKLAIKLWSLRIQLGKTRTAPIPVRRGILQGDSMSPLLFTLVTAALINHVNTGPDILKQTKGKHRILAYMDDIKCHAPTKTSLKTITEALKKAAAEIGLALNTDKCGHYSRTEEVGDGELEPFLPQVRQGYKYLGLVQLEKDTEQNYKKIEEQLEDKLQLVFASQLTTSQKVALLNSTIIPAVTYVTANIFSDEKRSTTLKRCRDLDKNIRKKLVEHKLKGKSSSNASVYLPLHMGGLGITSIERTTEIAHAKKGIYLLKHGNLEKCRERYRVLQKAGWRNPLTDMEWVLNKYGVDIPAEEDIKRCCQQVSKAIKEKITQSLREEWCENMHYGRLVVREERKLTIPAHTSPNLDSWRRTMLLNATEEQLHGLCVGMERWKCRRGCRADETAYHVAAACVEGAYTSRHDCVVHWLLKTLFVSLRAPRACSRRLQFGRANCQETFQCGQRKVTIKAGKKLLTDAPLYHNKPDVVVYLTNPDEIFVLEVAVSHLQNIRSQEKLKKTRYTVNSVLRTDNFDVQNVTRDQNLVDELRQLHRCPVTFAACVVGCYGEILATEDFLHFKDVLKKSLKVTAREWQVLLNRISHSIAVSTTNILLRRITKGSGRQDRGRPALRPPTGEPRGG

SEQ ID NO: 18880 - protein, 847 aa, Lepeophtheirus salmonis
MIIELMSALESGPTFNKLTNLLIRDSVGGFNERKSEMDAAKQQHNGNKRKGASNRGSFYSGKALQQALRKDFGKTMSAVIDGKVSSHLKNIKMPEAFLEGWAEKFSTASKTDDRNPTPVGNILYKLQKVITEDEVRHCLPSAGAGRDPLGMDGGMFRSLDIPVITKLYNKVLLLGELPPELLCGNTSFVPKKDEPTDMGDFRPITVLPHVTRVLHKVIANRLKQVPIDECQKGFREVNGCSENSLVLNSLLKLATKNNKKRRVALAFIDFSKAFDSVSHESLLKACERSGVPPLLLKYFSFVYGNASATLQGKEAVKFRSGILQGDPLSGYLFNFVLDWCLANTNNVALKGFKPYKLGTEQVRTLLFADDAVLIAEDPKSLQKLCNNFLGQCKEVGLDANHKKCAFTYIDHNTKTNQYFVDAGAKLIIDGKSITPMAVGETYKYLGIQYSALGVEYANIYDKLKDGIRNLEASKLNTFQRFIGLRDHLIPRLLYPLTYGKCRFRDVKGCDLLIRKSVREWTKLSHDTPKEFYHARVADGGLGLRELLIASRTLANGRARALRDSSDKIVREACKFFPQITEIKTIQIGGLTCSSSDQTPELYKKALYKKIDTQGLESSQQGHKNFSFLTSRTMNVSDLEFAPAVQIMAGSVTTKSKIARFKTLEGGNKCESCADKVKNLAHILQVCPRVHGARTKRHDAIQELVERSLTHRSIPFTKDNVVPHKGSCLKPDLIIRKDDKVYLADPTIVSDNCLLSEREEEKCRLYGSNEFKESIIKYLNLPENFNRDNIIVVPLVFNWRGVMSRKAYTDLHKTLGIPPMYINYIQMKVLTTSHSLYRIERERPDRRA

SEQ ID NO: 18881 - protein, 775 aa, Cantharis rustica
MLHFWTNLWSQKSKYNKQASWIKKLKDDSTSLEWCENELITLEEITNAIKFSSNWKSPGLDGIQNFWLKRFKSVQLHLLFWYNEALNDPSVIPDFLCTGITYMLYKNGNPLEPQNYRPITCLPTIYKIFTSILASKIENHCKTNDVMCMEQKGCVKGSQGCRELLIVDTVITKLAKDNKRNLHMCYIDYKKAYDSVPHDWLIDILIIYKINPKIVRLLSSMMSRWNTNIMNNGKILESIKINRGIFQGDSLSALWFCLAINPLSTLLNDSTSGFRLNFRKNCTITHLLYMDDLKLYSRTEDQLQNLIESTKLFSRDICMEFGLDKCAKINIISGIPIANTDILNEIPQLLPNKFYKYLGMQQNFVLNQTFLKNEFKQKYIKKLKILLKSKLNSRNMISAINSWAAPVLSYSFGVLKWSNTDLNAMDTLTRKMLYKYRYLHPRSAVERLYIKRKNGGRGLINLFNLCKSITKLLRDYFYSLNTPLSYEIINSDNHFSGLNLKNRNLNCEQKKDLDINWKNKVLHGKHPTILDSNGIDKDLSVEWLKRGLLYLETEGFMCAIQDGVIATNNYKKHIMNLEVEDHCRKCNVPNETIEHVIAGCSYLAPTDYLRRHNQVCKILHQQLAKKVGLLDNFKPYYDYIPEPVLENESFLLYWDRLILTDREVNHNRPDIVLINQRDRNAIIIDVAVPLSKNVLTTEKEKIRRYEALAMEMMSVWGLTKIFIIPIVISATGIVSSKFKIHLSHLDLSSKVFPEMQKAVILETCHIVRKFLNAVT

SEQ ID NO: 18882 - protein, 1174 aa, Cantharis rustica
MERSASVNVSANIPTRIRNRDNEQVLEGSTLPLTLEPLIERTTNQIEPNEIITNSLSSGSMIHNERTAAGRIRRRIKWTKAMNIEVMRTFFETNTCNESPLPGWRKKFHMAMIEKFPNLDLSEQNVVDRRSVIIKKQYLSKNEMDEICRRVGNTIYQREHFEDELEIQIESENEIVPIENLDKTEIIHSDEIYKNIEADFLSKIELFDGTDPLTRPKIPNLQFSSYYKIKGIFDILDKIISMLLENHTSIYYIHLALYCAAAVITEKNGQTLITDIPINKKVKEPIWKTRLIKKVNNLRKDIGILTAFKSSFNNVAPRKLNQMFSKYKLNRHDTKFETQLNDNLDYLKQKLKVTAHRLKRYTSCTQRKFENKIYLENSNKFFRYLEPTPKTQNFPQQDNMLHFWTNLWSQKSKYNKQASWIKKLKDDSTSLEWCENELITLEEITNAIKFSSNWKSPGLDGIQNFWLKRFKSVQLHLLFWYNEALNDPSVIPDFLCTGITYMLYKNGNPLEPQNYRPITCLPTIYKIFTSILASKIENHCKTNDVMCMEQKGCVKGSQGCRELLIVDTVITKLAKDNKRNLHMCYIDYKKAYDSVPHDWLIDILIIYKINPKIVRLLSSMMSRWNTNIMNNGKILESIKINRGIFQGDSLSALWFCLAINPLSTLLNDSTSGFRLNFRKNCTITHLLYMDDLKLYSRTEDQLQNLIESTKLFSRDICMEFGLDKCAKINIISGIPIANTDILNEIPQLLPNKFYKYLGMQQNFVLNQTFLKNEFKQKYIKKLKILLKSKLNSRNMISAINSWAAPVLLYSFGVLKWSNTDLNAMDTLTRKMLYKYRYLHPRSAVERLYIKRKNGGRGLINLFNLCKSITKLLRDYFYSLNTPLSYEIINSDNHFSGLNLKNRNLNCEQKKDLDINWKNKVLHGKHPTILDSNGIDKDLSVEWLKRGLLYLETEGFMCAIQDGVIATNNYKKHIMNLEVEDHCRKCNVPNETIEHVIAGCSYLAPTDYLRRHNQVCKILHQQLAKKVGLLDNFKPYYDYIPEPVLENESFLLYWDRLILTDREVSHNRPDIVLINQRDRNAIIIDVAVPLSKNVLTTEKEKIRRYEALAMEMMSVWGLTKIFIIPIVISATGIVSSKFKIHLSHLDLSSKVFPEMQKAVILETCHIVRKFLNAVT

SEQ ID NO: 18883 - protein, 775 aa, Cantharis rustica
MLHFWTNLWSQKSKYNKQASWIKKLKDDSTSLEWCENELITLEEITNAIKFSSNWKSPGLDGIQNFWLKRFKSVQLHLLFWYNEALNDPSVIPDFLCTGITYMLYKNGNPLEPQNYRPITCLPTIYKIFTSILASKIENHCKTNDVMCMEQKGCVKGSQGCRELLIVDTVITKLAKDNKRNLHMCYIDYKKAYDSVPHDWLIDILIIHKINPKIVRLLSSMMSRWNTNIMNNGKILESIKINRGIFQGDSLSALWFCLAINPLSTLLNDSTSGFRLNFRKNCTITHLLYMDDLKLYSRTEDQLQNLIESTKLFSRDICMEFGLDKCAKINIISGIPIANTDILNEIPQLLPNKFYKYLGMQQNFVLNQTFLKNEFKQKYIKKLKILLKSKLNSRNMISAINSWAAPVLSYSFGVLKWSNTDLNAMDTLTRKMLYKYRYLHPRSAVERLYIKRKNGGRGLINLFNLCKSITKLLRDYFYSLNTPLSYEIINSDNHFSGLNLKNRNLNCEQKKDLDINWKNKVLHGKHPTILDSNGIDKDLSVEWLKRGLLYLETEGFMCAIQDGVIATNNYKKHIMNLEVEDHCRKCNVPNETIEHVIAGCSYLAPTDYLRRHNQVCKILHQQLAKKVGLLDNLKPYYDYIPEPVLENESFLLYWDRLILTDREVSHNRPDIVLINQRDRNAIIIDVAVPLSKNVLTTEKEKIRRYEALAMEMMSVWGLTKIFIIPIVISATGIVSSKFKIHLSHLDLSSKVFPEMQKAVILETCHIVRKFLNAVT

SEQ ID NO: 18884 - protein, 1174 aa, Cantharis rustica
MERSASVNVSANIPTRIRNRDNEQVLEGSTLPLTLEPLIERTTNQIEPNEIITNSLSSGSMIHNERTAAGRIRRRIKWTKAMNIEVMRTFFETNTCNESPLPGWRKKFHMAMIEKFPNLDLSEQNVVDRRSVIIKKQYLSKNEMDEICRRVGNTIYQREHFEDELEIQIESENEIVPIENLDKTEIIHSDEIYKNIEADFLSKIELFDGTDPLTRPKIPNLQFSSYYKIKGIFDILDKIISVLLENHTSIYYIHLALYCAAAVITEKNGQTLITDIPINKKVKEPIWKTRLIKKVNNLRKDIGILTAFKSSFNNVAPRKLNQIFSKYKLNRQDTRFETQLNDNLDYLKQKLKVTAHRLKRYTSCTQRKFENKIYLENSNKFFRYLEPTPKTQNFPQQDNMLHFWTNLWSQKSKYNKQASWIKKLKDDSTSLEWCENELITLEEITNAIKFSSNWKSPGLDGIQNFWLKRFKSVQLHLLFWYNEALNDPSVIPDFLCTGITYMLYKNGNPLEPQNYRPITCLPTIYKIFTSILASKIENHCKTNDVMCMEQKGCVKGSQGCRELLIVDTVITKLAKDNKRNLHMCYIDYKKAYDSVPHDWLIDILIIYKINPKIVRLLSSMMSRWNTNIMNNGKILESIKINRGIFQGDSLSALWFCLAINPLSTLLNDSTSGFRLNFRKNCTITHLLYMDDLKLYSRTEDQLQNLIESTKLFSRDICMEFGLDKCAKINIISGIPIANTDILNEIPQLLPNKFYKYLGMQQNFVLNQTFLKNEFKQKYIKKLKILLKSKLNSRNMISAINSWAAPVLSYSFGVLKWSNTDLNAMDTLTRKMLYKYRYLHPRSAVERLYIKRKNGGRGLINLFNLCKSITKLLRDYFYSLNTPLSYEIINSDNHFSGLNLKNRNLNCEQKKDLDINWKNKVLHGKLPTILDSNGIDKDLSVEWLKRGLLYLETEGFMCAIQDGVIATNNYKKHIMNLEVEDHCRKCNVPNETIEHVIAGCSYLAPTDYLRRHNQVCKILHQQLAKKVALLDNFKPYYDYIPEPVLENESFLLYWDRLILTDREVSHNRPDIVLINQRDRNAIIIDVAVPLSKNVLTTEKEKIRRYEALAMEMMSVWGLTKIFIIPIVISATGIVSSKFKIHLSHLDLSSKVFPEMQKAVILETCHIVRKFLNAVT

SEQ ID NO: 18885 - protein, 1174 aa, Cantharis rustica
MERSASVNVSANIPTRIRNRDNEQVLEGSTLPLTLEPLIERTTNQIEPNEIITNSLSPGSMIHNERTAAGRIRRRIKWTKAMNIEVMRTFFETNTCNESPLPGWRKKFHMAMIEKFPNLDLSEQNVVDRRSVIIKKQYLSKNEMDEICRRVGNTIYQREHFEDELEIQIESENEIVPIENLDKTEIIHSDEIYKNIEADFLSKIELFDGTDPLTRPKIPNLQFSSYYKIKGIFDILDKIISVLLENHTSIYYIHLALYCAAAVITEKNGQTLITDIPINKKVKEPIWKTRLIKKVNNLRKDIGILTAFKSSFNNVAPRKLNQIFSKYKLNRQDTRFETQLNDNLDYLKQKLKVTAHRLKRYTSCTQRKFENKIYLENSNKFFRYLEPTPKTQNFPQQDNMLHFWTNLWSQKSKYNKQASWIKKLKDDSTSLEWCENELITLEEITNAIKFSSNWKSPGLDGIQNFWLKRFKSVQLHLLFWYNEALNDPSVIPDFLCTGITYMLYKNGNPLEPQNYRPITCLPTIYKIFTSILASKIENHCKTNDVMCMEQKGCVKGSQGCRELLIVDTVITKLAKNNKRNLHMCYIDYKKAYDSVPHDWLIDILIIYKINPKIVRLLSSMMSRWNTNIMNNGKILESIKINRGIFQGDSLSALWFCLAINPLSTLLNDSTSGFRLNFRKNCTITHLLYMDDLKLYSRTEDQLQNLIESTKLFSRDICMEFGLDKCAKINIISGIPIANTDILNEIPQLLPNKFYKYLGMQQNFVLNQTFLKNEFKQKYIKKLKILLKSKLNSRNMISAINSWAAPVLSYSFGVLKWSNTDLNAMDTLTRKMLYKYRYLHPRSAVERLYIKRKNGGRGLINLFNLCKSITKLLRDYFYSLNTPLSYEIINSDNHFSGLNLKNRNLNCEQKKDLDINWKNKVLHGKHPTILDSNGIDKDLSVEWLKRGLLYLETEGFMCAIQDGVIATNNYKKHIMNLEVEDHCRKCNVPNETIEHVIAGCSYLAPTDYLRRHNQVCKILHQQLAKKVGLLDNFKPYYDYIPEPVLENESFLLYWDRLILTDREVSHNRPDIVLINQRDRNAIIIDVAVPLSKNVLTTEKEKIRRYEALAMEMMSVWGLTKIFIIPIVISATGIVSSKFKIHLSHLDLSSKVFPEMQKAVILETCHIVRKFLNAVT

SEQ ID NO: 18886 - protein, 775 aa, Cantharis rustica
MLHFWTNLWSQKSKYNKQASWIKKLKDDSTSLEWCENELITLEEITNAIKFSSNWKSPGLDGIQNYWLKRFKSVQLHLLFWYNEALNDPSVIPDFLCTGITYMLYKNGNPLEPQNYRPITCLPTIYKIFTSILASKIENHCKTNDVMCMEQKGCVKGSQGCRELLIVDTVITKLAKDNKRNLHMCYIDYKKAYDSVPHDWLIDILIIYKINPKIVRLLSSMMSRWNTNIMSNGKILESIKINRGIFQGDSLSALWFCLAINPLSTLLNDSTSGFRLNFRKNCTITHLLYMDDLKLYSRTEDQLQNLIESTKLFSRDICMEFGLDKCAKINIISGIPIANTDILNEIPQLLPNKFYKYLGMQQNFVLNQTFLKNEFKQKYIKKLKILLKSKLNSRNMISAINSWAAPVLSYSFGVLKWSNTDLNAMDTLTRKMLYKYRYLHPRSAVERLYIKRKNGGRGLINLFNLCKSITKLLRDYFYSLNTPLSYEIINSDNHFSGLNLKNINLNCEQKKDLDINWKNKVLHGKHPTILDSNGIDKDLSVEWLKRGLLYLETEGFMCAIQDGVIATNNYKKHIMNLEVEDHCRKCNVSNETIEHVIAGCSYLAPTDYLRRHNQVCKILHQQLAKKVGLLDNFKPYYDYIPEPVLENESFLLYWDRLILTDKEVSHNRPDIVLINQRDRNAIIIDVAVPLSKNVLTTEKEKIRRYETLAMEMMSVWGLTKIFIIPIVISATGIVSSKFKTHLSHLDLSSKVFPEMQKAVILETCHIVRKFLNAVT

SEQ ID NO: 18887 - protein, 1086 aa, Cantharis rustica
MERSASVNVSANIPTRIRNRDNEQVLEGSTLPLTLEPLIEKTTNQIEPNEIITNSLSSGSMIHNERTAAGRIRRRIKWTKAMNIEVMRTFFETNTCNESPLPGWRKKFHMAMIEKFPNLDLSEQNVVDRRSVIIKKQYLSKNEMDEICRRVGNTIYQREHFEDELEIQIESENEIVPIENLDKTEIIHSDEIYKNIEADFLSKIELFDGTDPLTRPKIPNLQFSSYYKIKGIFDILDKIISVLLENHTSIYYIHLALYCAAAVITEKNGQTLITDIPINKKVKEPIWKTRLIKKVNNLRKDIGILTAFKSSFNNVAPRKLNQIFSKYKLNRQDTRFETQLNDNLDYLKQKLKVTAHRLKRYTSCTQRKFENKIYLENSNKFFRYLEPTPKTQNFPQQDNMLHFWTNLWSQKSKYNKQASWIKKLKDDSTSLEWCENELITLEEITNAIKFSSNWKSPGLDGIQNFWLKRFKSVQLHLLFWYNEALNDPSVIPNFLCTGITYMLYKNGNPLEPQNYRPITCLPTIYKIFTSILASKIENHCKTNDVMCMEQKGCVKGSQGCRELLIVDTVITKLAKDNKRNLHMCYIDYKKAYDSVPHDWLIDILIIHKINPKIVRLLSSMMSRWNTNIMNNGKILESIKINRGIFQGDSLSALWFCLAINPLSTLLNDSTSGFRLNFRKNCTITHLLYMDDLKLYSRTEDQLQNLIESTKLFSRDICMEFGLDKCAKINIISGIPIANTDILNEIPQLLPNKFYKYLGMQQNFVLNQTFLKNEFKQKYIKKLKILLKSKLNSRNMISAINSWAAPVLSYSFGVLKWSNTDLNAMDTLTRKMLYKYRYLHPRSAVERLYIKRKNGGRGLINLFNLCKSITKLLRDYFYSLNTPLSYEIINSDNHFSGLNLKNRNLNCEQKKDLDINWKNKVLHGKHPIILDSNGIDKDLSVEWLKRGLLYLETEGFMCAIQDGVIATNNYKKHIMNLEVEDHCRKCNVPNETIEHVIAGCSYLAPTDYLRRHNQVCKILHQQLAKKVGLLDNFKPYYDYIPEPVLEDESSLLYWDRLILTDREVSHNRPDGYCQNFLITNFKISTAL

SEQ ID NO: 18888 - protein, 1158 aa, Pristionchus japonicus
MTMILLVPIRAEEIICKLCAGHSPPTHRVFKAKSDLQKHLRLYHDGLLVTLKCRGCGLESDLKSLNKHAAACPALASLPSVPHPATATTAAPITRPRVPTGTTTTRTAARTAARVPVATVPPTPPPAPPSTSRTPARQRSPVSESSPSVDTSLSSIDADWEPEGNSSPVGSPLRDGTPETRDQPHSPVAASPRLSRRLSLPRALSPSPSPPRRLSIPPAPSPSCSLATARPISPPPSLPRPLPPEDWNRRIDGVTSLLELEALCLEIEKAVIERRPPDDRPAPSRPSRPRPTAARRPQRRGSGPPADPVQRAKDLQALYRTSRARAFQSITEDAPPHCQVPETDVFAHFLSTHSAPAHQPTPVPHRAPPRPRTTDPFLAPFTPSEVVARLRKATDTAPGIDGIKYSEWKRFDPGGKILAPLFNRVSRLGVPARWKESITTLIYKGGDRNVLSSWRPIALLPTLAKVYGNVLSARLTAWATTNRRISRAQKGFLPFRGCMEQNSLLQSPLQDARRRKKTLACAFLDLRNAFGSVPHSTIRASLAWLGLAPSAIDLLEGSYLGSTTRIRTATGPTAPVPIECGVVQGAPLSPIIFNLALEPMIRAATAANAGYSTHGHSISVLAYADDLAVLAPSSEGLQKQLDAISTMADWSGLVFNQKKCASISIKGKENTRVPFTLQGSSIPTLDHGEEYKHLGVPTGTTTFPSGTAAVAAMTTQLEKIDQSLLTPWQKFDSLRTFIIPQLSFHLLHGHVPKAPLAQLDKRIKRCAKRWLSLPARASNEILYLNFDQGGQSLLPLTLLADVSTIAHGVSLLHSRDPSVADLSARAAKEVAGLRARRTVTAPELADYLSGSTTGIYRTPTTDCNSLWTSVRSATRRLSTTVPVAWYAGPSGALFPSLNGSPLSPFSTQRTLISAIRSSLLKTLEAKPDQGSSYRTADVDPKLSNEWVKEGNFLRFCDWRFIHRARLNLLPLNGARRFDPNCDKRCRRCGAANESLLHVLSSCKPGFTEIKKRHDKLHDRLKKAMRPSPGVEIRHDLTIPGHSSLRPDIVRIDYKTNNVVIAELHCPFDNGTSTITRANEVKRAKYTPIIEHFEREGFTVVFHPIVVTALGRWWRGSTEALSALHISPRYAQLLRRLMVADSIQGSRNVYVAHVTGQVQ

SEQ ID NO: 18889 - protein, 934 aa, Torymus auratus
MPANGSALETSVEVDDGRVAIELSAREGDEALESRQISLPHEVAEEINSPDQMSLYKRQLLDNITSAVEVDPKWNELLNRIKHAASSECTGEHLDAIYDGMVSVIKGPGDSGEKSDDRKKGTRRRGRGKYPPTRAQKKAHFFARCQDLFNENPKKLAGLVVDNDFSLLKKSQPPDKNAVETIYKDLWGQAGPGAVDLGDDLEPEIEVGKILWPVKATEIREKLSRMASDVAAGLDGIKKSDLARKDSHIVLARWYNLLMIKMHFPRAWKSNRTTLIPKVSKDNGDVRNWRPITISSIISRIYSSLIDKRLRQNIAQNMRQKGFTAENGCYINTTTLNAAIRTAKITGGTFGVTDLEKAFDTIPHAAIAKALRRKGVPGQMADYVSGMFRNYSTKIKTDRGDVEIGLQRGVKQGDPLSPLIFNLCIEPLLAALQAQTRGICIDDGNEVSVLGFADDIVLLAKDTASARKQFKLTYDYLEMLGMKLSLKKCNAFEIISYRKTFLTRDPEIKVANEKIKYLKVDDSLRYLGAKIQPYKGLGQDFEIEKLEQLIQRVRSLALKPLQKIELLRVYLLPKLFYGLIIKPPAVTTLRAIDTLVRRECRLILHIPHCVCNEFMHAAKKDGGLGLPEIEQLVLIAALRNGLKAENSEDPVTRAVMATERCQKDLERFAKLLRLHWPATLEDVDRHKAKVKRNYIKRWKEHLVQGQGVEDFMGDPVANEWLKRPMVLKPSLVAKAIQLRTDTAGTRMALRHDPLQRNVIPSECRKCGAEHENLPHILGQCVNTKSKRIKRHDDIKDFIKSKVAGNWQILDEPRLNHQGKILKPDLVLVNETGALVVEVTVRFEKGKYLADAAKEKVEKYKALCPLVSTMFNRTKVEVAPIVVGSRGALPADTRSMLKKMGISRKGDWMTISLTALRHSILIMDRFIDYDADVVN

SEQ ID NO: 18890 - protein, 917 aa, Rhinocypha anisoptera
MFHPIMDLVNTDAPIQAAATQLTADRVNYKAEALCLQNCNNLLECQHYRVLVLYPKPKHQGRRPSQWSCPRCRLNPQSCEALTSHMKEVHNVIITLSCPNCQRENMGNLKKAAAHMLRCNRAPLITPLELDLLELSREPTEPLLPLLPNLTNDINNLPFSTFKALAIETLQGANQLNAMTDHLTAICKPTRPKRKRKKKKNSGNTTSTEQQVKRNTYLWRTSKSKLYSLIMKGDKSSNLNVANAESFFANLFSQSGSCEAEMVQTKPSDSITFKHYISPDNVADYLRKKSHSAPGTDGLMSNDILPRLAEWTILINCCLALNKIPQSWHHSRTTLVPKCDSDQASDHRPISVSPLTYRALTSTLATRLYQQIDLHPGQRGFIDDDGIHQAITLVRCLASRKTPMASIDLAKAFDSVPHCTLLKACRANGLDEESTSFITDIYTGATTELHLNGRKSQPISLNRGVRQGDPLSPMLFNLVIDQLLRRLDTCNIGTKLGNQQLSALAYADDLILCADSREDLHNLLAIANEMLRKLGLTINWNKSFSYSADIGLPIKQAFKYLGANIDTTGNSRMEPEDLLDQIQTLHRGILRGNQKIYFLRFHLIPAVYHRLIHEKAIGKTLEKMSGLIRNTVRCWARLPASTCNSFLHLPMRRGGLGIQDLRRDVPAMTRDRLTRLQQCSTWYIQWLIGTNWYREELTRVTLLCTEENAEKWHRDNLHDISTGFENYAEGGNRFLNRHLSGAGCLKGQQFYRFAQLRALADDHKARQHRTILTCTNCSLGLDATLQHSLMSCHGNTEIITRRHNVVVKILADFLERSGHRVKREFRLPCGLRPDLIVRTPDRKAFALDVTIAYELTAKSLDLAFREKVEKYSPHVEEIRAAADAGTLHFAPSICTLAYGVVFGAIHELNDFSVVPIL

SEQ ID NO: 18891 - protein, 1333 aa, Hirudo medicinalis
MEDTTATRAVWRFFVPFNGEEKLCHKCPDHKPFADHAGLVRHLKNIHKITEVTFNCRSCQQSSTSLKEISAHIKKTHPDSLTTASVQARQPTQRHQKSRSCSIQSAAQVSTPLVSGSTFSPHTTNTAAQPDNTVSTTSVVPAPALETAPSSSGVASITTTVSKRGPRSHTSKSRSLTSSEDNTVPQPNTAKVQQRHRQDCSRSSVSSAAEDRLPQVDPHPLASPKNQTLQAISLGGETSSTVFPTVTTTALPAPLYRANIPDVNVSFAISPHQQEWVDAINEVHDQQELDLFMDTLTTAVRQAVQCHSGGHIQTTTRPRPPPATRQPSFDPKQAARIQRTYRNNKRAAFREITEAPGPRCEISYEEIADYFAPGHDKTSVSPSGQEPDEEIWLPEGREVEFIDVLEAPFNIVEVWSRLKSMSNTAPGPDRIRYIHWVKFDPHAHILCHLYNKCRELVTIPGSWKNTSTILIYKKGHLTSPSSWRPISLINTVAKIFTGCINRRFLVVIEKHKLLSPAQKGFLQSEGCLEHNFILQSSIQDAKRRRREISIAWLDLTNAFGSVPHSVIFDALRNKGFHPNTVRLITNLYKGSSTCFALKDGFSTPTPTVLGVRQGCPLSPILFNFAIDGVLRSLANRALTHGYCLEDTPVVVLAYADDLTIVSKDPFHLQELLDVAGSEATKLSLTFNPSKCSTLCIDGQKHEALPSRFLIHGGHPQVQDSTDQFRHLGVPTGYTSFIDLSESVAAIRRDMVKLDDSLLAPWQKIDATKVFLLTRLSFLLKSGFVLKTMLGELDADVKRFARRWTSLPTRSAVEVFYLPCREGGLGFFSVKTLADVARIATTKLKAYISVDWSCGTGDVELSVDGVTKAPNKMEAWCKVAVREALWRCLARKKDQGKVLAVARLNPESNFFISDGEFTRFQDWRFIYKARLNLLPLNGALKFDSERDKRCRKCGYENETLPHVLNHCEPHYPHITKRHDEVLYRLRKALPPGPCPRINCQVPETNSSLRPDLVIFNREEKKVLVVDVAVAFDNEKQALDDARQEKLTKYSDLAHELRRKGYEVQLEAFVMGSLGSMLPENHRCLRVLGIKPSYARLMLKLMVMDCIRWSRHIYVEHVTGCILEEPKRRRLKSAGHPPVGHPTAAITEEVVVHTTRLPTDNNKQSYKSPHSTPHTATTQFTPSPLAMTSYKEDPLPPGTSHKQPLSTPTSPPPLTAPEPPDIADSGNKKVKIVQQLQPAPPPSEAPSNDDDTTTTGTQTSTELTIENHHQLDGPSALPLLPTSSRPSPSTHPSDSQPAARDRQPEESHLDTTVDYLLDEIRDLTIADTSRDDDCI

SEQ ID NO: 18892 - protein, 993 aa, Triatoma infestans
MESELTHTCEVCERAFSTVTGLGLHRRRAHPVEFNRGINVDRCKRRWSPEELQILAENEARLVREGVRQGLALRLVGLSHGRTVDSIKGVRKRADYAQLVATALSEGMMGEQAGAAGSDEVMTVAPRGDGNGYEEALRSALRNDLTILSGLARRCDHAERLRTAMETVLRNGDPVEDIVRWWRGLQGGDLEPGEPGRGLRSGAMERSAGPARPSSRQLRRREYAEIQTLWKRDRKAVASRVLGGGRDLGNQTMEDMVRYWAPLFEAESTPWGGETEPMVDMWSLDDVFGPVQDTEILDARPRLSTCAGPDGIEPARWNALPLVMKRSLFNCLMLHGQLPEQLLMADTVLVPKTSLPGDSGGYRPLSVTSVVVRHFHKVLAKRLGGLCGHERQQRGFIPGLDGVGDSVVRLNAILRRAWRSRRSLVMVSLDVSKAFDSVSHEAIIVMLRRRGAPTGLVEYVRRCLSRSSTRIRWRGERSGPIRVARGVRQGDPLSPWLFNMVMDHVIRSLPERVGFRFGAPGQRVNAMAYADDVMLFAASEVGMRALLASAESALAECGLSPNSMKSWSLCLNPSGRQKLLKVDVGVSFSLAGVNVPAMGIADTFRYLGVEFGVSGVGEAAPKIGEDLKRIHRAPLKPQQKLVLVRDHLLPGTYHGLVLGRVRRADLRRLDVQVRAFVRGWLRLPHEVPNSYLHAPVALGGLAVPQMERLVRVWRRLRLERILSRWEDDEGEELGEGTMEVSDEASTDEVRQAQARDLYRRVDGGDLAESAKCRASYGWKLEGAVALSGREFVQFVRLHSGCLPSRMRVSRGRRGRAGALWCRAGCSRAETVAHTIQVCPLTKGGRILRHNAIVRLLAGAFERRRFRVHTEVSMTLRGGVVRPDMVVARRNRAWVFDVQIISPGNRLAAANQLKKQKYDTPEVRGAVTALTGRSEVGVAAVTVSWKGIWCRRSALDLKELGIRGKVLDWVTERVLRGSHIGWTRWNQIRAGRGG

SEQ ID NO: 18893 - protein, 967 aa, Aurelia coerulea
MDERAIPCGLCNLNGHQSKRRLWATCARCHIRYHGHCVGLSGKQIQSLPNWRCPGCTGHVPISQPTSGDTDYTNAPTNLAGLYDALRGLKTVRRIPRSARIYASQVLTTVLSRINEDVDSWIPLLAFPVALIRPPKDKKVSLTAKVKRNIRKFEEWLADRTHSVLNLFENPNDPTRKKAYQDEERLKRAIKSKIDSFNIRAAARLASSDDKVAPQNPESLRKLQEKHPKGSLITETLTTADPIAFEPEEVRRAIRSFQSGSSAGPDRLLPDHLKDLISANGNSQRLLEELCRVVNIICRGGTPSQIRPFLFGANLTALLKADGGLRPIAVGCTIRRLCSKLCARSGIEQTRELLYPNQVGCGTPLGAEGAVHSARRFMTTNEVLVKIDYKNAFNSIKRQAFLDAIAQHSPSLYPFINQAYSRESTLFFGDSTLQSSEGIQQGDPVGPLLFCLALNPLVKRMTSHYNTWYLDDGTLGGNLEDVRRDITILTQSSSDLGLTINPQKSEVYINPAVSDLRREEITETLNGLLQGVRIVPPKELTLLGAPLTAEALVPTLGKKAAELRRLIGNLRLLDAHDALYLLRHCFALPKLTHILRSSPCFSCDLGIFDREVKTALQTLLNVDLSDEAWQQASLPTSLGGLGVRKATDLALPAFLSSAHSSRTLTEALLPPDSRQRPDERLCEAIFIWPHEERPEKDAQAKQKSWDKIGSLAVADSLLQQSHSMADRARLLAARSPHANSWLEATPVTPLGLKLSDSEVRISVAHLLGSRICHPHKCVCGSPVDEHGTHGLSCAKNSGRYTRHAEANDIIKRALESAQIPSQLEPNGLERTDGKRPDGITLSPWTRGRPAVWDFTCSDTLSASNLKRTCLEARGAANHAEEEKMKKYESLSPHYQFVPIGVETLGAWGDSAHHFISAVGRKVAAATGEPRAATFLFQRLSVAVKRGNAAAVISCLPRSQDMSEIFYL

SEQ ID NO: 18894 - protein, 1201 aa, Teleogryllus occipitalis
MPTPQPPYSHKSNQGSESRTGTHKKPGNIKRQRRDKKNRNINNDRQSSAGQTDRGQGSEHASTSHQRAGPDIPASIEEYRGPSQLPRFGPDLQPIWHNGYILFPKPSAMLVRCPCCDTRPFTTGATSWSSRLGNLKRHVRDRHSNIEAVRKICADCRSELVNWGTHSQTCRPLRSIRTPQGGSIGPLLRCIHSGCGAEFATQHQLKQHNRKHTRDAMVRTQAIDPPRTARRERQIRANIRANVAPAEEENIEIEHTNEVQQQESEDQQAIFPQIDDHQMVGRLSSQLEAMRGELLNAAGPCATANGWAHIEEVIEKITKQVQDECKIPPASEYRPAPPQRQKDRRLNELADASRTYRRNPRKAIRLITKTEGPRCAIPAQTLAQHFTQTPPPDEVLEGIYEETTRDSLELRHFEAAEVAARLGECSNTAPGDDKIKYSHWKHIDPNGRLLTAIFNTCLKHRKIPTSWKRSKTVLIHKKGDPSNPSNWRPIALSNTIAKLYASLIARRLSNWLEENEVLCPQQKGFRPSDGVREHNFMISKLIKDSREGHKDLAIAFLDLTNAFGSISHSAIMEAVKCTGAGNVLNEIIRDMCSGASTQIMSADGMTEPVPYHQGVKQGCPLSAILFNIAIDSTLRRALALSDSPIPGGAYADDIWLAARNPDTLQRMINMIADNGSGIGLSISAPKSDTMQLVGGVASTGRQFYVNNFPLKTLSGANTTRFLGKPIGHNSIPDSSFLQEVTTEMELIRSAKLAPWQKVDALQQFLIPRLPFPMSLDIIRKKEAHAIDNHIRAFAREALNLPQNSSVHYIYTAREDAGIGLPEISRETDVASVDAGFKLLTTKDKIIRREAADDLRRATSQRMGIQEPTVADIANYVNGSTRVNHVGNRGIWSRARVATKNLKIRWTFEENNGELKPSIIVENTEDNLSMILPHQRHLVIRKLRGRYQKEHFLAWRTQPDQGRATNALAVRGSRSSYFIRSGEFLRWKDYGFVHPARLNLLGGLRGNRPWSRRSREDQACRRNCNRDGTSPPRETLAHVLNHCDMPAVNKRHNEIVAHVKAAAVNNSWEVVAENQVWGPHGLKPDLVLQNRSASELLIVDVTCPYEGSRTSMGKAREDKLRKYAPTLAHAKGITRSAKILPIVVGALGAWDSENDAALKVLAHKSFVNTLRKATIAAAIRHSRDIYDRHIGNQSARQPNSRE

SEQ ID NO: 18895 - protein, 1072 aa, Limenitis arthemis
MTPAHVTIEGATIVILLPIPTTSNVKCPLCNSRGLYKGGRKIENFVRHCKEHHRVLNIKYQCARCSYVAPGNAKYPKKVVTAHCLECVPEITPTTAAGRDQPRRNAIREQIGVTQTSQHQLTNQEITANSTTQLDAPLATPDADTEQALISTQVSNEQTHASSVNVSNELPATLQEPVDSPLTPNETDVSNDLPATARDSRYPTQDQKHLVHILDSATDADQLKTASEQVVQFMSRLKARSVRPTPRRPNRSQVTHISTDRVREATQIQRLYRNNRKRAMQQVLSGPLKGCDISLNQLEDHFKTLGAPRHGEEFWPDVFGQNVEDHIIDSDNFLSAPILRDEIGEILKSRNNTAPGPDGLTYGDLRKADPGAYVLTALFNAVWRLELAPDGWMESRTTLIHKKGNVNDISNWRPIALGNTCPKLFAAVQAERLKRWATSKKCFSRAQKGFLEFEGCFEHNFVLQEAIRDAKDNRKELIVAWLDISNAFTSIPHSSIARAMNGHGVPEKVRKITAALYKNSITRVHTQNGISGPIMMNTGVRQGCPLSPVIFNLTFEVILRTLEKTGEGIDVEENHISSLAYADDIALITDTVGCMRRQLREAEAAVQAVGFHFNPLKCATLHITPNGVMPTVFSIRGEPLKALGPNESYEHLGIPTGYQIKQTPVATIKELISDMRKLDDSLLAPWQKLDATRTFLLPRLDFVMQGSSIEKEHLGETDKTISGMARGTLRETVSQRLRKPASDVDAGRYLSGDLDFPRSTTRTSFWAKVRQSTQRIQSKVNVRWFWSEEKKEMTIQWGQSDIITPNTKSLTYRLLRLSLMQYYMENLQQKPDQGKVIAVTSKCNHSNHFLRGGRNMRFCDWRFIHRARIDVLPLNGTKRWQRSTDQRCRRYGTTKETLPHVENHCGAHAAARQKRHNNIQNRLVKASRHPGNIAVNKRVDGVRGEAASLRPDIVIRDNTSRKIIIVDVTVPFENRATAFDAARRDKLSKYSPLSDQLRQQGYSVEVEAFIVGALGGWDRRNERVLSLLKVSRQYAGMMRRFMVSDTVRWSRDIYVEHVSGIRQYLEDTIDSE

SEQ ID NO: 18896 - protein, 1139 aa, Adelognathus sp.
MARLEVQYAGCHINKHLVSLMPHRTLEGIKSKRLRPDYKELVAEFRAGAPEVIDIEDEILGAVDQEEGDVAVVTGASQDDRLSNSAIVEENLVDVALLVDSIVQSRTPPNQHRTSIDEPSIRMAEALSSTMRSDHNITLTTSTPPSENQHRDSTDPPIQEYALNLSMQGTQHRSTPPHDQRNRINPSSQEHAPDLSMRNTQQLNATPQSLLADLLLNVSNLDPEAAPFEPAHEQTQAPNNTNTQLVIATQDPIRVYLQDYIAQQVEWDERDATLAEIFSREFSGVLERSQALNDWLDGIYPVPRVDHQQPTGPQADRQTGRSRKKKKSRYKNPVVAEQGARPYERGRDRALIFKKTQELYQKNRSELARCILDDKPINTDTEHPPFNELVEKFQGIFSDESPPDEHPIADQKDRVDNTYRAITPRDIEWALQSTKSRSAGPDGLRITHVRKIPTRKLVLFFNLMLLWGSVPLRLKSCRTILIPKNNDTRNADNWRPITVSSILLRLVNKIVGKRLRDLPLHHLQRGFRKIDGVLLNNMSLDCLVRKRRQERRPYSLISLDLRKAFDSVSIHSVIRAMKRFEIDPRMQEFILDGYRNSYTVLQLDGNNSEPIRLSRGVKQGDPLSSDLFNMVIDEMICLLDESGLGITANVQRIPCLSYADDIILIGPTVKDAQLLLRTASRFLEQRNLSINAGKCAATSVGVVPGKKLLYTISRNTFHVNGQLIPQKNAGEFFKYLGVQIDALGIAKPDIEDLKLRILRIEKSPLKPHQKLCLVKAYLIPRLQSRLQNPRVTIGLLKESDKLIRMTVRKILHLNRTCADAFIHAPAKLGGLGVQSMRAMVPVILKDRLINIATSYDIYANDVSTLEEFQRLSEKLDRWNRLYGNSSTVINRQWGEKLEVSYSGNGIIQGSCNKHSSSWIDSPPPFWSGSDYVKAIQLRGNLLPTQGIPSNPPEQRLCRAGCPHRHETLSHVLQSCPTSHWTRIKRHDRIVHLVKKLSADAGWTVEVEPHIRCENGLLKKPDLVMTRGDETMVCDVAVAWEGPNSLAATHQHKIATYSDDQMMSALTRRYEGNQISITAIVVGARGTWCRNNDRAIKILGLAQHNVREIIDATINGSIIMHREFMRAVIYRAEGQRRERQ

SEQ ID NO: 18897 - protein, 1023 aa, Papilio phestus
MEKKPFVAHTVVSLATARSNVPLYKLHLIAATVLTQATMNPATTPSISVVHSASKPTVESLETPTGKQISIKPMMDPVHHTNLADSSAATLCADRVNYRAEAICFNNCDTLLVCNHYRILTMFPKPKYIGRRPSQWRCLRCTINPQSCEALCQHMLESHDVEITLTCPNCHKENLGNLKKAAAHLRHCNRTPVIAPPDLDRLDLSQEEPLPALPLVPNLSTDVNNLPHSTFKCLVTETLQGVDQLNAMTDHLTALCKPKRNKKKKKRRQRHATGQVERQMKRNMHYWRTSKSKLYSIIMKGDNESNLDLNEAQEFFTGLFAESGTCEAELLQTQPASSISLKYYIRPSEIEYYLKTKAKSSPGTDGLTTRDILPRLSEWSIVINCCILLNKIPLSWHQSRTTLIPKSNSNAPADHRPISVSSLVYRAMAAILSKRLSHSVVLHPSQRGFVANDGIHQAITLVRYLASSKKAIASIDLAKAFDSVPHATLLNSCKASGLDNESVSLIANIYSEASTVLQVNGRKSRKIPLNRGVRQGDPLSPLLFNMVMDQVLRYLDNCNIGVKLGNRILSAVSYADDLILCADSREDLHNLLSVTNHILTKLGLRINWTKTFSHGADIGLPVKNSFKYLGAYIDTTGSSRMESKDLMELVNKLDRAVLRGNQKIYFLRFHLLPAVFHRLIHEKSIGTTLEKMSGQIRDITRKWARLSSTTCNSFLHLSIRQGGLGIQDLRRGIPEMARNRLTKLQNSSIWFIQHLVKSAWYTTELTRVQVLCTQNSTQQWHRDNYNDINPAHETFANGGTRFLNRHLTGAGCLEGQRFYRFVQIRSFSDDHNTRHHRPQPTCSSCSLNEEATLQHVLMRCTNNTEVILKRHNIVRDILFEFLKKNGLNVKKEPRLPCGLRPDLIIRTPDRRVFALDVTIAFELSKDSLDLAYQSKIAKYTPHLAEIKAVADEGTLTFAPSSFALAYGIVFGARGSTHRQSLNILERHLQVPRWLIERMLAEVVRHSIDLFVHSPTASRDHLFT

SEQ ID NO: 18898 - protein, 1023 aa, Graphium evemon
MEKKPFVAHTVVSLATARSNVPLYKLHLIAATVLTQATMNPATTPSISVVHSASKPTVESLETPTGKQISIKPMMDPVHHTNLADSSAATLCADRVNYRAEAICFNNCDTLLVCNHYRILTMFPKPKYIGRRPSQWRCLRCTINPQSCEALCQHMLESHDVEITLTCPNCHKENLGNLKKAAAHLRHCNRTPVIAPPDLDRLDLSQEEPLPALPLVPNLSTDVNNLPHSTFKCLVTETLQGVDQLNAMTDHLTALCKPKRNKKKKKRRQRHATGQVERQMKRNMHYWRTSKSKLYSIIMKGDNESNLDLNEAQEFFTGLFAESGTCEAELLQTQPASSISLKYYIRPSEIEYYLKTKAKSSPGTDGLTTRDILPRLSEWSIVINCCILLNKIPLSWHQSRTTLIPKSNSNAPADHRPISVSSLVYRAMAAILSKRLSHSVVLHPSQRGFVANDGIHQAITLVRYLASSKKAIASIDLAKAFDSVPHATLLNSCKASGLDNESVSLIANIYSEASTVLQVNGRKSRKIPLNRGVRQGDPLSPLLFNMVMDQVLRYLDNCNIGVKLGNRILSAVSYADDLILCADSREDLHNLLSVTNHILTKLGLRINWTKTFSHGADIGLPVKNSFKYLGAYIDTTGSSRMESKDLMELVNKLDRAVLRGNQKIYFLRFHLLPAVFHRLIHEKSIGTTLEKMSGQIRDITRKWARLSSTTCNSFLHLSIRQGGLGIQDLRRGIPEMARNRLTKLQNSSIWFIQHLVKSAWYTTELTRVQVLCTQNSTQQWHRDNYNDINPAHETFANGGTRFLNRHLTGAGCLEGQRFYRFVQIRSFSDDHNTRHHRPQPTCSSCSLNEEATLQHVLMRCTNNIEVILKRHNIVRDILFEFLKKNGLNVKKEPRLPCGLRPDLIIRTPDRRVFALDVTIAFELSKDSLDLAYQSKIAKYTPHLAEIKAVADEGTLTFAPSSFALAYGIVFGARGSTHRQSLNILERHLQVPRWLIERMLAEVVRHSIDLFVHSPTASRDHLFT

SEQ ID NO: 18899 - protein, 975 aa, Ophraella communa
MKWTGTDPNKRTRIPKLQIKAGTMEKIKELNKFLREYINENSSLEQTHCLIYCAALTITELNQRVTLNNNSTKKIVHPWERRIKNKINKLREDIGRVTQYIKGNRNLKMLKKIEHIIKNQENINTCLDNLKQKLKVQAARLKRYTKSNKRRQENKLFDTNEKQFYRNLNECTIEQQNAYPSKTEITEFWNSIWSHENTHNATAQWIRDEEQKHANIESQVELNITVRELTIAVKKVQNWKSPGPDNIQNFWYKQFTSLHEHLAKTINHIIHNPIDTPKFLTAGRTYIKPKTQNTQDPANYRPITCLSTLYKIITSIIASHIYKHIDDNNIMTEEQKGCKRGSRGCKEQLIIDSVILKQAEKTQRNLHVCYIDYQKAFDSIPHSWLLHILRIYHIHPNIINFLQFNMKLWRTEILLNTPSLKLQTSQIFIKRGIFQGDSLSPIWFCLSLNPLSNALSNTKAGFNIRVSGNTLHTINHLFYVDDIKLYAANKAQLDALIQQTENISKDIHMNFGTNKCKILNVERGRWKEGESYMTDTGDIIESMAMNETYKYLGIKENTKIAHKDIKTQLKRTFENRITQVLKTNLNSKNLTKAINSYAIPVITYSFGIIGWSDTELDSLNRTIRTHLTKYNKHHPKASMERVNLPRSAGGRGFTDIKEACKKQCYNLRTYFKNLSQTTLFRAILAADKNYTPLHLSAQGEEQAYDEKQHLLTKQENWSSKELHGRYYHQLQQTHINKALSVSWLKKGWLHPETEGFIVAIQDQVIHTRNYAKYILKDNLESDKCRKCNSFPETIDHITSGCPTLANKQYIDRHNDVARIIHQEIAHKYHLIIQKIPYYEYKPNTVLDNAYFKLYWDNPIMTDKTIPSNRPDITLVDKKQKTAYLIDITIPNTHNLQEKSNEKINKYIPLAFEVKRIWNLNKVSVIPIVLSSTGVIPTTLTDNLKQLELTEGIIPIMQKAVILRTCNITREFLNLE

SEQ ID NO: 18900 - protein, 915 aa, Ophraella communa
MTNNHEPAWKKRIEHNIHNLRKELSLLAPTNLNLQSRTKAKRAAVTKKYCRDGKIDQARAIEVIKEKIMASTQRIRRYIKRNKFFIQNKTFENEPKRFYREIRGKNTEWNEVPKKEMVHQFWSELWETEERHNEDAAWIQREENRTRTTPLMDDCTVTQHEVTEALKRTGNWKASGPDKVTNFWLKKLTALHSHLAQALSNIIQNPEKAPEWFTEGVTILIPKNKNTSEACNYRPITCLPVLYKLTTGIIAKKIYKHLVQNQLFPDEQKGCAKGSYGCKELLLLNKLIIEDSKKKTKGLSMAWVDYRKAYDSVPHSWISRILQLYQLDPNIVKFCTETMKYWKTKLLLTPPNQQHIETEPINIRRGIFQGDSLSPLIFCMCLIPLTEELKASCKGYKITPGSVISHFLYMDDLKLFARNKNELKELLCIVKKFSKDIKMQFGLDKCAIAVINRGRLTQTENIIIDDETEIESLEPGMSYKYLGVEERDGIDHETMKTRLRGEYTTRLRKIAQTELTGRNKIMAINSLAVPLLEYSFGIVNWRKEELQAIDRKTRKMLTINKILHPRADVDRLYVPRNDGGRGLRQIESAYKTAIDGLAHVFETAESGLASQMKNLADKLGNKIFTRANEIKDTYNISKTETNITTIKNYIKKGSLDELKRKWEDKPLHGQFPQKVKNRTISKEYSFGWLSDGKLKGKTEALITAAQDQALRTRYYEKKILKTINHDEKCRICGIGEEHIDHILSGCPELAKREYLMRHDKVCDYIHWALCNNFNIPCDRKWYKHQPEDVTYRDGIILIRDQQIYTDRHIEANKPDIVIRDDNGRKCIIIDVAIPADHNIKAKEAEKILKYRTLALEIKRMWNIETEIVPVIVGALGLVSNKLPTYLGKIPARLSIKEIQRTALFGTAHILRKVLE

SEQ ID NO: 18901 - protein, 1235 aa, Clytia hemisphaerica
MEKWTPPRGPCMGSKYGVATRRYTKLRKENLQPLASKVKMEPIFMEMYKIEKNRLGIAVQHTVDAKQSEPPGSEVQGNTSDSGVSKLPKNEENDIEIGVESKQDGKGKNRGGRGRKSQKWTREERRVLWECFIRSGGTEVKGYRDNIVEMWNGRDLKVRTRASVLAQVKEIQKGGKLSAFDMREIEERVLREKNGEYSENDVDFTVVGENKNVSPHHDTTNVGGLPDISVVVERLDCVKKEGVVRMLSDEEKLVLERLRVVFNSEEQVPIPTLKGKDNWLIMREVSLINGFLSNISPFCKDVSFLNKLLYAGSYVVCERLGLMKKKGPAPSFRKPWWQRRLERTIDQWRQDLGRVLEIRKGVQLKEKVIKELERRYQLSERGRTTVVTFLKNKIQAASTKIKNFVKNSITTRQNKLFQTNQSRLYKEFAGQTSRQNDPPNSEEARVFWEEIWSREGKHQENNAWLKDIEEAHSELEHQRDIEISLSDVKKGIAGMKNWKAPGPDGVRGFWFKKFTSIHDSLTIALNNCVKEGSVPGWMVKGRTVLIQKDPAKGTVAANYRPIACLPLMWKLLTGIFAGKIYEHLETNDLLPEEQKGCRKKSRGTKDQLLIDKAVLKEAKRCKRNLSMAWVDYRKAYDLIPHSWLLRILDLTKVAGNIGKLIQNSMGMWRTELTCNGERLCDVNIRRGIFQGDSLSPLLFVMAMIPLTTLLRRESFGFKFKGNETKINHLFFMDDLKLYGKSESELNELMSVVNRFSSDIGMEFGFEKCAMVVLKAGVRIESEGIELPSGEKIKELEDNGYKYLGVLQECGILHKEMKEKISNEYISRVKAVSKSFLYSKNLFSAINVWAVSVVRYSAGIVDWTVKEMKDLDIKTRKILTMNGIFHKKGNVNRLYLPRSVGGRGLISIESCVKIESLNLRNYLFDSTEPLLQAANKILYPKDVELKGKGVVDQEVYWDGIEQTRLETGKEFKEQEIEEKASEVFMKPMHGEWFRNVGENVSQRTFDWLKKGYLDKRTEGYIFSAQEQALQTNWLKSRITGGEVDRLCRKCKEFPEKVSHVVSGCSKLAGSAYRKRHDRMGLRVYWEVCKNHGIKCSEKWYQETPDSVRVSSCGKFEVWWDRKVETPKELEANRPDLVFIDKEKKHWTIVDFSVPNDANVDKKEQEKIEKYTPLAYEIRKMNHVTVKVIPLVVGALGVVSNNLEKYLSYLDISYIQTCMQKSAVIGTTAILKKVLNS

SEQ ID NO: 18902 - protein, 873 aa, Paramacrobiotus metropolitanus
MSPQATPYKHGQNFSSSATPLWDNQKHLQVNENRCPFRMLSVVISRTRFPPEISLEPQKTRKTADPDEPSLLRKRVSRKLQDGNVTGAVQQLISEETVMPPSEQTLAALKEKHPQNPPISRPPPGVATPMPSPITAAEITAAIRAFPNGSAAGPDGLRPQYLKEMLAAKNREVTKNLCSALADVANIMLRGEVHPEITAILYGANLFAFKKKDNGVRPIAVGLTIRRLVSRIVSYRLRHLKSELQPLQLGFATKGGVEAAVHGARCFIENAAESDKVQAFLKLDVRNAFNSLDRNKILEAAEEFLPQYYRYVWQCYGSPSVLLHGTYRVSLQAGIQQGDPLGPLLYCLATIKPHRHLKSKFSESFLDDDALGGDPEDVYDDLYTLQEELKKSGLHLNIAKCELVVIGGSDTERQRVTDAFVQSFSDLQFPHLDELSYLGAPLRNDAVAGTLVAETEKIAKMTQRLTLLPAHHALFLLKCSMGPVRMIYRLRTARCYLQPDLLRRFDRMIIGCLCAVTNVEITDAIWMQASLPVAQGGLGIRSIEKLALPAFLASAYSVAKLTCEIVDFDPERYCRGAVVEWQRMSGADLPTLETRKHQKTWDEPVIQGSTEALLAAAQSDMSSEARLRGVSSKENGAWLEALPAASLGNFLNDTTLRIAIGLRLGVPITIPHRCICGEWVDSRGYHGLSCKKSRGRMSRHSCLNPTLKRAFSSAGIETELEPPGICLTNGMRPDGVTLLPWERGKILTWDATCVCTVALSHIVATSKQAGAAAASAEQDKVAKYRDITPDYMFRAVGVETLGPLGPDASRMVTELGQMIRAETGEIRAIEYLRQRFSIEIQRGNAASVMGTAPASANLDEMFSIIRPSISVVG

SEQ ID NO: 18903 - protein, 970 aa, Paramacrobiotus metropolitanus
MTNPLQCPKCQTVLTSANYLANHLKKPPKYCKRAAEQRLRSQQARRSTTPTTQQRASQKDLPARLAELRELVHLPDHIPKSVRVIVAEALNSTLENVASSNSIEAWTDLLVFSYATLGQPKAAPGERSDMTYPNVIRQNLQQKNPPEANQGEPRRQAQPATDPEDPVRLRKRVSRKLQDGNVAGAVQQLVSEESVMPPSDDTYSQLLGKHPQNPSNVQPPSGVATPLPPPVTPAEILEAIRAFPNGSAAGPDGMRPQYLKELTTVKNQETTKKLYSSLAGVTNIMLRGEVPLEIAKILYGANLFAFKKKDGGTRPIAVGTALRRIMSRTVSFRSSHLNSVLQPVQLGFATKGGAEAAVHGARYFIEDAINGDRPQVFLKLDVKNAFNSLDRNRILEATEEFLPAYSLYVRQCYGEPSVLLHGGYQISSQAGIQQGDPLGPLLYCLATIGPHKNLKSKLKESFLDDDALGGDPDDVYDDLCFLKEELEMRGLALNIAKCELAVVGGTEDERQAVITAFLQSFPDLQCPQLGELQYLGAPLHDAAVAGALTTATAQIARIVRRLKLLPAHHALYLLKCSMGPVRMTYKLRTARCYLQRGLLTEFDVMIRECLSAITNVNITDVNWVQASLPVAEGGLGIRSIEKLALPAFLASAYSVTRLATEITDFDPEVYCGTAEAEWQRVTEADLPAVEARKFQKMWDEPVIQTSVKMLSEKAQSDISSQARLLGVSTKDNGAWLDALPTASLGNLLNDSALRIAVGLRLGTPIVTPHRCICSEWVDARGYHGLSCKKSRGRKSRHSSLNATLKRAFASATIETELEPLGISRTNGKRPDGVTLVPWERGKMLTWDVTCVCTMALSHIAATSTQAGAAAAQAERKKIGKYQNITQDYLFRAVGVETLGPLGPGASQLITEVGKMIRQETGEVRATEYLRQRFSIEVQRGNAASILGTAPATANLDQMFSVIRPPVSAVC

SEQ ID NO: 18904 - protein, 918 aa, Homalodisca vitripennis
MEWAAFLATLEELVTSLSPAPIPSRQPRPGGNRPSRPRRPRRDGDRDVREAARIKNLYRTAPKRAMREVLEASSPICFIAEEAIMAYFTSSYSAKVGCAVEPPPGCTIPAAASPPPLLDRTEPREVAKMLRRTANTAPGPDGVKYGIWRRRDPSGHVLSAIYNICLAAGRFPPSWKVSSTVLIHKKGAPDEITNWRPIALSDTAGKLFCSVLAHLLSSWMSDNRLLSWAQKGFTASEGCLEHNFVLQELLAEARRRGGELCVAWLDLANAFGSVPHSAVVAALRSAGLTEAQLALIKDLYEGSATTIRHSGGVTPAISFQAGVRQGCPLSPVLFNLVMEYLIRPVLALEGEHGVSLHGERVSVLAYADDLAIVARSEASLQALLDSASSAATWVGLRFKPEKCATLHVAGRTVRPTAFTIYGSPLRVLEDGETYDHLGVPTGMRGDQTPVATIARLEEETAKIFASGLAPWQKLDAVRTFIVPQLDFNLRTARIKKTSLKGLDSLMRAEGKRTLGLPSRASVELVELPPSWGGAGLLPISDQADLAAVGHAFRLLTSPDPRISRLALEGLAVSAGHRSAARVDVGRLVDYLNGDAAGNSNVTTTFSAARTARNRLSKRLPTLRWGWSEERRTFQMTMPGTGRPITVDGRSRKSLASALRRALQLHGRVTLAAKPDQGRVARVVTTCPTSNHMMRGGRHTRFADWRFIHRARLNTLPLNGCRRWGNEDRRCRRCGRYDETTAHVLCHCLPMMPVITRRHDAILELLTSEIRGHPQEETRLDKRVPFQELVPDVEVPEEVASCRPDIVTIDRRNKIVRVVDVTVPYEDGWQSVTTARERKVEKYAPVARLLSAGGYRTTVDAFVVGSLGAWDSANWTTLSRLGVDRRRGAALARRCVSEAIKWSRDIYVEHVTGIRQYVG

SEQ ID NO: 18905 - protein, 1006 aa, Homalodisca vitripennis
MRRRGRMGASVSSVESISPPLPVRSPPGALSLPVTPPLGLSPRDRPLPGSPPPPSPPGAPPSPTDPPVSPRENLTQWQREWLARFTPGMEWAAFLATLEELVTSLSPAPNPSRQPRPGGTRPSRPRRPRRDGDRDVREAARIQNLYRTAPKRAMREVLEASSPSCSIAEEAIMAYFTSSYSAKVGCAVEPPPGCTIPAAASPPPLLDRTEPREVAKMLRRTANTAPGPDGVKYGIWRRRDSSGHVLSAIFNICLAAGRFPPSWKVSSTVLIHKKGAPDEITNWRPIALSDTAGKLFCSVLAHRLSSWMSDNRLLSWAQKGFTASEGCLEHNFVLQELLAEARRRGGELCVAWLDLANAFGSVPHSAVVAALRSAGLTEAQLALIKDLYEGSATTIRHSGGVTPAISFQAGVRQGCPLSPVLFNLVMEYLIRPILALEGEHGVSLHGERVSVLAYADDLAIVAKSEASLQALLDSVSSAATWVGLRFKPEKCATLHVAGRTVRQTAFTIYGSPLRVLEEGETYDHLGVPTGMRGDQTPVATIARLEEETAKIFASGLAPWQKLDAVRTFIVPQLDFNLRTARIKKTSLKGLDSLMRAEGKRTLGLPSRASVELVELPPSWGGAGLLPIADQADLAAVGHAFRLLTSPDPKISRLALEGLAVSAGHRSAARVDVGLLVNYLNGDVAGNSNVTTTFSAARTARNRLSKRLPTLRWGWSEERRSFQLTMPGGRRPITVDGRSRRSLASALRRALQLHGRATLAAKPDQGRVARVVTTCPTSNHMMRGGRHTRFADWRFIHRARLNTLPLNGCRRWGNEDRRCRRCGRFDETTAHVLCHCLPMMPVITRRHDAILELLTSEICGHPQEETRLDKRVPFQELVPDVEVPEEVASCRPDIVTIDRRNKIVRVVDVTVPYEDGWQSVTTARERKTEKYAPVARLLSAGGYRTTVDAFVVGSLGAWDSANWTTLSRLGVDRRRGAALARRCVSEAIRWSRDIYVEHVTGIRQYVG

SEQ ID NO: 18906 - protein, 921 aa, Homalodisca vitripennis
MEWAAFLATLEELVTSLSPAPNPSRLPRPGGIRPSRPRRPRRDGDRDVREAARIQNLYRTAPKRAMRELLEASSPICSIAEEAIMAYFTSSYSAKVGCAVEPPPGCKIPAAASPPPLLDRIEPREVAKMLRRTANTAPGPDGVKYGIWRRRDPSGHVLSAIFNICLAAGRFPPSWKVSSTVLIHKKGTPDEITNWRPIALSDTAGKLFCSVLAHRLSSWMTDHRLLSWAQKGFTASEGCLEHNFVLQELLDEARRRGGELCLAWLDLANAFGSVPHSAVVAALRKAGHTEAQLALIKDLYGGSATIIRHSGGVTPAISFQAGVRQGCPLSPVLFNLVMEYLIRPVLALEGEHGVSLHGERISVLAYADDLAIVARSEASLQALLDSVSSAATWVGLRFKPEKCATLHVAGRTVRPTAFTIYGSPLRVLEDGDTYDHLGVPTGMRGDQTPVATIARLEEETAKIFASGLAPWQKLDAVRTFIVPQLDFNLRTARIRKTSLKGLDSLMRAEGKRTLGLPSRASVELVELPPSWGGAGLLPISDQADLAAVGHAFRLLTSPDPKISRLALEGLAVSAGHRYAARVDVGQLVNYLNGDVAGNSNVTTTFSAARTARNRLSKRLPTLRWGWSEERRTFQLTMPGGGRPITVDGRSRRSLASALRRALQLHGRATLAAKPDQGRVARVVTTCPTSNHMMRGGRHTRFADWRFIHRAWLNTLHILPLNGCRRWGNEDRRCRRCGRHDETTAHVLCHCLPMMPVITRRHDDILELLSSEIRGHPQEKETRLDKRVPFQELVPDVEVPEEVTSCRPDIVTIDRRNKIVRVVDVTVPYEDGWQSVTTAREKMEKYAPVARLLSAGGYRTSVDAFVVGSLGAWDSANWTTLSRLGVDRRRGAALARRCVSEAIKWSRDIYVEHVTGIRQYVG

SEQ ID NO: 18907 - protein, 942 aa, Plutomurus gul
MDFTHCGACDAPFDDDDDNEISIECESCYTWYHITCVGLDTSTPEELNSMKWECSACSDVNEHCDEKSNNTRKCPQCTKLCKGPTGLKNHIRCRHPAIYRETIATKFHKSSDSTGNSTMKTDITTAKKPKENKELEKVKMDIKDLLSTNLQYVDKQPTQIEIDKFTNDLSKILQNAADHLPGPKHPAKKYYEARKKKTFVHNERKYTDSTNPVRQSKRDRERRKERYIYEQTQYLFYNQRRKCVRNVTSHESRPCPLDLHHLETHFTDRWSLENNKIRPADEYKMMDETLQHEIDREYDITISHKEVEYSINGISYDSSPGTDRILIKTIKTLDCAPVISHLATIMSKWNVVPTSFREGRTILIYKNGDESKCENWRPISICSMLRRIIERVLDRRIRQYVEFSEHQRGFANQHGTLINTEILSKCLQIAKTEKRDISVLMLDVSKAFDNIGHRHLKLCLAEAQIPCFLRNVISNLIDENFTRIETQKGKTRKIFFKRGIFQGLPLSPFLFNLSIDFIIKCLTEKEVSNKYGFNWKSEEENLTALGFADDTALISPSISSSTELYRIANSNFNQIGLSLNPAKCVAINTEAGQPVYDDIKIDPQTTVSTILPNETIKYLGVTFKYEIVFNEKSLITKFKKDMEALVGSPLLYPHQKLIILNTYIWPRLIYTFQTTPLEKMKKGFLHDIDKLIRSAIKDIMGLPADTPNAMLYADLKNRGFSLLNTEWEAVIQQYASKEILLKTKCPIIQNHQDEYSKTQIKCLEKLEATHDEVVQHIKSLKNHSSITFPQGLRSLMRKRSFHEWTKLKQKGLGVILFPECQQSNNWIRQSSGLTASEWLNGIKMNCNLIPVRNIPGRSHSTTQCRHCTEKESLSHVLGKCPKGDLLRNNRHNKLREILADSLRKTNKWVVIEEEHCLFEGGSTGRVDILIYDENNRSGFILD

SEQ ID NO: 18908 - protein, 1099 aa, Amphibalanus amphitrite
MESQPDEASSQTLPPTCSKCHQVNKKKRHKTCDVCKHAWHLGCVRLSRAQAAALNRWVCPTCLSSGRRSFQQCPDSIQGDGKSQSQPAAGGRELDTSAYTDAVAETTASDGAPTDDSRESRASAEDLVCQLTEKTNQSRVIPRIPRGARMQAAGALCELVEDVVSSGSDMAWVRLLKFPRHALSRPNWAKTNQKEASLTSKIKQQIGKYMDPASSQQNESKSGAPTEGQSTAKRRRLGDHADALKRRVARKLADGDVRGAIRLLSSGDEIADDSGEVIKNLQAKHPPAPEDLDMPPGPDVTTTASLASEQEVLTAIGSFDTGSSAGLDGLRPAHIKDMTSRMAGEAGIRLIAALTKLVNLILDGGVPSSARAAVFGASLVALRKPDGGIRPIAIGTTYRRLASKVGLWPLRQQLGERFRPLQLGYGTPGGCEAAVHAVRHFCQALSPGHAVVKVDMKNAFNSVRRDHFLRLAREHTPSLYRLLFQAYGQPTPLCYGSHLITSATGIQQGDPCGPAVFSLAIDPIIRTAGSQLNCWYLDDGTLGGDIDTVCTDLQGLISGMNSVGLDINPMKCEIILPADLSPDQSAAATERLHEWIPGATVMATTDQTLLGAPLTEAAAELVTLHKKTELSRLLERLHCLDSHSAFYLLRNALWLPKLQYVLRAAPLYRQPAPLHELDALMKTAVTSLTNVRLEGDCWEQAVLPTRYGGLGLRQLSDVALPSYVSSLHRCGPLIEAILPQELKSAADEQRRTATADWQALAGDSCAPDGEERQRQRAWDSVLAEKKRDQLFTEADQLGRARLLSAAAPESGAWLHAVPSASLGTNLDHETLRIAIALRVGSDVCSEHLCRCGAQADSRGHHSLTCRFSAGRHPRHTALNDVVRRALDSARISAILEPHGVELRDGKRPDGMTLFPFFDGKSLLWDATCVNSYAQSRLSAAATAAGGAAKAAEEEKKRKYAHLCPRYRFEPIAFETSGSCGPATKAFLKELGARLASVTGEKRETEWLFQRCSLAIIRGNAASVLLTSRSEGATPQVETGRHDASRRTQTPCRVATCSKTLRVRYSRPCRFRSRRSRVSTPRDSRPSSRHRHRSHLRARS

SEQ ID NO: 18909 - protein, 1024 aa, Amphibalanus amphitrite
MESQPDEASSQTLPPTCSKCHQVNKKKRHKTCDVCKHAWHLRCVRLSRAQAAALNRWVCPTCLSSGRRSFQQCPDSIQGDGKSQSQPAAGGRELDTSAYTDAVAETTASDGAPTDDSRESRASAEDLVCQLTEKTNQSRVIPRIPRGARMQAAGALCELVEDVVSSGSDMAWVRLLKFPRHALSRPNWAKTNQKEASLTSKIKQQIGKYMDPASSQQNESKSGAPTEGQSTAKRRRLGDHADALKRRVARKLADGDVRGAIRLLSSGDEIADDSGEVIKNLQAKHPPAPEDLDMPPGPDVTTTASLASEQEVLTAIGSFDTGSSAGLDGLRPAHIKDMTSRMAGEAGIRLIAALTKLVNLILDGGVPSSARAAVFGASLVALRKPDGGIRPIAIGTTYRRLASKVGLWPLRQQLGERFRPLQLGYGTPGGCEAAVHAVRHFCQALSPGHAVVKVDMKNAFNSVRRDHFLRLAREHTPSLYRLLFQAYGQPTPLCYGSHLITSATGIQQGDPCGPAVFSLAIDPIIRTAGSQLNCWYLDDGTLGGDIDTVCTDLQGLISGMNSVGLDINPMKCEIILPADLSPDQSAAATERLHEWIPGATVMATTDQTLLGAPLTEAAAELVTLHKKTELSRLLERLHCLDSHSAFYLLRNALWLPKLQYVLRAAPLYRQPAPLHELDALMKTAVTSLTNVRLEGDCWEQAVLPTRYGGLGLRQLSDVALPSYVSSLHRCGPLIEAILPQELKSAADEQRRTATADWQALAGDSCAPDGEERQRQRAWDSVLAEKKRDQLFTEADQLGRARLLSAAAPESGAWLNAVPSASLGTNLDHETLRIAIALRVGSDVCSEHLCRCGAQADSRGHHSLTCRFSAGRHPRHTALNDVVRRALDSARISAILEPHGVELRDGKRPDGMTLFPFFDGKSLLWDATCVNSYAQSRLSAAATAAGGAAKAAEEEKEGNTPISAHATGLSLSRLRPADRVAQQPRPSSRNWALDLRLSPVRRGRQSGCSSGARWRLSAAMLRPCF

SEQ ID NO: 18910 - protein, 1099 aa, Amphibalanus amphitrite
MESQPDEASSQTLPPTCSKCHQVNKKKRHKTCDVCKHAWHLRCVRLSRAQAAALNRWVCPTCLSSGRRSFQQCPDSIQGDGKSQSQPAAGGRELDTSAYTDAVAETTASDGAPTDDSRESRASAEDLVCQLTEKTNQSRVIPRIPRGARMQAAGALCELVEDVVSSGSDMAWVRLLKFPRHALSRPNWAKTNQKEASLTSKIKQQIGKYMDPASSQQNESKSGAPTEGQSTAKRRRLGDHADALKRRVARKLADGDVRGAIRLLSSGDEIADDSGEVIKNLQAKHPPAPEDLDMPPGPDVTTTASLASEQEVLTAIGSFDTGSSAGLDGLRPAHIKDMTSRMAGEAGIRLIAALTKLVNLILDGGVPSSARAAVFGASLVALRKPDGGIRPIAIGTTYRRLASKVGLWPLRQQLGERFRPLQLGYGTPGGCEAAVHAVRHFCQALSPGHAVVKVDMKNAFNSVRRDHFLRLAREHTPSLYRLLFQAYGQPTPLCYGSHLITSATGIQQGDPCGPAVFSLAIDPIIRTAGSQLNCWYLDDGTLGGDIDTVCTDLQGLISGMNSVGLDINPMKCEIILPADLSPDQSAAATERLHEWIPGATVMATTDQTLLGAPLTEAAAELVTLHKKTELSRLLERLHCLDSHSAFYLLRNALWLPKLQYVLRAAPLYRQPAPLHELDALMKTAVTSLTNVRLEGDCWEQAVLPTRYGGLGLRQLSDVALPSYVSSLHRCGPLIEAILPQELKSAADEQRRTATADWQALAGDSCAPDGEERQRQRAWDSVLAEKKRDQLFTEADQLGRARLLSAAAPESGAWLNAVPSASLGTNLDHETLRIAIALRVGSDVCSEHLCRCGAQADSRGHHSLTCRFSAGRHPRHTALNDVVRRALDSARISAILEPHGVELRDGKRPDGMTLFPFFDGKSLLWDATCVNSYAQSRLSAAATAAGGAAKAAEEEKRRKYAHLCPRYRFEPIAFETSGSCGPATKAFLKELGARLASVTGEKRETEWLFQRCSLAIIRGNAASVLLTSRSEGATPQVETGRHDASRRTQTPCRVATCSKTLRVRYSRPCRFRSRRSRVSTPRDSRPSSRHRHRSHLRARS

SEQ ID NO: 18911 - protein, 921 aa, Neanura muscorum
MDKSPKTVSSYRRTPRYREVLRSERLIWYDPVAETTMVRAVDSPRGQMRSCLRQLAGSGNSLVDRQLDRIIWDTLKGRQRSSKLNNILLELGSKRREGAVWKGNRSQRKWKREYLRTQASFKRNRAEAAKNILNNSVAGSSDPSTVKGFKQFWTNSFALQRESYCSNMIPVPLTNYNKVWEPIFVDDLPIAFRNTKGTAAGPDGLTVKEFKVLGTGAILKILNLILVLGKVPECLKRSRTTFIPKVDKPTLVKHFRPVSVTSIILRSLHKILAKRLVNQFWLDDRQRGFLPYDGIAENIVVLDGLLSDARRRRRELVITLLDFANAFSSVNHDAIVAAMNCSSMPKGLVDYIMDLYGNFVTSLEMGQDSQSVRVERGILQGDPLSPFLFNLVIDQALRLLPRGTGYQLRDQQGENLECSGLAFADDTCAIGEIVPSAQLQVSSIAESTGSWGLDLNPAKCEVLALKKGSRNSRLRVARGVKLSVGTETLKCLGPLDKFKYLGAVFDWKGLVRGELHLEEMLLRVGAASLKPCQKLYVLKVHLLPRLVHKLTFQPLHGGRLCGIDQSVRKTLISILKLPPKTPLPFFYAARADGGLGIMRLRHMIPLTIYRRFGRLSYSRAPIITALAEGQKNQKRVGRALRLLPQVLHIDPKYPRNSEMRPATSSKSCKQYCREKLLGLYAGRGLEQASCTPSAHSWISDGVINMRGRQYLDALKLRAGLLPTRACRTSTNTGPDRLCRLGCNKLETNFHVLQVCPHVKGPRTVRHNRIVDTLRDYLVRKGAFVVRDQVIPYKRTFCKPDLIIYAKGGKVGTVLDVQVTGRQGSLDEIHENKRSKYHDIHEVKAYVRQLVQVDKVSFTTLTMHYKGIFCPSSVRSLRKLGISKSLLRTLAISVNMGGSDIYRAFLSEVKQRELRNQVDQAA

SEQ ID NO: 18912 - protein, 1017 aa, Neanura muscorum
MFFMQDSEPAEDPGLETEDVTSGVLCPTCGRSFTTARGLGQHERVCNPELHNSMMWEPEQIRRQWPEAAVYAVARLQVENPLWGGSVLDKEASRLLQQVFSMDKSPSTISSYRRTRRYREVLNIERLVWYDPVDEETMVRGVDSSRGRMRSCLRQLVGTGKSLLDRRLDRIIWDALKGRQRISELNRTLQNLASKRDKDEDGKGKRFPRKRKGEYRVTQQSFKRNRTEAAKNILDDLVPGSSDPSNIEGFKQFWTDSFALQRESDCSNMIPVPLTDYSKVWEPIFVEDLPAAFRNTKGTAAGPDGLTVEEFKGLGTGAILKILNLILATGKVPQCLKHSRTTFIPKVEQPTLVKHFRPVSVTSITLRCLHKILAKRLLNSFWLDERQRGFLPYDGIAENIVVLDGLLGDARKRRRQLVVTLLDFANAFSSVNHDAIISAMNCSSMPKGLVEYIEDLYDDFDTTLEMGQESQRVRVERGILQGDPMSPFLFNLVIDQALRLLPRGTGYRIRGESREELECSGLAFADDTCAIGENVPSAQLQVSSLRKSTGSWGLDLNPTKCEALALIKGSRNSRVRVARGVKLSVGPETLKCLGPMNKFKYLGAIFDWKGLTRGEIRLEEMLRRVGTAPLKPCQKLYILRTHLLPRLVHKLTFQPFTGGKLSKVDRSVRGTLISVLKLPAKTPLAFFYAARADGGLGIMRLRHIIPLTVYRRFGRLAYSRAPIIEALAKGQRNQERVERALRLLPLVLHTDPKCRRKSTMKPATTSKSCKQYYREKLLGLGAGRGLEKASCTPSAHSWVSDGGTSMRGRQYLDALKLRTGLLPTRACKTTPYQGPERLCRLGCNKLETNFHVLQVCPHVEGPRTVRHNRIVDILQEYLIKKGAFVVREPVIKYGRTFCKPDLIIYSKGGKVGTILDVQVTGQQRDLNEIHESKRSKYNQIHEVERHVKHLVPVDKVCFTTLTMHYKGVFCPASVRSLRKLGVRNALLRTLAISVSKGGSDIYRAFLSECRQHKQKGS

SEQ ID NO: 18913 - protein, 1739 aa, Oedothorax gibbosus
MSAIPPATPPVAARTRGKTLVTATDNCASFVTPPLPTSSEIDALLAPPSPQCPSPNVDPDPVATTAPPEPSGPLDVLPRSTSPSVSPPLDPSWSLTFSPSLTQRATYTRVKTPSQNHHTLIPPTKDNTERSIDDQIPPPPKQQNPIVVHLSSSPFDVPPPPVPDEVWTCGFCEAHFPSRTECDTHLAELHILSQEREEFSPPKMTEHPELPTSPSPRSSPPVPTLVDLDNALFNIFNTPLPPKTKLFRCHMCGLQFDMPQKLRSHSLSHQTTPSLSIPIQLPTTPTTNAEAPSPSSPSTDMGIATPAACSTLPPPPATNSSVTTLPFNRKDLPVSVTCLDPPPPPANKIDDLPTRPQVVPTPINCPTCKAGPFANYKLRDLHVEFTHTRRSPRVVIQKEKIYTSSHTVPPSNGPDPGCAVLCNGPPKAPAFPKNPALPGPRISMPNPQVRPRGKTGRPRGRPPAARPPDNTTRMQDVSQDGIPGFNLSPTLISDHDPPKTPRPSPFAIRSEGIPHPTTDPPVLDETQVSLPASPASSQDLFLPRQPNLKNSNKRQPRSEPPPIGNKRNDPASIPNGPTRINDTLHLSFPISPALKCTEEDCTCAPFHAACWTASKQSLIRHLSAFHGILINNTEKWCRLCHCRTPSKVSEHSCFLTQPHVTPLDTCLRFKCGTCTFSSNTKRGLTNHIASHKRNLATPDVTLPQKANNRSRQPRKLITAAQKRASEDPAWRSRHRPDETDNLSTSNRFQSLADLPDDDHHSPNLNSLEAGSPQSNIPRAFAHPSRPFRRRKKPATRTTPLNDTPPSPSPPLPPSNDSLIPPSEDAPDPVDIISSPDIPPETSTDDSEDFPLQEFEDVLADIHDNRDDHLAWEYFERIVENITSEIGQNAGLPPNSDQPPSFTPKHVDTSNCRVIQRLYRRNRRRAIRLIVEGEASRCHIPAADITRHFSSVFAERSLNEAVLSDSFPTNHPSIDMSPFSPAEIRGRLHRFENSAPGPDRLSYEHLKLADPDCKIIAKIFNFCLYKKRIPTAWKKSKTILIHKKGDENDLNNWRPISLCNSLYKLYTGCLSSRLVNWITDFEILSPCQKGFLPFDGVFEHRFVLNHALTMTKRNKDDICLAQIDLTNAFGSIPHQAINVALQEAGAGPHFREIIVDLYSNSTTEFFAGDGLTEPISISAGVRQGCPISGILFNIVIDPVLRKLQRDREDFHVLAFADDISIIESSPEQLQTQLDLLSTLLNDLSLHINPNKCASFHLSGATPVGARDSIFLVNETPIPSLKDGEESSFLGTPVGFRLAVPLNNLRDFMLLGERIAKSKLAPWQRIDALKTFFFPAFVFQMRTEQLSKGDMKVVDDFIRPLIKDTLYVDESAANEYLYGSSKMGLLGIPRLADEVDIMMIDNAFKLLSSKDIRIHELAWEDILDNITTRTGLDPSPSLIEKYLNGTQDEEGFRHTSCPYASTWSRARAASTRLGVTWRCREYGDLELHIDDKVLTKSDRKKICQTLKESLRNCWANDLIAKPSQGAAIEVTTRHKASSHFLRSGDFTTFADWRFIHKERLNLLRLNGNTPWDDCISQCRRCNAPVESTLHVLSLCKPNMGRRTTRHNAIVERIHHAKRRDWQVLSKNQVLGNDRLRPDLVLVKGSQEAIILDVTVPYENRYQAFINARNEKTRKYANIAALLAENYKKVSVEAIIVGALGSWDPANDAVLRKFTNKRYANKLRSFVSVTQLTIPAKFSRST

SEQ ID NO: 18914 - protein, 1143 aa, Heterodera schachtii
MHDLSNSTAQSDPNIDLSVGSAQNRTEQGDECGELGEEDVAHQHVLGVPIALPLPCRFCAGRSFNTHAGLSKHLKKDHTPQNTWHLAFRCHGCRQIFAQLRACNAHQKKSAQCQGAQPIQEERHQPQHANVVRQVRPRAPRLQEPVSPAQPAAADQSGTTPSGTGARTDRMQCRRESDVPSGRSTPPALVAQRHSAGTASPNASDRSAQTARSRTARQSQTPPAHLVANAQPEPHDNQTGPVVAQRQQNAQQREWVRRFNAVANAEQLDDLLDEFTNAVRQQAQVAFTQRPAQQQQRPRPPPNQHGRRRNHMNADAGPPFDPVAAARIQKLYRASRARAYREITEQASPLCQLSAEVLHEHFTSVFGPSPPVAEQMPNSVPFFEPLADNSPFTANFNNNEVSERLKRCSNTAPGPDNIRYAVWKKFDPGCHILTAIFNAAKQQQHIPTSWRRSTTVLIHKKGAREDVNNWRPIALSNTLGKLHSAVLANRLAQWAIRNKRISQAQKGFMPVDGCSEHNFMLQSILQDARRERNECAIAWLDLTNAFGSIPHEVIFRSLKWSGLDNTTVNTIRLLYNNNVIQIRQTGGLTDDITIRAGVKQGCPLSPIIFNLALEPILRALDSQNIGYQIGGQSTSTLAYADDLVLVSNNTQQLQQMLTTTGQIADWAHLRFNPRKCATLVIDGKRRIAQPTTFTIQGGQPPPMNIDQHYEHLGVPTGYQRAQSADHIIQRMSDHVDKIDRSLLAPWQKFDAVNTFVLPSIAFHLKNGEVRKAPLNALDKKIVRAAKRWLNLPQRAGTLLCTVVAKRLRRAPRQHELAKYLNGSMDGDMNNDSTDISSTWTRLRTATRRLRTKVGVEWAVNDGSMQLLLNGCQVQPKAAEFCLRSAIRDFYHRRLLSKPDQGKAHSVTSVSAASNHFLAHGNFTRFADWRFIHRARLGCVPLNGTRRFGQPNNKQCRRCGFGNETLPHVLCHCPPMLATIGRRHNVIMERLVKAFRPPATTVVRVNQTVPNFPNNVRPDILAMDNTLKTALIVDVCMPFENRYGAFEAARNEKRRKYDELAQHLRQQGLTVFLDAFVVGPLGGWDPHNELVLNRMHIGQHYRHLMRKLMVSEAIKWSRDIYVEHITGTKQYNDWPMAENGEGDE

SEQ ID NO: 18915 - protein, 1187 aa, Heterodera schachtii
MHDPSNSTAQSDPNIDLSVGSAQNRTEQGDESGELGEEDVAHQYVLGVPIALPLPCRFCAGRSFNTHAGLSKHLKKDHTPQNTWHLAFRCHGCRQIFAQLRACNAHQKKSAQCQGAQPIQEERHQPQHANVVRQVRPRAPRLQEPVSPAQPAAADQSGTTPSGTGARTDRMQCRRESDVPSGRSTPPALVAQRHSAGTASPNGSDRSAQTARSRTARQSQTPPAHLVANAQPEPHDNQTGPVVAQRQQNAQQREWVRRFNAVANAEQLDDLLDEFTNAVRQQAQVAFTQRPAQQQQRPRPPPNQHGRRRNHMNADAGPPFDPVAAARIQKLYRASRARAYREITEQASPLCQLSAEVLHEHFTSVFGPSPPVAEQMPNSVPFFEPLADNSPFTANFNNNEVSERLKRCSNTAPGPDNIRYAVWKKFDPGCHILTAIFNAAKQQQHIPTSWRRSTTVLIHKKGAREDVNNWRPIALSNTLGKLHSAVLANRLAQWAIRNKRISQAQKGFMPVDGCSEHNFMLQSILQDARRERNECAIAWLDLTNAFGSIPHEVIFRSLKWSGLDNTTVNTIRLLYNNNATQIRHTGGLTDDITIRAGVKQGCPLSPIIFNLALEPILRALDSQNIGYQIGGQTTSTLAYADDLVLVSNNTQQLQQMLTTTGQIADWAHLRFNPRKCATLVIDGKRRIAQPTTFTIQGGQPPPMNIDQHYEHLGVPTGYQRAQSADHIIQRMSDHVDKIDRSLLAPWQKFDAVNTFVLPSIAFHLKNGEVRKAPLNALDKKIVRAAKRWLNLPQRAGTEPLYLSNTMGGLALTPLNALADLSQIVHGLRLLTSRDLAATTMDLLCTVVAKRLRRAPRQHELAKYLNGSMDGDMNNESTDISSTWTRLRTATRRLRTKVGVEWAVNDGSMQLLLNGCQVQPKAAEFCLRSAIRDFYHRRLLSKPDQGKAHSVTSVSAASNHFLAHGNFTRFADWRFIHRARLGCVPLNGTRRFGQPNNKQCRRCGFGNETLPHVLCHCPPMLATIGRRHNVIMERLVKAFRPPATTVVRVNQTVPNFPNNVRPDILAMDNTLKTALIVDVCMPFENRYGAFEAARNEKRRKYDELAQHLRQQGLTVFLDAFVVGPLGGWDPHNELVLNRMHIGQHYRHLMRKLMVSEAIKWSRDIYVEHITGTKQYNDWPMAENGEGDE

SEQ ID NO: 18916 - protein, 1187 aa, Heterodera schachtii
MHDPSNSTAQSDSNIDLSVGSAQNRTEQGDESGELGEEDVAHQYVLGVPIALPLPCRFCAGRSFNTHAGLSKHLKKDHTPQNTWHLAFRCHGCRQIFAQLRACNAHQKKSAQCQGAQPIQEERHQPQHANVVRQVRPRAPRLQEPVSPAQPAAADQSGTTPSGTGARTDRMQCRRESDVPSGRSTPPALVAQRHSAGTASPNGSDRSAQTARSRTARQSQTPPAHLVANAQPEPHDNQTGPVVAQRQQNAQQREWVRRFNAVANAEQLDDLLDEFTNAVRQQAQVAFTQRPAQQQQRPRPPPNQHGRRRNHMNADAGPPFDPVAAARIQKLYRASRARAYREITEQASPLCQLSAEVLHEHFTSVFGPSPPVAEQMPNSVPFFEPLADNSPFTANFNNNEVSARLKRCSNAAPGPDNIRYAVWKKFDPGCHILTAIFNAAKQQQHIPTSWRRSTTVLIHKKGAREDVNNWRPIALSNTLGKLHSAVLANRLAQWAIRNKRISQAQKGFMPVDGCSEHNFMLQSILQDARRERNECAIAWLDLTNAFGSIPHEVIFRSLKWSGLDNTTVNTIRLLYNNNATQIRHTGGLTDDITIRAGVKQGCPLSPIIFNLALEPILRALDSQNIGYQIGGQTTSTLAYADDLVLVSNNTQQLQQMLTTTGQIADWAHLRFNPRKCATLVIDGKRRIAQPTTFTIQGGQPPPMNIDQHYEHLGVPTGYQRAQSADHIIQRMSDHVDKIDRSLLAPWQKFDAVNTFVLPSIAFHLKNGEVRKAPLNALDKKIVRAAKRWLNLPQRAGTEPLYLSNTMGGLALTPLNALADLSQIVHGLRLLTSRDLAATTMDLLCTVVAKRLRRAPRQHELAKYLNGSMDGDMNNESTDISSTWTRLRTATRRLRTKVGVEWAVNDGSMQLLLNGCQVQPKAAEFCLRSAIRDFYHRRLLSKPDQGKAHSVTSVSAASNHFLAHGNFTRFADWRSIHRARLGCVPLNGTRRFGQPNNKQCRRCGFGNETLPHVLCHCPPMLATIGRRHNVIMERLVKAFRPPATTVVRVNQTVPNFPNNVRPDILAMDNTLKTALIVDVCMPFENRYGAFEAARNEKRRKYDELAQHLRQQGLTVFLDAFVVGPLGGWDPHNELVLNRMHIGQHYRHLMRKLMVSEAIKWSRDIYVEHITGTKQYNDWPMAENGEGDE

SEQ ID NO: 18917 - protein, 1279 aa, Heterodera glycines
MFSMVPVPFPEPILLFRHRFSAFWLRSKCSDFCSEKYYFSFIPQNKTFCSLPFYSPSKKKFASPQSRFPQFLCPNICLFSSFDQNNQYLLTPPMHDPSNSTAQSDPNIDLSVGSAQNRTEQGDESGELGEEDVAHQYVLGVPIALPLPCRFCAGRSFNTHAGLSKHLKKDHTPQNTWNLAFRCNGCRQTFTQLRTCNAHQKKSAQCQGAQPIQEERHQPQHANVVRQVRPRAPRLQEPVSPAQPAAADQSGTTPSGTGARTDRMQCRRESDVPSGRSTPPALVAQRHSAGTASPNGSDRSAQTARRTARQSQTPPANLVANAQPEPHDNQTGPVVAQRQQNAQQREWVERFNAVASAEQLDDLLDEFTNAVRQQAQVAFTQRPAQQQRRPRPPPNQHGRRRNQMNADDGPPFDPVAAARIQKLYRASRSRAYREITEQASPLCQLSAEVLHEHFTDVFGPSPPVAEQMPNAVPFLEPLTDNSPFTAPFNNNEVSERLKRCSNTAPGPDNIRYAVWKKFDPGCHVLTTIFNVVKQQQHIPTSWRRSTTVLIHKKGDREDVNNWRPIALSNTIGKLHSAVLANRLAQWAIRNKRISRAQKGFMPVDGCSEHNFMLQSILQDARRERHECAIAWLDLTNAFGSIPHEVIFRSLKWSGLDNTTVNTIRLLYNNNATQIRHTGGLTDDITIHAGVKQGCPLSPIIFNLALEPILRALESQNIGYQIGGQTTCTLAYADDLVLVSNNTQQLQQLLTKTGQIADWAHLRFNPKKCATLVVDGRRRIAQPTTFTIQGGQPPAMNIDQHYEHLGVPTGFQRAQSADHVIQQMSDHVDNIDRSLLAPWQKFDAVNTFVLPSIAFHLKNGEVRKAPLNALDKKIVRVAKRWLNLPQRAGIEPLYLSNAMGGLALTPLNTLADLSQLVHGLRLLTSRDLAATTMDLLCTVVAKRLRRAPRQHELAKYLNGSMDGDMNNESTDISSTWTRLRMATRRLRTKIGVEWSVNDGSMQLLLNGCQIQPKSAEFCLRSAIRDFYHRRLLSKPDQGKAHSVTSVNAASNHFLANGNFTRFADWRFIHRARLDCVPLNGTRRFGQPNNKQCRRCGFGNETLPHVLCHCPPMLATIGRRHNVIMERLVKAFQPPATTVVRVNQTVPNFPNNVRPDIFALDNALKTALIVDICMPFENRYGAFEAARNEKRHKYDELAQHLRQQGLTVFLDAFVVGPLGGWDPHNELVLNRMHIGQHYRHLMRKLMVSDAIKWSRDIYVEHITGTKQYNDWPMAENGDGDE

SEQ ID NO: 18918 - protein, 1187 aa, Heterodera schachtii
MHDPSNSTAQSDPNIDLSVGSAQNRTEQGDESGELGEEDVAHQYVLGVPIALPLSCRFCAGRSFNTHAGLSKHLKKDHTPQNTWHLAFRCHGCRQIFAQLRACNAHQKKSAQCQGAQPIQEERHQPQHANVVRQVRPRAPRLQEPVSPAQPAAADQSGTTPSGTGARTDRMQCRRESDVPSGRSTPPALVAQRHSAGTASPNGSDRSAQTARSRTARQSQTPPAHLVANAQPEPHDNQTGPVVAQRQQNAQQREWVRRFNAVANAEQLDDLLDEFTNAVRQQAQVAFTQRPAQQQQRPRPPPNQHGRRRNHMNADAGPPFDPVAAARIQKLYRASRARAYREITEQASPLCQLSAEVLHEHFTSVFGPSPPVAEQMPNSVPFFEPLADNSPFTANFNNNEVSERLKRCSNTAPGPDNIRYAVWKKFDPGCHILTAIFNAAKQQQHIPTSWRRSTTVLIHKKGAREDVNNWRPIALSNTLGKLHSAVLANRLAQWAIRNKRISQAQKGFMPVDGCSEHNFMLQSILQDARRERNECAIAWLDLTNAFGSIPHEVIFRSLKWSGLDNTTVNTIRLLYNNNATQIRHTGGLTDDITIRAGVKQGCPLSPIIFNLALEPILRALDSQNIGYQIGGQTTSTLAYADDLVLVSNNTQQLQQMLTTTGQIADWAHLRFNPRKCATLVIDGKRRIAQPTTFTIQGGQPPPMNIDQHYEHLGVPTGYQRAQSADHIIQRMSDHVDKIDRSLLAPWQKFDAVNIFVLPSIAFHLKNGEVRKAPLNALDKKIVRAAKRWLNLPQRAGTEPLYLSNTMGGLALTPLNALADLSQIVHGLRLLTSRDLVATTMDLLCTVVAKRLRRAPRQHELAKYLNGSMDGDMNNESTDISSTWTRLRTATRRLRTKVGVEWAVNDGSMQLLLNGCQVQPKAAEFCLRSAIRDFYHRRLLSKPDQGKAHSVTSVSAASNHFLAHGNFTRFADWRFIHRARLGCVPLNGTRRFGQPNNKQCRRCGFGNETLPHVLCHCPPMLATIGRRHNVIMERLVKAFRPPATTVVRVNQTVPNFPNNVRPDILAMDNTLKTALIVDVCMPFENRYGAFEAARNEKRRKYDELAQHLRQQGLTVFLDAFVVGPLGGWDPHNELVLNRMHIGQHYRHLMRKLMVSEAIKWSRDIYVEHITGTKQYNDWPMAENGEGDE

SEQ ID NO: 18919 - protein, 1187 aa, Heterodera schachtii
MHDPSNSTAQSDPNIDLSVGSAQNRTEQGDESGELGEEDVAHQYVLGVPIALPLPCRFCAGRSFNTHAGLSKHLKKDHTPQNTWHLAFRCHGCRQIFAQLRACNAHQKKSAQCQRAQPIQEERHQPQHANVVRQVRPRAPRLQEPVSPAQPAAADQSGTTPSGTGARTDRMQCRRESDVPSGRSTPPALVAQRHSAGTASPNGSDRSAQTARSRTARQSQTPPANLVVNAQPEPHDNQTGPVVAQRQQNAQQREWVRRFNAVANAEQLDDLLDEFTNAVRQQAQVVFTQRPVQQQRRPRPPPNQHGRRRNQMNADDGPPFDPVAAARIQKLYRASRARAYREITEQASPLCQLSAEVLHEHFTNVFGPSPPVAEQMPNSVPFFEPLADNSPFTANFNNNEVSERLKRCSNTAPGPDNIRYAVWKKFDPGCHILTAIFNAAKQQQHIPTSWRRSTTVLIHKKGAREDVNNWRPIALSNTLGKLHSAVLANRLAQWAIRNKRISQAQKGFMPVDGCSEHNFMLQSIVQDARRERNECAIAWLDLTNAFGSIPHEVIFRSLKWSGLDNTTVNTIRLLYNNNATQIRHTGGYTDDITIRAGVKQGCPLSPIIFNLALEPILRALDSQNIGYQIGGQTTSTLAYADDLVLVSNNTQQLQQMLTTTGQIADWAHLRFNPRKCATLVIDGKRRIAQPTTFTIQGGQPPPMNIDQHYEHLGVPTGYQRAQSADHIIQRMSDHVDKIDRSLLAPWQKFDAVNTFVLPSIAFHLKNGEVRKAPLNALDKKIVRAAKRWLNLPQRAGTEPLYLSNTMGGLALTPLNALADLSQIVHGLRLLTSRDLAATTMDLLCTVVAKRLRRAPRQHELAKYLNGSMDGDMNNESTDISSTWTRLRMATRRLRTKVGAEWAVNDGSMQLLLNGCQVQPKAAEFCLRSAIRDFYHRRLLSKPDQGKAHSVTSVSAASNHFLAHGNFTRFADWRFIHRARLGCVPLNGTRRFGQPNNKQCRRCGFGNETLPHVLCHCPPMLATIGRRHNVIMERLVKAFQPPATTVVRVNQTVPNFPNNVRPDILAMDNTLKTALIVDVCMPFENRYGAFEAARNEKRRKYDELAQHLRQQGLTVFLDAFVVGPLGGWDPHNELVLNRMHIGQHYRHLMRKLMVSEAIKWSRDIYVEHITGTKQYNDWPMAENGEGDE

SEQ ID NO: 18920 - protein, 1231 aa, Amblyraja radiata
MRLPPEIMPCRYPVRRARAKRIGKSAKEDKEDANTSSLEGQDHSENIQTQTFYSRLFKTSGTEKEKETTTVSKPTETRTTDDSNYYENVIIQKSKDNNKPQPVIIHYPVDGLFCSKCDEIYHTVGLFRTHLNKKHQIKSFLTVCGKCNKKGEFHAITCHYAKCKGPPPPITEGVFPCEGCVLRFTTPRGLSQHERHKHPAIRNKKRIAAANPPKNPRQSSVWSDEEIKMLIDLEKRFQGARFINVAISEVMSSKTNKQISDKRRDPNIRRLAAEIEAQSRNIPEETGNETEPEPEAETEELAASEQGHTKTTARPREKTHGPPKHRDLAEQITKAEELLGDAHNKDRCIEMVEQITEGLIDKFSPKPHKNKGQKAGSNKKEHRVANHPNLGARKRWAAKKQKYKTTQILYQKDRRRLARQIMGAPAASSCPLRREELENCFRAKLSQPNNKANISKMAPYNGTTNINRLMEAIELEEVEMAISEINEKSAAGLDGMKVEHLENIIGQDVTVIPRLFSLWQKLAFVPIALKRSRTVLIPKTEDAELLKNIDNWRPITIGPMLLRLFTKIIAKRLSEAVTLNPRQKGFIAATPGCNENIAILENMKGAKSNRKELAVVFVDLAKAFDSIGHKMLTVGLKRMGIQNRFIHLVQSLYTGNTTVIEGDRTATEPIPIKRGVKQGDPLSPLLFNITMDPLICTLEQAQMGVTLTQKNRRISCSSLAFADDIAILSDSYAGMTANLKILQNFCQNTGLQINTKKTAGFHCRPYRKTFLYNTREKWKINGEPVNHIEPGELEKYLGARIDPWAGVTEDNWSGKLNTWITSLREAQLKPTQQLEILKTHMIPRIYFHLILTEASQNTVIKLDNIIKKAVKEILHLPADTTDGILYSKNKDGGLGLPKLEVQIPSAIIRKLESLEKSDDAVISASFQFRGNNNVEHINKLRNLKVLREIEEFLEPAESNNNEEASLSTIGEMEDSLLGTEGNAKPVNKYAEWRKWEFEKWTKLLAQGPGIHYYKNDPTSNTWLYGHHKMKQSLFIKRLLLRCNLYPTRCTISYGRPNMAKLCRRCAMANETLAHISGQCLAVKNARIKRHNKILDKLKAQVAKHGWAVHIEPRFRTEDGRLWKPDLIFVKGQEVAVVDVTVRYESNNMELERAWKEKTEKYEHLRGQIAEVTKGTTIKFFGFVMGARGKWHAWNDTLMEYLKIDKYKSFAKNLADLTIALTLDILRIFNDQ

SEQ ID NO: 18921 - protein, 1200 aa, Cotesia vestalis
MSRWSERDVEVLGEFLDSLEGERISAAHLNELGERFPGRSTAAIKKKLLEIRKNAVGRIAHVALPWSVNEPRRLAERYVESNLPKITERIASIIQDFPGRSVKAAMTHLREKHPQIYYMRAGLPDDWNDAGQQDPEAEVQGDAEADSGEDTQEEEHVVNDAIQEIPRDGRAHAQDDRQVNDDIPELVGKLRKVMAENSRRKRIKKPRGWINPHTINRINDALSFELSRITSSERPSEARRVKEKNVIYAAGRLLSSEARPQTRKIPAHVFIFRKIIKIKRKIARIKEILEWSRNYLPRRLKDLVAEMRIMKVKPKQYHTVCKKELEVLEKELQRQKDREEKVKTRKWFDTQPSLRVISQAREEVESPDLVRTEEYFRDLYRQPAGGRRNSPKFNAWVKRFQQHRQGKNFDHQVDEQTIQLLTEKVLRGTAPWKAAGVDGIPAAVYKTFESAKNYLTRFVLESIHGTRNITERDVRARIVLIYKSGEKSNPGNYRPIAVLNTDYKILTGVITEIIKQSLPDWAIPPEQLARTGVWGTIHGLLIDKACTQKARMDRVGHYTAWFDFSKAYDSIDTFQLLRLVGALPIHDNIANTLKAAIRAWSVVIQVGKDRTRPIYVKRGVYQGDTISPILFILITAFLIYLVREDEKVNRVCRGKQQVAAFMDDYKVHAPTEEGIRCIADVITDGGAEVGLSLNIRKCGVFTREYLEDEEVLDEGEEMLFLPRVRDSYKYLGIHQLERDLPVNYGLVESKVTKMTEKILDSGLAVSQKVKLYNTCVIPAATYILGNMYSQESRATSLKKCSDLDKLVRKILIEKQLKGATTTRVSTYIPPWKGGLGLKSIRFEVELLMVKKGAYLRSHPEMEMAREKYEKLAAKGWRNPLTDAEWVMDTYGVVGPEVERLPEEVFGDYCRRLAGWVASQQVDLLLHLWRSLHYGRLVVQEEAALKFPGFKSFKMEDWIARRTLEAAEEQVHGLGAITGAACRLGCQNTETAYHVIAACGKQTHPARHDTAVSWVIRSILEAMSAPEDVKFRAFKARASFVAEFQWEGRNVEICAGPRVAVDINLHHNRPDMVITLTNPAEIFVLEVAVSHLQNIRLQERIKRARYEVNSSSEISETNLEEVPRGENLIDALQRKHKCPAKLGILVFGALGEVLDTEEHKNSMRILKKLGMTERKIDIMLSNIALSVAKASAQILLHRVRM

SEQ ID NO: 18922 - protein, 1242 aa, Cotesia vestalis
MSRWNEEELRVLREYLVELGDRQITRVDHAVVAARLPGRSEASIKKKLIDLRRANAGRVAQAAILWSIAESRRLVEMYVGTEMPTKTERVRQIIHEFPGRSEKAIMTHLREKYPQIYYLRTGLPANWNDEANENSQNDADENSDQDSDQDSDMDTDNESQDANLERSRRRPRGEARIVENTDARGRQAPNQTIPLQGREHAPNAGDGRIADINNEQHLEAEIPELAGKLERTMRSSGKDRGRIKKPKGWINPQTIRKIDEALGFLLAKISNEPVSEARRMKEKAAIYAAGKLLSHEAKPGARRIPSHIFTQRKIDKLRKKVGKVEEILSWSGARLPRRLKEMVMEMRKMKAKPKQYLIICRRELESLEGELEKQKEKEGRLKSRKWFADQPSMRVITPPREEENAPDLQQTEGYFREQFRPAAGGRRESPKFNEWVKKFRNFRGDKTFEEQINEQNIENLVEKVLKKTAPWKAAGEDGIPTAIYKTFQNAKSYLLKFIIDSINGARNLSERDVRARVVLIYKSGDKNDPSNYRPIAVLNTDYKILTGTITEVIKRDLPEWAIPREQLARAGVWGTTHGLLIDKAYSQKARADRTPHYTAWYDFQKAYDSINIFQLLRLIDALPIHINIRNTLKNAIKQWSMIIHTKYGNTRPIYVKRGVYQGDTISPLLFILMTAFLTYLVSEDQKTNRVCRGRQQLEAFMDDYKAHAPSQEGIDCITELLREGGTEIGLALNVRKCGVFNREYLERDGVEDDIIGDEDPLFLPRIRDSYKYLGIHQLERDRPVNYQLVEGKATRMTEKIMRSGLAVSQKVQLFNTCVIPAVTYVLGNLYPQESRATSLKKCADIDGLIRKILIEEQLKGPTTTRVSTYIPARLGGLGMKSIRLEVELMMVKKGCYLRSHPELDQTRTRYEKLAKRGWRNPLTDADSVMASYGVEGQEIERLPEEDFDAYCRRLARRVSDQQVDWLLDKWRSINYGRLISKEEECILFPAYKSFKMENWIARRILEAAEEQVHGLGALRGIPCRLGCPNTETAYHVVSACGRQTHPVRHDTAVSWVIRKILDATSAPENTKTQAFRARASIVTVYDWGERKIELSAGPRTTVDINLYHNRPDILIKLSNPPEIFVLEVAISHLQNIRLQERIKRVRYALNSTTEVTENNVDTVTRDNNLIDALRRKHQCPVKLGVLVIGALGEILATEEHLLAKNILSKLGVSQKHWEILMSNIALSVAKASAQSLVHRLRQ

SEQ ID NO: 18923 - protein, 894 aa, Strongylocentrotus purpuratus
MYIEHEPKTLTQARKRKNLLRKKAFGKNATKEDREAFKLAIKTISYLKKKTKEHRDEKSRAHLEKRFRDNFYDFSKKVCNGSLHEKSPRPTFSQMEADEYFCTKYSVPNVIDLTSLSWFPYVNVNSENYQSFDMNSFKPKDVKDVLKRKKARSAPGDDGLMYGMLKNLYCTHHFLATLYNKILESGDPPEMWSESKVALIFKSGETTKPENFRMISLTCCIGKIFNQILSERMSTYLTANEFIDKQVQKAFINGVNGCIEHNQVVHEILKHARCKQKTLHITFFDLADAFGSVSHQLIFTSLSRYAIPQPVARYIDVLYSRLNGRVCGPGWQSERFAFRKGVFQGDPLSPIVFLMCFNPIIEYLETQKQQYGYDFAGQKLITTPYADDFNLITGNKRYHQKLVQEVDKLLSSMGLTVKAKKCRSLSISGGKPTVIDFCLAREQIASVQNNPIKFLGSQITFRMKTSETYDFIRDKVDSTLTNIDSVNIKNEYKLKILNDYALSSMRYMLTVHDLHATHLGQLDTLLDKYIKKWMGIPRCGANIAVVHAPAGLNIPTISELYQTCHCLAYSRSKVKGDEMVVHALDQQLAREENWTRKSSTIQVAHQIHQTSLQTNWKDTKKSVKMNLKEESRKKWKNEIEPLLVQGEFMKVLEIENCDLSWKSIIFNLPQGVMKFAINAAIDSLPSNKNLYRWGKRINDLCSLCQAKGTLHHVLNNCQEMLNRYTWRHNNIVHNLLKTIKQNGLDSDHQVYADVEGETISGGTVPPTIVPTQQRPDLCFINFRKKEILVFELTIPFETNIQQAHQRKLDRYAGLTHDISEAGWTPKLMCIEIGSRGLITPDNKKRLIDMLKTCKCKVRYPQLRNEILKTVLFGSYVIFHSRSERTWQSQHYLGV

SEQ ID NO: 18924 - protein, 904 aa, Strongylocentrotus purpuratus
MNFWKIKPTRCILNTNQKRLLRLGNGKNLLRKKAFGKNATKEDREAFKLAIKTISYLKKKTKEHRDEKSRAHLEKRFRDNFYDFSKKVCNGSLHEKSPRPTFSQMEADEYFCTKYSVPNVIDLTSLSWFPYVNVNSENYQSFDMNSFKPKDVKNVLKRKKARSAPGDDGLMYGMLKNLYCTHHFLATLYNKILESGDPPEMWSESKVALIFKSGETTKPENFRMISLTCCIGKIFNQILSERMSTYLTANEFIDKRVQKAFINGVNGCIEHNQVVHEILKHARCKQKTLHITFFDLADAFGSVSHQLISTSLSRYAIPQPVARYIDVLYSRLNGRVCGPGWQSERFAFRKGVFQGDPLSPIVFLMCFNPIIEYLETQKQQYGYDFAGQKLITTPYADDFNLITGNKRYHQKLVQEVDKLLSSMGLTVKAKKCRSLSISGGKPTVIDFCLAREQIASVQNNPIKFLGSQITFRMKTSETYDFIRDKVDSTLTNIDSVNIKNEYKLRILNDYALSSMRYMLTVHDLHATHLGQLDTLLDKYIKKWMGIPRCGANIAVVHAPAGLNIPTISELYQTCHCLAYSRSKVKGDEMVVHALDQQLAREENWTRKSSTIQVAHQIHQTSLQTNWKDTKKSVKMNLKEESRKKWKNEIEPLLVQGEFMKVLEIENCDLSWKSIIFNLPQGVMKFAINAAIDSLPSNKNLYRWGKRINDLCSLCQAKGTLHHVLNNCQEMLNRYTWRHNNIVHNLLKTIKQNGLDSDHQVYADVEGETISGGTVPPTIVPTQQRPDLCFINFRKKEILVFELTIPFETNIQQAHQRKLDRYAGLTHDISEAGWTPKLMCIEIGSRGLITPDNKKRLIDMLKTCKCKVRYPQLRNEILKTVLFGSYVIFHSRSERTWQSQHYLGV

SEQ ID NO: 18925 - protein, 1078 aa, Agrilus planipennis
MAWGVASSPGSFQAGTKTKKNRSSPRRVPQPGGPAETNQPSSSPAAGPSSRSAAAAPLPQNTGGAVCPDCHRSFATVRGLGVHRRAKHPEEVNAEIAVPEKKVRWKDEELRLMARLEADAITKDVRFINEHLLSLVPGRTQEAIKGVRRRADYKTLVQAALAEAAPTTTPTGSSSDEQDVPKAPQVGAPQPPQPRPSEDRLKTVIASLMEEAYGTDTYKSVRLVSIARRALQGANVKPDINSWFREVFPPTPPRETQFRRHPPESATRKRRGDGIGPSKKKQRRREYARVQTLWSKDRRRAVQEILEGKRAILHTMEELQDHWRPILEHPSKDFPIPPTTSPDANLENIWEPISTEEVATLSIPLKSAPGPDGVTPRQWRAVPGALRALLFNVILLLGGFPDELLQTRTIFIPKDEAPASPGDYRPISISSVAVRHLHRILAERLRKAALTNIRQRAFISADGTAENLAALDSILWTARNRLRECHIATLDVAKAFDTLSHDALISMVVSLGLPDGFVKYVRDLYANATTVLALNGKMSPPIMVRRGVRQGDPLSPLLFNLAMDHVIASLSTDVGFVLEGQKISCLAFADDLVLVAGSVMGLRAAISSVEKATSSMGLQLSPSKCSTLSMVPDGKTKRIKVLTKPMFRLGDDQLRAQTVLSRWGYLGMDFDSRGMTTVEVSIREVLERVTKAPLKPQQRLQLLHSYLLPRVYYALTLGNLSAGRLKALDIEVRNYIRRWLRLPHDTPTAYFHSAVRDGGLGIPSLLTLIPSLILQRLGRLKDSPYGAARAAADSHRLRNKLRTSRRILGKLGIPPANPTSEKRRKYWAELLHSSVDGRELRESASSSLSSNWVYHRSRGIPGRDYVQYHHVRINGLPSAMRTSRGQRRNGPPKCRAGCDATETTAHVIQHCWRTHGGRVKRHDAICGTLSAHLVEKGWTVERERVFPTSDGRRKPDIIAKRGEQGMVLDVQIVSGSSSLSDSHRRKKTYYHGNHDLMDKVATCLQIHRRHVRTTTCTISWRGVWCEQSHRDLTSLGLSDAFLAGLTTRVLQGSHTNWSRFNSMTSRRPGRVEERMGIG

SEQ ID NO: 18926 - protein, 1084 aa, Orussus abietinus
MAGGKRGSGLGGWGDPPPRSRRVASPAGPHPAGTNRQGRYDLRRGPRPAGPAVHPRGPSPPASPPPAAAVPPPVFLCPDCPRSFPTRIGLGVHRRHAHGAIVDQEVVVERVHRVWSQEELRLMAREEAIAAHRGDVRFMNRHLLTVVPGRTLHGIKGARRRADYRRLVVAALADIGEAASSSSQGSDYRSASETSASPPPSSSRARSSGRWSGLAPDIPTAIRQLMPVVGNAGGWNHDSLIALAERALAGADVSDGIARWIEDTFPVAPPPPPRPRDEQPPASRRHRRRLEYARTQWLFRKDMTRAVHNILDGEGDETGIPDVREMARHWGPFVGQPSLPQNPIAPVPPAPALAGVWGPVSCEEATAVSVPLASAAGPDGVTSGAWRTVPASVKALVFNIAMSSGGFSASTLPGRTVFLPKKGVQDPSAADFRPISVGSVVVRHLHKILASRMRECDLVDLRQRCFSDGCAKNVAVLASVLHESRYHLRELHVASLDVAKAFDSVSHHAIEGACRRAGLPDAFCRYVVRLYQQGTTMFEVRGVRSELFPVRRGVRQGDPLSPLLFCLVVDDVLRAVPRDVGFDLGGERVSALVYADDLLLFSSTKWGMQEALRAVEERAAQHGLRFNARKCAVLSVVPSGRQKKVRIVTDPTFTLAGGTHLPQLSSEAGWRYLGVDFAPPGPRRVGGDLSVYLATITNAPLKPQQRLKVLRTYLLPRLYHAFVLGRVTLGKLRALDCAVRAAVRRWLRLPHDIPLGFFHANVASGGLGIPALSTVVPGMMMDRLGSLHESTSPAVRAAADSLWVRMRLRWAERALTREGEVLSSRYRRARWWARALHSSSDGWELREVPRTALSSWWVDPGSLAVPGRDYVQYVHTYINCLPSRVRTTRGRQREQRNIRCRAGCNVWETAAHIIQGCFRTHGGRVLRHNAVSRTLAAGLRDKGWRVEEEPRYQTEEGLRKLDLVCARADGVSVVDVQIVSGSAPLDEADARKLAYYGGNQSLVDALRRKYRVAADQVAFASCTLSWRGVWSSTSADALQGMGLGRGFFRSITTRVLQGSHTNWTRWNRMTAVRWRGGRDRVGVG

SEQ ID NO: 18927 - protein, 1021 aa, Teleopsis dalmanni
MGYQPLNILNSLGTTSNNNLNAGLDNPMSVVTATGNQVTIRSDETPNAPSVYRCNFCDRSFSTKSGRGVHEKRRHPDVLDEVRVSAQQQAKVRWTEEEMRILARAEVDLVKGGVRFINVELAKLFPNRSLEAIKKVRQKDSFRQFVNDGLIVTPVVTTVPIAHPAETFIAEVQAMSLPASPVNDALKSIMENALYLGKEETLVRLSSLLATVFRPRPRNRRIRAETGNPRNPNRRQRRRMEYARVQRNFQLHQGRCIKSILDGTHDSNYEPAQDIMEPYWRHIITQSCPNRPSNETWQSPGTNIHIWYPIRCTELRKLDASTSPGPDGLKPSDLNGMSKDTLAAVLSLIMWCGRLPTAHRDSRTIFIPKKANSSDPSDYRPITVPSILARLLNQVLAGRLLEKFPFDSRQRAFIRSDGCADNTTLLDMLLRDHHQRHAACHIASLDISKAFDTVSRKSIEVILNYYGFDKEFVDYVGILLQDSQTVLCGKGWISNALVPGRGVKQGDPLSPLLFNVVVNRLLELLPKEVGSTIGDFRLNAMAFADDLILIGKTPAGLQLLIDSCACLLESCGMSINTAKSLTISIEANAKKKITMVNSNRIFNVGQHAIPSMKRSGTWRYLGVTFTPEGRTLFMPKDELIPKLNKLQRAPLKPQQRMHALRAILIPQLYHKIALGNITISCLNKTDRIIRNTVRTWLRLPSDTPISYLHAPVSSGGLGVPSLRWVGPLLRVMRLSNLKMPCLDSCVTANTLVAAEVSKAVRRLCVNGNQLQSRQDIDKMWSGRLHATVDGVGLPDCHYLPQTNRWIREPTKLLKGRDYINSVRLRINALPSRSRTSRGRAAIDRNCRAGCQVPESLNHILQQCHRTHGARIARHNAVVKYMKSNLDNRGFATSIEPAFQLPDGSTVKPDIVACKNGTVWVLDAQIRTDGNLDVFDTDKARKYDREDLKALLRHRYNAEDAKCCGITLNWRGVWSKRSARILLNAKMITKQDLAVISTRVIIGGFAAFTTFNHNTSVRAGVG

SEQ ID NO: 18928 - protein, 961 aa, Phoronis australis
MGTMTQLVYSICKERFGEEERRKPREPAGPSRRQIEISQIGQELRHMKKLWKKAVQQEKEGLAQLRFELRSRLLRLSKAERLRKKRAERTRTRERFMANPFKFVKGILGKEASGRLKCTQEELENHLKDVHSDGARNAQLADFDWLDVEDAPSVALEMGDIKFSEVKNVIEKSRSGSAPGPSGLPYKVYKKCPRLLRRLWKLLRVIWKQKILPDTWGKAEGVYIPKVKGAIRIGDFRPISLLDVEGKIFFAVISARMTSYLLSNKFVDPTVQKGGIPGYAGCLEHNSAITELIKDAKRNKADLAVVWLDMANAYGSMPHALIELAMETYHIPRELRDLITSYFRGTYMRFTVNDFTTGWQPLEKGIMTGCTISIILFIMAMNVIIKRASKECRGPLLQGKRMPPCRAFVDDLTITTGFAVGAAWVVKTLGELANWARMSFKVEKSRSLVIVKGKVNPHHTFKIGSEAIPSVSRKPVKYLGKFYSGSLKDVEHVKAAIKELSDNLIKIEKSGLPGRFKVWCYQFGLFPKVMWPLTMYDFSISTAEKMERMVSRWLRKWLGVPPSFARLGLYIKGGAVSLPVTSIVEEFKVIKCRTLLTLRNSRDEMIRESELSVDSGRKWKAAVAVEEAESRLRHKDIVGTVCHGRQGLGMVPGKRWKLSTGKERRKMVLDEVRSQENERRYAEAVGLRKQGAWTSWEGVNSRRITGKDLLSSDQFRLGFLLGSIYDTLPTPVNLRTWGKTEDDSCRGCGKRCTLEHVLSSCREALTSGKYTWRHDKILKCIAHVLDLERRKATNSGKALIQFNKGGVSTKRRDSGILGMAVDWKMVTDVVTRGSFPSHIAVTQLRPDIVLWADSKKIVTLIELTVPWETRVQEAHERKLLKYAELSQECAANGWKCFCLPIEVGCRGFIAGSMWRMTKLLGISSRGRADMFKSTVRAAEEATVWLWLQRENKWQPQRRLEV

SEQ ID NO: 18929 - protein, 974 aa, Phoronis australis
MLRIRIYKYLNLHNIHMFRLVYSICKERFGEEERRKPREPAGPSRRQIEISQIRQELRHMKKLWKKAVQQEKEGLAQLRFELRSRLLRLSKAERLRKKRAERTRTRERFMANPFKFVKGILGKEACGRLKCTQEELENHLKDVHSDGARNAQLADFDWLDVEDAPSVALEMGDIKFSEVKNVIEKSRSGSAPGPSGLPYKVYKKCPRLLRRLWKLLRVIWKQKILPDTWGKAEGVYIPKVKGAIRIGDFRPISLLDVEGKIFFAVISARMTSYLLSNKFVDPTVQKGGIPGYAGCLEHNSAITELIKDAKRNKADLAVVWLDMANAYGSMPHALIELAMETYHIPRELRDLITSYFRGTYMRFTVNDFTTGWQPLEKGIMTGCTISIILFIMAMNVIIKRASKECRGPLLQGKRMPPCRAFVDDLTITTGFAVGAAWVVKTLGELANWARMSFKVEKSRSLVIVKGKINQHHTFKIGSEAIPSVSRKPVKYLGKFYSGSLKDVEHVKAAIKELSDNLIKIEKSGLPGRFKIWCYQFGLFPKVMWPLTTYDFSISTAEKMERMVSRWLRKWLGVPPSFARLGLYIKGGAVFLPVTSIVEEFTVIKYKTLLTLRNSRDEMIRESELSVDSGRKWKAAVALEEAESRLRHTDIVGTVCHGRQGLGMVPGKRCKLSTGKERRKMVLDEVRSQENERRYAEAVGLRRQGAWISWEGVNSRRITGKDLLSSDQFRLGFLPGSIYDTLPTPVNLRMWGKTEDDSCRGCGKRCTLEHVLSSCREALTSGKYTWRHDKILKCIAHVLDLERRKATNSGKALIRFNKGRVSTKRRDSGILGMAVDWKMETDVVTRGSFPSHIAVTQLQPDIVLWADSKKIVTLIELTVPWETRMQEAHERKLLKYAELSQECAANGWKCFRLPIEVGCRGFIAGSMWRMTKLLGISSKGRADMFKSTVRAAEEATVWLWLQRENKWQPQRWLEV

SEQ ID NO: 18930 - protein, 990 aa, Ennomos quercinarius
MSTQNNVVSLENRIQCPDCPQVRLFKGQKGLKIHQSKCHRVIQIPLSAPVSGSLVASSSPTSAATPSKPFWEVLSSYKRFIPVLKRIPRGARISVAQSLSSSIRNVISKNTKHAWEHLLTFPYHVLYVKLDPTNKSSLTKRVKENCVRYKVLEEQCLDHEIIVPLNRRNNIINSKQNNDSATFKIVESKISDGDIKGAARVLFSSDTIAPYCSETIQSLQDKHPPAAANLHLPEPPLPNDVTVEVTPQEVAAAVTSFQSGSAGGLDGLTPQMLKDLLSGISGEIGEALLRVLTALVNLMLSGQVNSDVIEILYGANLCALIKKDGGIRPIAVGTTYRRLAAKVGCRKKVAFLSNLFQPIQLGFGSRGGCEAAVHSLRTFLKLNCGEVLLKVDVKNAFNSVDRGALLTQVKDKIPELYKFLYQCYGNPTKLNYQNNAILSSVGCQQGDPLGPAIFSLAIHPIIQRLQSKLNVWYLDDGTLGGDVNTVFNDLGIIINEFRDIGLDLNFSKCELFVCDTCPDKDLVFEKFNSLAPNIKLVDKRSLRLLGSPILDEYISPFVEEKIQKFNNASDRLLKINAHMAFTIIRFCLFVPKSTYILRCCQLWKHSELLMGLDSIVKNTLVSVLNVDMDDRTWSQASLPVRLGGLGIRKISSVALPAFLSSVHGTHKLIEKILAPSLGTFEVAHLSEAKNAWGLASPNSDFPVVLSSQRLWDRPLCELARKNLLDTCPSVADRARLLAVSVWESGLWLQAMPSFTTGNLLDPTTFRLAISLRLGARCCVAHRCQCGTAVDQLGHHGLSCSKSAGRISRHASLNDIIRRAFTTANAAAILEPNGLMRDDGKRPDGMTLVPWKMGRPLVWDATCVDTMAPSHLPETHVRAGAAANSAEQLKRRKYSNLGSGYIFEPFGVETLGPWGPGAHRVFQSLSERLADATRDQNAGTYLAQRISIAIQRGNAASVARQVAYPTWVRYLPVVGWSTWTVYRPSRLLYSP

SEQ ID NO: 18931 - protein, 997 aa, Crocallis elinguaria
MLLLTFFLGSIVFLIITYVKKSKLCTPEMQHCVQANVNHPIVSQNSLVQCPDCSQVRFFKGQRGLKIHQGKCHKNSNIPLSDPISNENSNTLSSLGQPFWHILSQCKISIPVLKRIPRGARLSVATVLSQAIRDVILQNSKHTWERLLYFPYAVLHVRKEPHNKTSLTTRVKENCVKYSSMEVPFFLSDNNLDLNQNSKCTLKPFTESSIFRRIENKLSDGDIKGAARMLFSSDTMAPSNPETLSILEGKHPPPAASLQLPDAPEDSDVSVEITAFDVSSAVTSFQSGSAGGLDALTPQHLKDLLCGGNGEAGEALLRDLTALINLMLSGRVNGDIIGILYGANLCALKKKDGGIRPIAIGMTYRRLAAKICCKKIAPQLENLFQPIQLGFGSRGGCEAAVHSVRTFLNKNCGELLLKVDVKNAFNSVDRGALLTQVKDKIPNLYNYLWQCYGSSTKLTYNGKEISSAVGCQQGDPLGPAVFSLAIHPIIQRLQSKLNVWYLDDGTLGGDVNTVYDDLLFLTEEFRSIGLVLNFSKCELFISDNCAAKDFILQKFNNLAPNIKVIDKYSLRLLGSPILDESFPLFVEEKIQNFLLCSDRLSKISTHMAFTIIRFCLFVPKFTYTLRCCQLWKHTDLLQSLDNIVKTTLESILNINLKDREWLQASLPVRSGGLGIRSISGVALPAFLSSVHSTQKLTQKILAASITDPEITFSTEAKNTWLLACPNSEFPNTPSSQRLWDRPLCEQVRKQLFNTYLSSAERARLLAVAEWESGLWLQALPSQNTGTLLDSSAFRIAASLRLGASCCAPHRCQCGSAVDRLGHHGLSCQRSAGRISRHASLNDIIRRAFASANCAAILEPNGLVRDDGKRPDGMTLIPWKMGRPLVWDATCVDTLAPSHLPGTQNKAGAAPESAENLKRRKYSSLDSSYIFEPFGVETLGPWGPGAHRIFKELSGRLVEATRDQNAGVYFGQRLSIAIQRGNAASILGTLPTGSGLLD

SEQ ID NO: 18932 - protein, 973 aa, Ennomos quercinarius
MSTQNNVVSLENRIQCPDCPQVRLFKGQKGLKIHQSKCHRVIQIPLSAPVSGSVVASSSPTSAATPSKPFWEVLSSYKRFIPVLKRIPRGARISVAQSLSSSIRNVISKNTKHAWEHLLTFPYHVLYVKLDPTNKSSLTKRVKENCVRYKVLEEQCLDHEIIVPLNRRNNIINSKQNNDSATFKIVESKISDGDIKGAARVLFSSDTIAPYCSETIQSLQDKHPPAAANLHLPEPPLPNDVTVEVTPQEVAAAVTSFQSGSAGGLDGLTPQILKDLLSGISGEIGEALLRDLTALVNLMLSGQVNSDVIEILYGANLCALIKKDGGIRPIAVGTTYRRLAAKVGCRKKVAFLSNLFQPIQLGFGSRGGCEAAVHSLRTFLKLNCGEVLLKVDVKNAFNSVDRGALLTQVKDKIPELYKFLYQCYGNPTKLNYQNNAILSSVGCQQGDPLGPAIFSLAIHPIIQRLQSKLNVWYLDDGTLGGDVNTVFNDLGIIINEFRDIGLDLNFSKCELFVCDTCPDKDLVFEKFNSLAPNIKLVDKRSLRLLGSPILDESISPFVEEKIQKFNNASDRLLKINAHMAFTIIRFCLFVPKFTYILRCCQLWKHSELLMGLDNIVKNTLVSVLNVDMDDRTWSQASLPVRLGGLGIRKISSVALPAFLSSVHGTHKLIEKILAPSLGTFEVAHLSEAKNAWGLACPNSDFPVVLSSQRLWDRPLCELARKNLLDTCPSVADRARLLAVSVWESGLWLQTMPSFNTGNLLDPTTFRLAISLRLGARRCVAHHCQCGTAVDQLGHHGLSCSKSAGRISRHASLNDIIRRAFTTANVAAILEPNVLMRDDGKRPDGMTLVPWKMGRPLVWDATCVDTMAPSHLPETHVRAGAAANSAEQLKRRKYSNLGSGYTFEPFGVETLGPWGPGAHRVFQSLSERLVDATRDQNAGTYLAQRVSIAIQRGNAASMLGTLPTGSGLEHLDCL

SEQ ID NO: 18933 - protein, 973 aa, Ennomos quercinarius
MSTQNNVVSLENRIQCPDCPQVRLFKGQKGLKIHQSKCHRVIQIPLSAPVSGSLVASSSPTSAATPSKPFWEVLSSYKRFIPVLKRIPRGARISVAQSLSSSIRNVISKNTKHAWEHLLTFPYHVLYVKLDPTNKSSLTKRVKENCVRYKVLEEQCLDHEIIVPLNRRNNIINSKQNNDSATFKIVESKISDGDIKGAARVLFSSDTIAPYCSETIQSLQDKHPPAAANLHLPEPPLPNDVTVEVTPQEVAAAVTSFQSGSAGGLDGLTPQILKDLLSGISGEIGEALLRDLTALVNLMLSGQVNSDVIEILYGANLCALIKKDGGIRPIAVGTTYRRLAAKVGCRKKVAFLSNLFQPIQLGFGSRGGCEAAVHSLRTFLKLNCGEVLLKVDVKNAFNSVDRGALLTQVKDKIPELYKFLYQCYGNPTKLNYQNNAILSSVGCQQGDPLGPAIFSLAIHPIIQRLQSKLNVWYLDDGTLGGDVNTVFNDLGIIINEFRDIGLDLNFSKCELFVCDTCPDKDLVFEKFNSLAPNIKLVDKRSLRLLGSPILDESISPFVEEKIQKFNNASDRLLKINAHMAFTIIRFCLFVPKFTYILRCCQLWKHSELLMGLDSIVKNTLISVLNVDMDDRTWSQASLPVRLGGLGIRKISSVALPAFLSSVHGTHKLIEKILAPSLGTFEVAHLSEAKNAWGLACPNSDFPVVLSSQRLWDRPLCELARKNLLDTCPSVADRARLLAVSVWESGLWLQAMPSFNTGNLLDPTTFRLAISLRLGARCCVAHRCQCGTAVDQLGHHGLSCSKSAGRISRHASLNDIIRRAFTTANVAAILEPNGLMRDDGKRPDGMTLVPWKMGRPLVWDATCVDTMAPSHLPETHVRAGAAANSAEQLKRRKYSNLGSGYIFEPFGVETLGPWGPGAHRVFQSLSERLVDATRDQNDGTYLAQRISIAIQRGNAASMLGTLPTGSGLEHLDCL

SEQ ID NO: 18934 - protein, 973 aa, Ennomos quercinarius
MSTQNNVVSLENRIQCPDCPQVRLFKGQKGLKIHQSKCHRVIQIPLSAPVSGSLVASSSPTSAATPSKPFWEVLSSYKRFIPVLKRIPRGARISVAQSLSSSIRNVISKNTKHAWEHLLTFPYHVLYVKLDPTNKSSLTKRVKENCVRYKVLEEQCLDHEIIVPLNRRNNIINSKQNNDSATFKIVESKISDGDIKGAARVLFSSDTIAPYCSETIQSLQDKHPPAAANLHLPEPPLPNDVTVEVTPQEVAAAVTSFQSGSAGGLDGLTPQILKDLLSGISGEIGEALLRDLTALVNLMLSGQVNSDVIEILYGANLCALIKKDGGIRPIAVGTTYRRLAAKVGCRKKVAFLSNLFQPIQLGFGSRGGCEAAVHSLRTFLKLNCGEVLLKVDVKNAFNSVDRGALLTQVKDKIPELYKFLYQCYGNPTKLNYQNNAILSSVGCQQGDPLGPAIFSLAIHPIIQRLQSKLNVWYLDDGTLGGDVNTVFNDLGIIINEFRDIGLDLNFSKCELFVCDTCPDKDLVFEKFNSLAPNIKLVDKRSFRLLGSPILDESISPFVEEKIQKFNNASDRLLKINAHMAFTIIRFCLFVPKFTYILRCCQLWKHSELLMGLDNIVKNTLVSVLNVDIDDRTWSQASLPVRLGGLGIRKISSVALPAFLSSVHGTHKLIEKILAPSLGTFEVAHLSEAKNAWGLASPNSDFPVVLSSQRLWDRPLCELARKNLLDTCPSVADRARLLAVSVWESGLWLQAMPSFTTGNLLDPTTFRLAISLRLGARCCVAHRCQCGTAVDQLGHHGLSCSKSAGRISRHASLNDIIRRAFTTANAAAILEPNGLMRDDGKRPDGMTLVPWKMGRPLVWDATCVDTMAPSHLPETHVRAGAAANSAEQLKRRKYSNLGSGYIFEPFGVETLGPWGPGAHRVFQSLSERLVDATRDQNAGTYLAQRISIAIQRGNAASMLGTLPTGSGLEHLDCL

SEQ ID NO: 18935 - protein, 998 aa, Hylaea fasciaria
MLCFIVVCLIILCYFYKYITSLFNTPNMPRCVQASESDTSNQQVVSLEDRVQCHECSQVRVFKGQRGLKIHQSKCHKNVDTPLSAPITNHSFASSAYQPFWKTLSQTKMSKPVLKRIPRGARFSVATVLSQAIRSVISQNTNRAWEHLLFLPYAVLYVSPDQNNKKSLTTRVKENCVQYSALVEPALLSGRDLVLNQSPNFTVKPVTESATIKLVESKLSDGDIKGAARILFSSDTIAPATPETLLELEGKHPTPAANLQLPEAPSDSDASIEITAQDISAAVASFQSGSAGGLDALTPQHLKDLLSGGSGETGEALLRDLTTLITLMLSGRVNRDITEILYGANLCALKKKDGGVRPIAVGMTYRRLAAKICCKKSAPELANLFQPVQLGFGSRGGCEAAVHSVRTFLDQNCGEVLLKVDVKNAFNSVDRGALLTEVKDKIPNLYKFIWQCYSSATKLTYLGHEILSAVGCQQGDPLGPAIFSLAIHPIIQRLQSKLNVWYLDDGTFGGDADTVYGDLLFLIQEFRDIGLELNFSKCELFVSDNCLTKDLVVQKFNTLAPNIKIIDKCSLRLLGSPILDESFPSFFDEKIQNFLQCSDRLSKLNTHMAFTILKYCLFVPKFTYILRCCQLWTHTELLQSLDNIVKNTLASILNLNFEERTWLQASLPVRLGGLGVRSISGVSLPAFLSSVHSTQNLITKILAASLDISVISHMNEARSAWVLACPNTDFPSSTSSQRLWDGPICELTRKKLLNTCSSSTDRARLLAVAEWESGLWLQALPSPNTGTLMDSTSFRISVSLRLGASCCAPHRCQCGTAVDRLGHHGLSCNRSAGRIPRHSSLNDIIRRGFATANCAAILEPSGLMRDDGKRPDGMTLIPWKMGRPLVWDATCVDTLAPSHLSRTETRAGAAAESAEDLKGRKYSALDSGYLFVPFGVETLGPWGPGAHKIFKDLSGRLVDATRDQNAGLYFGQRLSIAIQRGNAASILGTLPTGSGLLD

SEQ ID NO: 18936 - protein, 1001 aa, Ennomos quercinarius
MLLWTIFIVCFLLVFLKIVTKHTRSSMAMQHCAQMDHNSGNDHHTVSLESQVQCPECTQVRFFKGQRGLRIHYGKCHKSPNVPQSASFSSPSPVHPAFSASQTFSKTLAHSKKNIPVLKRIPRGARVSVATALSQAIKAVTSQNSKRTWEHLLYFPYAVFFVRRDPSNRKSLTARVKENCVKYSNMEEPFFPSDINSNQHQNSKKSKSCPESAPYRLVESKLSDGDIKGAARILFSSDTLAPATPETLSILEGKHPPPAANLQLPDAPLESDVAVEVSALDVSAAVTSFQSGSAGGLDALSPQHLKDLLCGGSGEVSEALLKDLTALINLMLSGQVNGDVIQLLYGANLCALKKKDGGIRPIAVGTTYRRLAAKICCKKSAPLLANLFQPVQLGFGSRGGCEAAVHSTRTFLSNSCGDVLLKFDVKNAFNSVDRGALLTQVKDKIPNLYNFIWQCYGGSTTLTYNGNEILSAVGCQQGDPLGPAIFSLAIHPIIQRLQSKLNVWYLDDGTLGGDVTTVYNDLLFLVDEFRAIGLELNFSKCELFISDDIPTKDLVLQKFNSLASNIKIIDKYSLRLLGSPILDEAFPQFIEEKIQNFLQCSERLTKINTHMAFTIIRYCLFVPKFTYTLRCSQLWKHTELLHRLDNIVKSALATILNINLHEREWLQASLPVRMGGLGIRSISGVALPAFLSSVHSTQNLTEKILATSLGNVEVTFFGEARNAWLLACPNTEIPKSVSSQRLWDGPLCGQVRNQLIHTCSSSADRARLLAVSVWESGLWLQALPSQNTGTLLNSSSFRIAASLRLGASCSAPHHCQCGSAVDQLGHHGLSCVRSAGRIPRHASLNDIIRRAFTSANCAAILEPNGLVRDDGKRPDGMTLIPWKMGRPLVWDATCVDTLAPSHLPETQNKAGAAADSAEKLKRRKYSNLDSGFIFAPFGVETLGPWGPSAHKVFKELCKRLVEATRDQNAGLYLGQRLSIAIQRGNAASILGTLPTGSGLLD

SEQ ID NO: 18937 - protein, 973 aa, Ennomos quercinarius
MSTQNNVVSLENRIQCPDCPQVRLFKGQKGLKIHQSKCHRVIQIPLSAPVSGSLVASSSPTSAATPSKPFWEVLSSYKRFIPVLKRIPRGARISVAQSLSSSIRNVISKNTKHAWEHLLTFPYHVLYVKLDPTNKSSLTKRVKENCVRYKVLEEQCLDHEIIVPLNRRNNIINSKQNNDSATFKIVESKISDGDIKGAARVLFSSDTIAPYCSETIQSLQDKHPPAAANLHLPEPPLPNDVTVEVTPQEVAAAVTSFQSGSAGGLDGLTPQILKDLLSGISGEIGEALLRDLTALVNLMLSGQVNSDVIEILYGANLCALIKKDGGIRPIAVGTTYRRLAAKVGCRKKVAFLSNLFQPIQLGFGSRGGCEAAVHSLRTFLKLNCGEVLLKVDVKNAFNSVDRGALLTQVKDKIPELYKFLYQCYGNPTKLNYQNNAILSSVGCQQGDPLGPAIFSLAIHPIIQRLQSKLNVWYLDDGTLGGDVNTVFNDLGIIINEFRDIGLDLNFSKCELFVCDTCPDKDLVFEKFNSLAPNIKLVDKRSLCLLGSPILDESISPFVEEKIQKFNNASDRLLKINAHMAFTIIRFCLFVPKFTYILRCCQLWKHSELLMGLDSVVKNTLVSVLNVDMDDRTWSQASLPVRLGGLGIRKISSVALPAFLSSVHGTHKLIEKILAPSLGTFEVAHLSEAKNAWGLACPNSDFPVVLSSQRLWDRPLCELARKNLLDTCPSVADRARLLAVSVWESGLWLQAMPSFNTGNLLDPTTFRLAISLRLGARCCVAHRCQCGTAVDQLGHHGLSCSKSAGRISRHASLNDIIRRAFTTANAAAILEPNGLMRDDGKRPDGMTLVPWKMGRPLVWDATCVDTMAPSHLPETHVRAGAAANSAEQLKRRKYNNLGSGYIFEPFGVETLGPWGPGAHRVFQSLSERLVDATRDQNAGTYLAQRISIAIQRGNAASMLGTLPTGSGLEHLDCL

SEQ ID NO: 18938 - protein, 973 aa, Ennomos quercinarius
MSTQNNVVSLENRIQCPDCPQVRLFKGQKGLKIHQSKCHRVIQIPLSAPVSGSLVASSSPTSAATPSKPFWEVLSSYKRFIPVLKRIPRGARISVAQSLSSSIRNVISKNTKHAWEHLLTFPYHVLYVKLDPTNKSSLTKRVKENCVRYKVLEEQCLDHEIIVPLNRRNNIINSKQNNDSATFKIVESKISDGDIKGAARVLFSSDTIAPYCSETIQSLQDKHPPTAANLHLPEPPLPNDVTVEVTPQEVAAAVTSFQSGSAGGLDGLTPQILKDLLSGISGEIGEALLRDLTALLNLMLSGQVNSDVIEILYGANLCALIKKDGGIRPIAVGTTYRRLAAKVGCRKKVAFLSNLFQPIQLGFGSRGGCEAAVHSLRTFLKLNCGEVLLKVDVKNAFNSVDRGALLTQVKDKIPELYKFLYQCYGNPTKLNYQNNAILSSVGCQQGDPLGPAIFSLAIHPIIQRLQSKLNVWYLDDGTLGGDVNTVFNDLGIIINEFRDIGLDLNFSKCELFVCDTCPDKDLVFEKFNSLAPNIKLVDKRSLRLLGSPILDESISPFVEEKIQKFNNASDRLLKINAHMAFTIIRFCLFVPKFTYILRCCQLWKHSELLMGLDSIVKNTLVSVLNVDMDDRTWSQASLPVRLGGLGIRKISSVALPAFLSSVHGTHKLIEKILAPSLGTFEVAHLSEAKNAWGLASPNSDFPVVLSSQRLWDRPLCELARKNLLDTCPSVADRARLLAVSVWESGLWLQAMPSFTTGNLLDPTTFRLAISLRLGARCCVAHRCQCGTAVDQLGHHGLSCSKSAGRISRHASLNDIIRRAFTTANAAAILEPNGLMRDDGKRPDGMTLVPWKMGRPLVWDATCVDTMAPSHLPETHVRAGAAANSAEQLKRRKYSNLGSGYIFEPFGVETLGPWGPGAHRVFQSLSERLVDATRDQNAGTYLAQRISIAIQRGNAASMLGTLPTGSGLEHLDCL

SEQ ID NO: 18939 - protein, 973 aa, Ennomos quercinarius
MSTQNNVVSLENRIQCPDCPQVRLFKGQKGLKIHQSKCHRVIQIPLSAPVSGSLVASSSPTSAATPSKPFWEVLSSYKRFIPVLKRIPRGARISVAQSLSSSIRNVISKNTKHAWEHLLTFPYHVLYVKLDPTNKSSLTKRVKENCVRYKVLEEQCLDHEIIVPLNRRNNIINSKQNNDSATFKIVESKISDGDIKGAARVLFSSDTIAPYCSETIQSLQDKHPPAAANPHLPEPPLPNDVTVEVTPQEVAAAVTSFQSGSAGGLDGLTPQILKDLISGISGEIGEALLRDLTALVNLMLSGQVNSDVIEILYGANLCALIKKDGGIRPIAVGTTYRRLAAKVGCRKKVAFLSNLFQPIQLGFGSRGGCEAAVHSLRTFLKLNCGEVLLKVDVKNAFNSVDRGALLTQVKDKIPELYKFLYQCYGNPTKLNYQNNAILSSVGCQQGDPLGPAIFSLAIHPIIQRLQSKLNVWYLDDGTLGGDVNTVFNDLGIIINEFRDIGLDLNFSKCELFVCDTCPDKDLVFEKFNSLAPNIKLVDKRSLRLLGSPILDESISPFVEEKIQKFNNASDRLLKINAHMAFTIIRFCLFVPKFTYILRCCQLWKHSELLMGLDSIVKNTLVSVLSVDMDDRTWSQASLPVRLGGLGIRKISSVALPAFLSSVHGTHKLIEKILAPSLGTFEVAHLSEAKNAWGLACPNSDFPVVLSSQRLWDRPLCELARKNLLDTCPSVADRARLLAVSVWESGLWLQAMPSFNTGNLLDPTTFRLAISLRLGARCCVAHRCQCGTAVDQLGHHGLSCSKSAGRISRHASLNDIIRRAFTTANVAAILEPNGLMRDDGKRPDGMTLVPWKMGRPLVWDATCVDTMAPSHLPETHVRAGAAANSAEQLKRRKYSNLGSGYIFEPFGVETLGPWGPGAHRVFQSLSERLVDATRDQNAGTYLAQRISIAIQRGNAASMLGTLPTGSGLEHLDCL

SEQ ID NO: 18940 - protein, 999 aa, Ennomos fuscantarius
MLLWTIFLVCFIVVSFKVLTNDFRPRSGMKRCTQVDKKNDNLTLSLENQVQCPECTQVRFFKGQKGLRIHQGKCHKSLDVPLLPSFSNPSLICPISSASQSFWKTLAHLKKNTPVLKRIPRGARVSVATALSQAIKKVTLENSKRSWEHLLYFPYAVLYVRRDPSNRKSLTARVKENCVKYSTLEEPLLFSNYNSDQHQNSKKLITCSESVCYKIVESKLSDGDIKGAARILFSSDTLAPDTPETLSILEGKHPPPLANLQLPDAPLESDVTVEVSAIDVSTAVTSFQSGSAGGLDALSPQHLKDLLSGGSGETSEALLRDLTALINLMLSGKVNGDIIDILYGANLCALKKKDGGIRPIAVGMTYRRLAAKICCKNTAPHLANIFQPVQLGFGSPGGCEAAVHSTRTFLSNSCGEVLLKVDVKNAFNSVDRGALLTQVKDKIPNLYNFIWQCYGTSTKLTYNGNEILSAVGCQQGDPLGPAIFSLAIHPIIQRLQSKLNVWYLDDGTLGGDVSTVYDDLLYLVGEFRAIGLELNFSKCELFVSDDIPAKDLVLQKFNCLAPNIKIIDKYSLRLLGSPVLDESFPFFFEEKIQNFEQCSERLSKINTHMAFTIIRYCLFVPKFTYILRCCQLWKHTDLLHRLDNIVKSTLETILNINLHDREWLQASLPVRMGGLGIRSISGVALPAFLSSVHSTQNLTLKILAASLDNIEITFFDEARNAWLLACPNTEVPKSLTSQRLWDGPLCEQVRNQLVHTCSSFADRARLLATAKWESGLWLQALPSRNTGTLMDSSSFRTAASLRLGASCCAPHRCQCGSTVDQLGHHGLSCVRSAGRIPRHASLNDIIRRAFTSANCAAILEPNGLVRDDGKRPDGMTLIPWKLGRPLVWDATCVDTLAPSHLPGTQVKAGAAANSAEQLKRRKYSNLDSGFIFVPFAVETLGPWGPSTHQIFKDLSKRLVEATRDQNAGLYFGQRLSIAIQRGNAASIMGTLPTGSGLFD

SEQ ID NO: 18941 - protein, 973 aa, Ennomos quercinarius
MSTQNNVVSLENRIQCPDCPQVRLFKGQKGLKIHQSKCHRVIQIPLSAPVSGSLVASSSPTSAATPSKPFWEVLSSYKRFIPVLKRIPRGARISVAQSLSSSIRNVISKNTKLAWEHLLTFPYHVLYVKLDPTNKSSLTKRVKENCVRYKVLEEQCLDHEIIVPLNRRNNIINSKQNNDSATFKIVESKISDGDIKGAARVLFSSDTIAPYCSETIQSLQDKHPPAAANLHLPEPPLPNDVTVEVTPQEVAAAVTSFQSGSAGGLDGLTPQILKDLLSGISGEIGEALLRDLTALVNMMLSGQVNSDVIEILYGANLCALIKKDGGIRPIAVGTTYRRLAAKVGCRKKVAFLSNLFQPIQLGFGSRGGCEAAVHSLRTFLKLNCGEVLLKVDVKNAFNSVDRGALLTQVKDKIPELYKFLYQCYGNPTKLNYQNNAILSSVGCQQGDPLGPAIFSLAIHPIIQRLQSKLNVWYLDDGTLGGDVNTVFNDLGIIINEFRDIGLDLNFSKCELFVCDTCPDKDLVFEKFNSLAPNIKLVDKRSLRLLGSPILDESISPFVEEKIQKFNNASDRLLKINAHMAFTIIRFCLFVPKFTYILRCCQLWKHSELLMGLDSIVKNTLVSVLNVDMDDRTWSQASLPVRLGGLGIRKISSVALPAFLSSVHGTHKLIEKILAPSLGTFEVAHLSEAKNAWGLACPNSDFPVVLSSQRLWDRPLCELARKNLLDTCPSVADRARLLAVSVWESGLWLQAMPSFNTGNLLDPTTFCLAISLRLGARCCVAHRCQCGTAVDQLGHHGLSCSKSAGRISRHASLNDIIRRAFTTANVAAILEPNGLMRDDGKRPDGMTLVPWKMGRALVWDATCVDTMAPSHLPETHVRAGAAANSAEQLKRRKYSNLGSGYIFEPFGVETLGPWGPGAHRVFQSLSERLVDATRDQNAGTYLAQRISIAIQRGNAASMLGTLPTGSGLEHLDCL

SEQ ID NO: 18942 - protein, 975 aa, Ennomos quercinarius
MAMQHCAQMDHNSGNDHHTVSLESQVQCPECTQVRFFKGQRGLRIHYGKCHKSPNVPQSASFSSPSPVHPAFSASQTFSKTLAHSKKNIPVLKRIPRGARVSVATALSQAIKAVTSQNSKRTWEHLLYFPYAVFFVRRDPSNRKSLTARVKENCVKYSNMEEPFFPSDINSNQHQNSKKSKSCPESAPYRLVESKLSDGDIKGAARILFSSDTLAPATPETLSILEGKHPPPAANLQLPDAPLESDVAVEVSALDVSAAVTSFQSGSAGGLDALSPQHLKDLLCGGSGEVSEALLKDLTALINLMLSGQVNGDVIQLLYGANLCALKKKDGGIRPIAVGTTYRRLAAKICCKKSAPLLANLFQPVQLGFGSRGGCEAAVHSTRTFLSNSCGDVLLKVDVKNAFNSVDRGALLTQVKDKIPNLYNFIWQCYGGSTTLTYNGNEILSAVGCQQGDPLGPAIFSLAIHPIIQRLQSKLNVWYLDDGTLGGDVTTVYTDLLFLVDEFRAIGLELNFSKCELFISDDIPTKDLVLQKFNSLASNIKIIDKYSLRLLGSPILDEAFPQFIEEKIQNFLQCSERLTKINTHMAFTIIRYCLFVPKFTYTLRCSQLWKHTELLHRLDNIVKSTLATILNINLHEREWLQASLPVRMGGLGIRSISGVALPAFLSSVHSTQNLTEKILATSLGNVEVTFFGEARNAWLLACPNTEIPKSVSSQRLWDGPLCGQVRNQLIHTCSSSADRARLLAVSVWESGLWLQALPSQNTGTLLDSSSFRIAASLRLGASCSAPHHCQCGSAVDQLGHHGLSCVRSAGRIPRHARLNDIIRRAFTSANCAAILEPNGLVRDDGKRPDGMTLIPWKMGRPLVWDATCVDTLAPSHLPETQNKAGAAADSAEKLKRRKYSNLDSGFIFAPFGVETLGPWGPSAHKVFKELCKRLVEATRDQNAGLYLGQRLSIAIQRGNAASILGTLPTGSGLLD

SEQ ID NO: 18943 - protein, 973 aa, Ennomos quercinarius
MSTQNNVVSLENRIQCPDCPQVRLFKGQKGLKIHQSKCHRVIQIPLSAPVSGSLVASSSPTSAATPSKPFWEVLSSYKRFIPVLKRIPRGARISVAQSLSSSIRNVISKNTKHAWEHLLTFPYHVLYVKLDPTNKSSLTKRVKENCVRYKVLEEQCLDHEIIVPLNRRNNIINSKQNNDSATFKIVESKISDGDIKGAARVLFSSDTIAPYCSETIQSLQDKHPPAAANLHLPEPPLPNDVTVEVTPQEVAAAVTSFQSGSAGGLDGLTPQILIDLLSGISGEIGEALLRDLTALVNLMLSGQVNSDVIEILYGANLCALIKKDGGIRPIAVGTTYRRLAAKVGCRKKVAFLSNLFQPIQLGFGSRGGCEAAVHSLRTFLKLNCGEVLLKVDVKNAFNSVDRGALLTQVKDKIPELYKFLYQCYGNPTKLNYQNNAILSSVGCQQGDPLGPAIFSLAIHPIIQRLQSKLNVWYLDDGTLGGDVITVFNDLGIIINEFRDIGLDLNFSKCELFVCDTCPDKDLVFEKFNSLAPNIKLVDKRSLRLLGSPILDESISPFVEEKIQKFNNASDRLLKINAHMAFTIIRFCLFVPKFTYILRCCQLWKHSELLMGLDSIVKNTLVSVLNVDMDDRTWSQASLPVRLGGLGIRKISSVALPAFLSSVHGTHKLIEKILAPSLGTFEVAHLSEAKNAWGLACPNSDFPVVLSSQRLWDRPLCELARKNLLDTCPSVADRARLLAVSVWESGLWLQAMPSFNTGNLLDPTTFRLAISLRLGARCCVAHRCQCGTAVDQLGHHGLSCSKSAGRISRHASLNDIIRRAFTTANAAAILEPNGLMRDDGKRPDGMTLVPWKVGRPLVWDATCVDTMAPSHLPETHVRAGAAANSAEQLKRRKYSNLGSGYIFEPFGVETLGPWGPGAHRVFQSLSERLVDATRDQNAGTYLAQRISIAIQRGNAASMLGTLPTGSGLEHLDCL

SEQ ID NO: 18944 - protein, 973 aa, Ennomos quercinarius
MSTQNNVVSLENRIQCPDCPQVRLFKGQKGLKIHQSKCHRVIQIPLSAPVSGSVVASSSPTSAATPSKPFWEVLSSYKRFIPVLKRIPRGARISVAQSLSSSIRNVISKNTKHAWEHLLTFPYHVLYVKLDPTNKSSLTKRVKENCVRYKVLEEQCLDHEIIVPLNRRNNIINSKQNNDSATFKIVESKISDGDIKGAARVLFSSDTIAPYCSETIQSLQDKHPPAAANLHLPEPPLPNDVTVEVTPQEVAAAVTSFQSGSAGGLDGLTPQILKDLLSGISGEIGEALLRDLTALVNLMLSGQVNSDVIEILYGANLCALIKKDGGIRPIAVGTTYRRLAAKVGCRKKVAFLSNLFQPIQLGFGSRGGCEAAVHSLRTFLKLNCGEVLLKVDVKNAFNSVDRGALLTQVKDKIPELYKFLYQCYGNPTKLNYQNNAILSSVGCQQGDPLGPAIFSLAIHPIIQRLQSKLNVWYLDDGTLGGDVNTVFNDLGIIINEFRDIGLDLNFSKCELFVCDTCPDKDLVFEKFNSLAPNIKLVDKRSLRLLGSPILDESISPFVEEKIQKFNNASDRLLKINAHMAFTIIRFCLFVPKFTYILRCCQLWKHSELLMGLDNIVKNTLVSVLNVDMDDRTWSQASLPVRLGGLGIRKISSVALPAFLSSVHGTHKLIEKILAPSLGTFEVAHLSEAKNAWGLACPNSDFPVVLSSQRLWDRPLCELARKNLLDTCPSVADRARLLAVSVWESGLWLQTMPSFNTGNLLDPTTFRLAISLRLGARCCVAHHCQCGTAVDQLGHHGLSCSKSAGRISRHASLNDIIRRAFTTANVAAILEPNGLMRDDGKRPDGMTLVPWKMGRPLVWDATCVDTMAPSHLPETHVRAGAAANSAEQLKRRKYSNLGSGYIFEPFGVETLGPWEPGAHRVFQSLSERLVDATRDQNAGTYLAQRISIAIQRGNAASMLGTLPTGSGLEHLDCL

SEQ ID NO: 18945 - protein, 968 aa, Ennomos quercinarius
MSTQNNVVSLENRIQCPDCPQVRLFKGQKGLKIHQSKCHRVIQIPLSAPVSGSLVASSSPTSAATPSKPFWEVLSSYKRFIPVLKRIPRGARISVAQSLSSSIRNVISKNTKHAWEHLLTFPYHVLYVKLDPTNKSSLTKRVKENCVRYKVLEEQCLDHEIIVPLNRRNNIINSKQNNDSATFKIVESKISDGDIKGAARVLFSSDTIAPYCSETIQSLQDKHPPAAANLHLPEPPLPNDVTVEVTPQEVAAAVTSFQSGSAGGLDGLTPQILKDLLSGISGEIGEALLRDLTALVNLMLSGQVNSDVIEILYGANLCALIKKDGGIRPFAVGTTYRRLAAKVGCRKKVAFLSNLFQPIQLGFGSRGGCEVCEFLKLNCGEVLLKVDVKNAFNSVDRGALLTQVKDKIPELYKFLYQCYGNPTKLNYQNNAILSSVGCQQGDPLGPAIFSLAIHPIIQRLQSKLNVWYLDDGTLGGDVNTVFNDLGIIINEFRDIGLDLNFSKCELFVCDTCPDKDLVFEKFNSLAPNIKLVDKRSLRLLGSPILDESISPFVEEKIQKFNNASDRLLKINAHMAFTIIRFCLFVPKFTYILRCCQLWKHSELLMGLDSIVKNTLVSVLNVDMDDRMWSQASLPVRLGGLGIRKISSVALPAFLSSVHGTHKLIEKILAPSLGTFEVAHLSEAKNAWGLACPNSDFPVVLSSQRLWDRPLCELARKNLLDTCPSVADRARLLAVSVWESGLWLQAMPSFNTGNLLDPTTFRLAISLRLGARCCVAHRCQCGTAVDQLGHHGLSCSKSAGRISRHASLNDIIRRAFTTANAAAILEPNGLMRDDGKRPDGMTLVPWKMGRPLVWDATCVDTMAPSHLPETHVRAGAAANSAEQLKRRKYSNLGSGYIFEPFGVETLGPWGPGAHRVFQSLSERLVDATRDQNAGTYLAQRISIAIQRGNAASMLGTLPTGSGLEHLDCL

SEQ ID NO: 18946 - protein, 973 aa, Ennomos quercinarius
MSTQNNVVSLENRIQCPDCPQVRLFKGQKGLKIHQSKCHRVIQIPLSAPVSGSLVASSSPTSAATPSKPFWEVLSSYKRFIPVLKRIPRGARISVAQSLSSSIRNVISKNTKHAWEHLLTFPYHVLYVKLDPTNKSSLTKRVKENCVRYKVLEEQCLDHEIIVPLNRRNNIINSKQNNDSATFKIVESKISDGDIKGAARVLFSSDTIAPYCSETIQSLQDKHPPAAANLHLPEPPLPNDVTVEVTPQEVAAAVTSFQSGSAGGLDGLTPQILKDLLSGISGEIGEALLRDLTALVNLMLSGQVNSDVIEILYGANLCALIKKDGGIRPIAVGTTYRRLAAKVGCRKKVAFLSNLFQPIQLGFGSRGGCEAAVHSLRTFLKLNCGEVLLKVDVKNAFNSVDRGALLTQVKDKIPELYKFLYQCYGNPTKLNYQNNAILSSVGCQQGDPLGPAIFSLAIHPIIQRLQSKLNVWYLDDGTLGGDVNTVFNDLGIIINEFRDIGLDLNFSKCELFVCDTCPDKDLVFEKFNSLAPNIKLVDKRSLRLLGSPILDESISPFVEEKIQKFNNASDRLLKINAHMAFTIIRFCLFVPKFTYILRCCQLWKHSELLMGLDSIVKNTLVSVLNVDMDDRTWSQASLPVRLGGLGIRKISSVALPAFLSSVHGTHKLIEKILAPSLGTFEVAHLSEAKNAWGLACPNSDFPVVLSSQRLWDRPLCELARKNLLDTCPSVADRARLLAVSVWESGLWLQAMPSFNTGNLLDPTTFRLAISLRLGARCCVAHRCQCGTAVDQLGHHGLSCSKSAGRISRHASLNDIIRRAFTTANVAAILEPNGLMRDDGKRPDGMTLVPWKMGRPLVWDATCVDTMAPSHLPETHVRAGAAANSAEQLKRRKYSNLGSGYIFEPFGVETLGPWGPGAHRVFQSLSERLVDATRDQNAGTYLAQRISIAIQRGNAASMLGTLPTGSGLEHLDCL

SEQ ID NO: 18947 - protein, 973 aa, Ennomos quercinarius
MSTQNNVVSLENRIQCPDCPQVRLFKGQKGLKIHQSKCHRVIQIPLSAPVSGSLVASSSPTSAATPSKPFWEVLSSYKRFIPVLKRIPRGARISVAQSLSSSIRNVISKNTKHAWEHLLTFPYHVLYVKLDPTNKSSLTKRVKENCVRYKVLEEQCLDHEIIVPLNRRNNIINSKQNNDSATFKIVESKISDGDIKGAARVLFSSDTIAPYCSETIQSLQDKHPSAAANLHLPEPPLPNDVTVEVTPQEVAAAVTSFQSGSAGGLDGLTPQILKDLLSGISGEIGEALLRDLTALVNLMLSGQVNSDVIEILYGANLCALIKKDGGIRPIAVGTTYRRLAAKVGCRKKVAFLSNLFQPIQLGFGSRGGCEAAVHSLRTFLKLNCGEVLLKVDVKNAFNSVDRGALLTQIKDKIPELYKFLYQCYGNPTKLNYQNNAILSSVGCQQGDPLGPAIFSLAIHPIIQRLQSKLNVWYLDDGTLGGDVNTVFNDLGIIINEFRDIGLDLNFSKCELFVCDTCPDKDLVFEKFNSLAPNIKLVDKRSLRLLGSPILDESISPFVEEKIQKFNNASDRLLKINAHMAFTIIRFCLFVPKFTYILRCCQLWKHSELLMGLDSIVKNTLVSVLNVDMDDRTWSQASLPVRLGGLGIRKISSVALPAFLSSVHGTHKLIEKILAPSLGTFEVAHLSEAKNAWGLACPNSDFPVVLSSQRLWDRPLCELARKNLLDTCPSVADRARLLAVSVWESGLWLQAMPSFNTGNLLDPTTFRLAISLRLGARCCVAHRCQCGTAVDQLGHHGLSCSKSAGRISRHASLNDIIRRAFTTANVAAILEPNGLMRDDGKRPDGMTLVPWKMGRPLVWDATCVDTMAPSHLPETHVRAGAAANSAEQLKRRKYSNLGSGYIFEPFGVETLGPWGPGAHRVFQSLSERLIDATRDQNAGTYLAQRISIAIQRGNAASMLGTLPTGSGLEHLDCL

SEQ ID NO: 18948 - protein, 998 aa, Crocallis elinguaria
MLLLTFFLVFIVFLIITYVKKSKLCTPEMQHCVQANGSDHPIVSQNSLVQCPDCSQVRFFKGQRGLKIHQGKCHKNSNIPLSDPISNENSNTLSSLGQPFWHILSQCKINIPVLKRIPRGARLSVATVLSQAIRDVILQNSKHTWERLLYFPYAVLYVRKEPHNKTSLTTRVKENCVKYSSMEVPFFLSDNNLDLNQNSKCTLKPITESSIFRRIENKLSDGDIKGAARMLFSSDTMAPSNPETLSILEGKHPPPAASLQLPDAPEDSDVSVEITAFDVSSAVMSFQSGSAGGLDALTPQHLKDLLCGGNGEAGEALLRDLTALINLMLSGRVNGNIIEILYGANLCALKKKDGGIRPIAIGMTYRRLAAKICCKKIAPQLENLFQPIQLGFGSRGGCEAAVHSVRTFLNKNCGELLLKVDVKNAFNSVDRGALLTQVKDKIPNLYNYLWQCYGSSTKLTYNGKEISSAVGCQQGDPLGPAVFSLAIHPIIQRLQSKLNVWYLDDGTLGGDVNTVYDDLLFLTEEFRSIGLVLNFSKCELFISDNCPAKDFILQKFNNLAPNIKVIDKYSLRLLGSPILDESFPLFVEEKIQNFLLCSDRLSKISTHMAFTIIRFCLFVPKFTYTLRCCQLWKHTDLLQTLDNIVKTTLESILNINLKDQEWLQASLPVRSGGLGIRSISGVALPAFLSSVHSTQKLTQKILAASLTEPEITFSTEAKNTWLLACPNSEFPNTPSSQRLWDRPLCEQVRKQLFNTYLSSAERARLLAVAEWESGLWLQALPSQNTGTLLDSSAFRIAASLRLGASCCAPHRCQCGSAVDRLGHHGLSCQRSAGRISRHASLNDIIRRAFASANCAAILEPNGLVRDDGKRPDGMTLIPWKMGRPLVWDATCVDTLAPSHLPGTQNKAGAAAESAENLKRRKYSSLDSSYIFEPFGVETLGPWGPGAHRIFKELSGRLVEATRDQNAGLYLGQRLSIAIQRGNAASILGTLPTGSGLLD

SEQ ID NO: 18949 - protein, 636 aa, Ennomos quercinarius
MLSGQVNSDVIEILYGANLCALIKKDGGIRPIAVGTTYRRLAAKVGCRKKVAFLSNLFQPIQLGFGSRGGCEAAVHSLRTFLKLNCGEVLLKVDVKNAFNSVDRGALLTQVKDKIPELYKFLYQCYGNPTKLNYQNNTILSSVGCQQGDPLGPAIFSLAIHPIIQRLQSKLNVWYLDDGTLGGDVNTVFNDLGIIINEFRDIGLDLNFSKCELFVCDTCPDKDLVFEKFNSLAPNIKLVDKRSLRLLGSPILDESISPFVEEKIQKFNNASDRLLKINAHMAFTIIRFCLFVPKFTYILRCCQLWKHSELLMGLDSIVKNTLVSVLNVDMDDRTWSQASLPVRLGGLGIRKISSVALPAFLSSVHGTHKLIEKILAPSLGTFEVAHLSEAKNAWGLASPNSDFPVVLSSQRLWDRPLCELARKNLLDTCPSVADRARLLAVSVWESGLWLQAMPSFTTGNLLDPTTFRLAISLRLGARCCVAHRCQCGTAVDQLGHHGLSCSKSAGRISRHASLNDIIRRAFTTANAAAILEPNGLMRDDGKRPDGMTLVPWKMGRPLVWDATCVDTMAPSHLPETHVRAGAAANSAEQLKRRKYSNLGSGYIFEPFGVETLGPWGPGAHRVFQSLSIRTYQKIIY

SEQ ID NO: 18950 - protein, 675 aa, Ennomos quercinarius
MLSGQVNSDVIEILYGANLCALIKKDGGIRPIAVGTTYRRLAAKVGCRKKVAFLSNLFQPIQLGFGSRGGCEAAVHSLRTFLKLNCGEVLLKVDVKNAFNSVDRGALLTQVKDKIPELYKFLYQCYGNPTKLNYQNNAILSSVGCQQGDPLGPAIFSLAIHPIIQRLQSKLNVWYLDDGTLGGDVNTVFNDLGIIINEFRDIGLDLNFSKCELFVCDTCPDKDLVFEKFNSLAPNIKLVDKRSLRLLGSPILDESISPFVEEKIQKFNNASDRLLKINAHMAFTIIRFCLFVPKFTYILRCCQLWKHSELLMGLDSIVKNTLVSVLNVDMDDRTWSQASLPVRLGGLGIRKISSVALPAFLSSVHGTHKLIEKILAPSLGTFEVAHLSEAKNAWGLASPNSDFPVVLSSQRLWDRPLCELARKNLLDTCPSVADRARLLAVSVWESGLWLQAMPSFTTGNLLDPTTFRLAISLRLGARCCVAHRCQCGTAVDQLGHHGLSCSKSAGRISRHASLNDIIRRAFTTANAAAILEPNGLMRDDGKRPDGMTLVPWKMGRPLVWDATCVDTMAPSHLPETHVRAGAAANSAEQLKRRKYSNLGSGYIFEPFGVETLGPWGPGAHRVFQSLSERLVDATRDQNAGTYLAQRISIAIQRGNAASMLGTLPTGSGLVHLDCL

SEQ ID NO: 18951 - protein, 973 aa, Ennomos quercinarius
MSTQNNVVSLENRIQCPDCPQVRLFKGQKGLKIHQSKCHRVIQIPLSAPVSGSLVASSSPTSAATPSKPFWEVLSSYKRFIPVLKRIPRGARISVAQSLSSSIRNVISKNTKHAWEHLLTFPYHVLYVKLDPTNKSSLTKRVKENCVRYKVLEEQCLDHEIIVPLNRRNNIINSKQNNDSATFKIVESKISDGDIKGAARVLFSSDTIAPYCSETIQSLQDKHPPAAANLHLPEPPLPNDVTVEVTPQEVAAAVTSFQSGSAGGLDGLTPQILKDLLSGISGEIGEALLRDLTALVNLMLSGQVNSDVIEILYGANLCALIKKDGGIRPIAVGTTYRRLAAKVGCRKKVAFLSNLFQPIQLGFGSRGGCEAAVHSLRTFLKLNCGEVLLKVDVKNAFNSVDRGALLTQVKDKIPELYKFLYQCYGNPTKLNYQNNAILSSVGCQQGDPLGPAIFSLAIHPIIQRLQSKLNVWYLDDGTLGGDVNTVFNDLGIIINEFRDIGLDLNFSKCELFVCDTCPDKDLVFEKFNSLAPNIKLVDKRSLRLLGSPILDESISPFVEEKIQKFNNASDRLLKINAHMAFTIIRFCLFVPKFTYILRCCQLWKHSELLMGLDSIVKNTLVSVLNVDMDDRTWSQASLPVRLGGLGIRKISSVALPAFLSSVHGTHKLIEKILAPSLGTFEVAHLSEAKNAWGLASPNSDFPVVLSSQRLWDRPLCELARKNLLDTCPSVADRARLLAVSVWESGLWLQAMPSFTTGNLLDPTTFRLAISLRLGARCCVAHRCQCGTAVDQLGHHGLSCSKSAGRISRHASLNDIIRRAFTTANAAAILEPNGLMRDDGKRPDGMTLVPWKMGRPLVWDATCVDTMAPSHLPETHVRAGAAANSAEQLKRRKYSNLGSGYIFEPFGVETLGPWGPGAHRVFQSLSERLVDATRDQNAGTYLAQRISIAIQRGNAASMLGTLPTGSGLEHLDCL

SEQ ID NO: 18952 - protein, 973 aa, Ennomos quercinarius
MSTQNNVVSLENRIQCPDCPQVRLFKGQKGLKIHQSKCHRVIQIPLSAPVSGSLVASSSPTSAATPSKPFWEVLSSYKRFNPVLKRIPRGARISVAQSLSSSIRNVISKNTKHSWEHLLTFPYHVLYVKLDPTNKSSLTKRVKENCVRYKVLEEQCLDHEIIVPLNRRNNIINSKQNNDSATFKIVESKISDGDIKGAARVLFSSDTIAPYCSETIQSLQDKHPPAAANLHLPEPPLPNDVTVEVTPQEVAAAVTSFQSGSAGGLDGLTPQILKDLLSGISGEIGEALLRDLTALVNLMLSGQVNSDVIEILYGANLCALIKKDGGIRPIAVGTTYRRLAAKVGCRKKVAFLSNLFQPIQLGFGSRGGCEAAVHSLRTFLKLNCGEVLLKVDVKNAFNSVDRGALLTQVKDKIPELYKFLYQCYGNPTKLNYQNNAILSSVGCQQGDPLGPAIFSLAIHPIIQRLQSKLNVWYLDDGTLGGDVNTVFNDLGIIINEFRDIGFDLNFSKCELFVCDTCPDKDLVFEKFNSLAPNIKLVDKRSLRLLGSPILDESISPFVEEKIQKFNNASDRLLKINAHMAFTIIRFCLFVPKFTYILRCCQLWKHSELLMGLDSIVKNTLVSVLNVDMFDRTWSQASLPVRLGGLGIRKISSVALPAFLSSVHGTHKLIEKILAPSLGTFEVAHLSEAKNAWGLACPNSDFPVVLSSQRLWDRPLCELARKNLLDTCPSVADRARLLAVSVWESGLWLQAMPSFNTGNLLDPTTFRLAISLRLGARCCVAHRCQCGTAVDQLGHHGLSCSKSAGRISRHASLNDIIRRAFTTANVAAILEPNGLMRDDGKRPDGMTLVPWKMGRPLVWDATCVDTMAPSHLPETHVRAGAAANSAEQLKRRKYSNLGSGYIFEPFGVETLGPWGPGAHRVFQSLSERLVDATHDQNAGTYLAQRISIAIQRGNAASMLGTLPTGSGLEHLDCL

SEQ ID NO: 18953 - protein, 973 aa, Ennomos quercinarius
MSTQNNVVSLENRIQCPDCPQVRLFKGQKGLKIHQSKCHRVIQIPLSAPVSGSVVASSSPTSAATPSKPFWEVLSSYKRFIPVLKRIPRGARISVAQSLSSSIRNVISKNTKHAWEHLLTFPYHVLYVKLDPTNKSSLTKRVKENCVRYKVLEEQCLDHEIIVPLNRRNNIINSKQNNDSATFKIVESKISDGDIKGAARVLFSSDTIAPYCSETIQSLQDKHPPAAANLHLPEPPLPNDVTVEVTPQEVAAAVTSFQSGSAGGLDGLTPQILKDLLSGISGEIGEALLRDLTALVNLMLSGQVNSDVIEILYGANLCALIKKDGGIRPIAVGTTYRRLAAKVGCRKKVAFLSNLFQPIQLGFGSRGGCEAAVHSLRTFLKLNCGEVLLKVDVKNAFNSVDRGALLTQVKDKIPELYKFLYQCYGNPTKLNYQNNAILSSVECQQGDPLGPAIFSLAIHPIIQRLQSKLNVWYLDDGTLGGDVNTVFNDLGIIINEFRDIGLDLNFSKCELFVCDTCPDKDLVFEKFNSLAPNIKLVDKRSLRLLGSPILDESISPFVEEKIQKFNNASDRLLKINAHMAFTIIRFCLFVPKFTYILRCCQLWKHSELLMGLDNIVKNTLVSVLNVDMDDRTWSQASLPVRLGGLGIRKISSVALPAFLSSVHGTHKLIEKILAPSLGTFEVAHLSEAKNAWGLACPNSDFPVVLSSQRLWDRPLCELARKNLLDTCPSVADRARLLAVSVWESGLWLQTMLSFNTGNLLDPTTFRLAISLRLGARCCVAHHCQCGTAVDQLGHHGLSCSKSAGRISRHASLNDIIRRAFTTANVAAIVEPNGLMRDDGKRPDGMTLVPWKMGRPLVWDATCVDTMAPSHLPETHVRAGAAANSAEQLKRRKYSNLGSGYIFEPFGVETLGPWGPGAHRVFQSLSERLVDATRDQNAGTYLAQRVSIAIQRGNAASMLGTLPTGSGLEHLDCL

SEQ ID NO: 18954 - protein, 973 aa, Ennomos quercinarius
MSTQNNVVSLENRIQCPDCPQVRLFKGQKGLKIHQSKCHRVIQIPLSAPVSGSLVASSSPTSAATPSKPFWEVLSSYKRFIPYLKRILRGARISVAQSLSSSIRNVISKNTKHAWEHLLTFPYHVLYVKLDPTNKSSLTKRVKENCVRYKVLEEQCLDHEIIVPLNRRNNIINSKQNNDSATFKIVESKISDGDIKGAARVLFSSDTIAPYCSETIQSLQDKHPPAAANLHLPEPPLPNDVTVEVTPQEVAAAVTSFQSGSAGGLDGLTPQILKDLLSGISGEIGEALLRDLTALINLMLSGQVNSDVIEILYGANLCALIKKDGGIRPIAVGTTYRRLAAKVGCRKKVAFLSNLFQPIQLGFGSRGGCEAAVHSLRTFLKLNCGEVLLKVDVKNAFNSVDRGALLTQVKDKIPELYKFLYQCYGNPTKLNYQNNAILSSVGCQQGDPLGPAIFSLAIHPIIQRLQSKLNVWYLDDGTLGGDVNTVFNDLGIIINEFRDIGLDLNFSKCELFVCDTCPDKDLVFEKFNSLAPNIKLVDKRSLRLLGSPILDESISPFVEEKIQKFNNASDRLLKINAHMAFTIIRFCLFVPKFTYILRCCQLWKHSELLMGLDSIVKNTLVSVLNVDMDDRTWSQASLPVRLGGLGIRKMLSVALPAFLSSVHGTHKLIEKILAPSLGTFEVAHLSEAKNAWGLASPNSDFPVVLSSQRLWDRPLCELARKNLLDTCPSVADRARLLAVSVWESGLWLQAMPSFTTGNLLDPTTFRLAISLRLGARCCVAHRCQCGTAVDQLGHHGLSCSKSAGRISRHASLNDIIRRAFTTANAAAIVEPNGLMRDDGKRPDGMTLVPWKMGRPLVWDATCVDTMAPSHLPETHVRAGAAANSAEQLKRRKYSNLGSGYIFEPFGVETLGPWGPGAHRVFQSLSERLVDATRDQNAGTYLAQRISIAIQRGNAASMLGTLPTGSGLVHLDCL

SEQ ID NO: 18955 - protein, 973 aa, Ennomos quercinarius
MSTQNNVVSLENRIQCPDCPQVRLFKGQKGLKIHQSKCHRVIQIPLSAPVSGSLVASSSPTSAATPSKPFWEVLSSYKRFIPVLKRIPRGARISVAQSLSSSIRNVISKNTKHAWEHLLTFPYHVLYVKLDPTNKSSLTKRVKENCVRYKVLEEQCLDHEIIVPLNRRNNIINSKQNNDSATFKIVESKISDGDIKGAARVLFSSDTIAPYCSETIQSLQDKHPPAAANLHLPEPPLPNDVTVEVTPQEVAAAVTSFQSGSAGGLDGLTPQILKDLLSGISGEIGEALLRDLTALVNLMLSGQVNSDVIEILYGANLCALIKKDGGIRPIAVGTTYRRLAAKVGCRKKVAFLSNLFQPIQLGFGSRGGCEAAVHSLRTFLKLNCGEVLLKVDVKNAFNSVDRGALLTQVKDKIPELYKFLYQCYGNPTKLNYQNNAILSSVGCQQGDPLGPAIFSLAIHPIIQRLQSKLNVWYLDDGTLGGDVNTVFNDLGIIINEFRDIGLDLNFSKCELFVCDTCPDKDLVFEKFNSLAPNIKLVDKRSLRLLGSPILDESISPFVEEKIQKFNNASDRLLKINAHMAFTIIRFCLFVPKFTYILRCCQLWKHSELLMGLDSIVKNTLVSVLNVDMDDRTWSQASLPVRLGGLGIRKISSVALPAFLSSVHGTHKLIEKILAPSLGTFEVAHLSEAKNAWGLACPNSDFPVVLSSQRLWDRPLCELARKNLLDTCPSVADRARLLAVSVWESGLWLQAMPSFNTGNLLDPTTFRLAISLRLGARCCVAHRCQCGTAVDQLGHHGLSCSKSAGRISRHASLNDIIRRAFTTANVAAILEPNGLMRDDGKRPDGMTLVPWKMGRPLVWDATCVDTMAPSHLPETHVRAGAAANSAEQLKRRKYSNLGSGYIFEPFGVETLGPWGPGAHRVFQSLSERLVDATRDQNAGTYLAHRISIAIQRGNAASMLGTLPTGSGLEHLDCL

SEQ ID NO: 18956 - protein, 973 aa, Ennomos quercinarius
MSTQNNVVSLENRIQCPDCPQVRLFKGQKGLKIHQSKCHRVIQIPLSAPVSGSLVASSSPTSAATPSKPFWEVLSSYKRFIPVLKRIPRGARISVAQSLSSSIRNVISKNTKHAWEHLLTFPYHVLYVKLDPTNKSSLTKRVKENCVRYKVLEEQCLDHEIIVPLNRRNNVINSKQNNDSATFKIVESKISDGDIKGAARVLFSSDTIAPYCSETIQSLQDKHPPAAANLHLPEPPLPNDVTVEVTPQEVAAAVTSFQSGSAGGLDGLTPQILKDLLSCISGEIGEALLRDLTALVNLMLSGQVNSDVIEILYGANLCALIKKDGGIRPIAVGTTYRRLAAKVGCRKKVAFLSNLFQPIQLGFGSRGGCEAAVHSLRTFLKLNCGEVLLKVDVKNAFNSVDRGALLTQVKDKIPELYKFLYQCYGNPTKLNYQNNAILSSVGCQQGDPLGPAIFSLAIHPIIQRLQSKLNVWYLDDGTLGGDVNTVFNDLGIIINEFRDIGLDLNFSKCELFVCDTCPDKDLVFEKFNSLAPNIKLVDKRSLRLLGSPILDESISPFVEEKIQKFNNASDRLLKINAHMAFTIIRFCLFVPKFTYILRCCQLWKHSELLMGLDSIVKNTLVSVLNVDMDDRTWSQASLPVRLGGLGIRKISSVALPAFLSSVHGTHKLIEKILAPSLGTFEVAHLSEAKNAWGLASPNSDFPVVLSSQRLWDRPLCELARKNLLDTCPSVADRARLLAVFVWESGLWLQAMPSFTTGNLLDPTTFRLAISLRLGARCCVAHRCQCGTAVDQLGHHGLSCSKSAGRISRHASLNDIIRRAFTTANAAAILEPNGLMRDDGKRPDGMTLVPWKMGRPLVWDATCVDTMAPSHLPETHVRAGAAANSAEQLKRRKYSNLGSGYIFEPFGVETLGAWGPGAHRVFQSLSERLVDATRDQNAGTYLAQRISIAIQRGNAASMLGTLPTGSGLEHLDCL

SEQ ID NO: 18957 - protein, 1002 aa, Cosmia trapezina
MLLYIFFFIFISFAFVFKVFLSLVFPLEMPQCAQANEVENSQGVSVENQVQCHECSQVRFFKGQKGLKIHQAKCHKSDNIPLSTSNSNQETNSSRTSPDITFWKTLSHCKISLPVLKRIPRGARISVATALSHAVKAVLLHNSKRTWEHLLFFPYAVLHVTSDPKIKKSLTVRVKENCVRYGVLEDTFSLLDNISFTNRNPKFTLRPFSESATYKLVESKLGDGDIKGAARILFSSDTLAPATPETLSILKEKHPPPAENLHLPEAPEESDDAAVEVTAQEVSAAVASFQSGSAGGLDALTPQHLKDLLCGGTGETGETLLRDLTALINLMLSGRVNGDIVEILYGANLCALKKKDGGIRPIAVGTTYRRLAAKTCCKNAGLTLASIFQPVQLGFGSRGGCEVAVHSVRTFLNQNCGDVLLKVDVKNAFNSVDRGALLTQVKDKIPNLYRFLWQCYGSPTKLTYHGNEILSATGCQQGDPLGPAIFSLAIHPIIQRLHSKLNVWYLDDGTLGGDANTLYDDLRNLIDEFHSIGLNLNFSKCELYVSDTYAAKDLVIQNFNNLAPNITVINKCSLRLLGSPILDESFPLFFEEKIQNFLQYSDRLFKINTHMAFTIVRFCLFVPKFTYIIRCCQLWKHIEILQNLDNIIKTTLASILNINLEERAWLQASLPVRLGGLGVRSISGVALPAFLSSIHSTQNLSKKVLAASLDSFEITYFNEARNTWLLACPNTEFPKIFTSQRLWDGPLCEQVRKQLLHTCLNSADRARLLAVAQWESGLWLQALPSLNTGTLMDTSTFRLAASLRLGASCFAPHRCQCGTAVDRLGHHGLSCTSSAGRIPRHASLNDIIRRAFTTANCAAILEPRGLSRDDGKRPDGMTLIPWKMGWPLVWDATCVDTLAPSHLPGTQNRTGAAAESAENLKRRKYSSLDSGYMFEPFGVETLGPWGPGAHKIFKDLSARLVKATRDQNAGLYFAQRLSIAIQRGNAASILGTLPTGSGFIDL

SEQ ID NO: 18958 - protein, 973 aa, Ennomos quercinarius
MSTQNNVVSLENRIQCPDCPQVRLFKGQKGLKIHQSKCHRVIQIPLSAPVSGSVVASSSPTSAATPSKPFWEVLSSYKRFIPVLKRIPRGARISVAQSLSSSIRNVISKNTKHAWEHLLTFPYHVLYVKLDPTNKSSLTKRVKENCVRYKVLEEQCLDHEIIVPLNRRNNIINSKQNNDSATFKIVESKISDGDIKGAARVLFSSDTIAPYCSETIQSLQDKHPPAAANLHLPEPPLPNNVTVEVTPQEVAAAVTSFQSGSAGGLDGLTPQILKDLLSGISGEIGEALLKDLTALVNLMLSGQVNSDVIEILYGANLCALIKKDGGIRPIAVGTTYRRLAAKVGCRKKVAFLSNLFQPIQLGFGSRGGCEAAVHSLRTFLKLNCGEVLLKVDVKNAFNSVDRGALLTQVKDKIPELYKFLYQCYGNPTKLNYQNNAILSSVGCQQGDPLGPAIFSLAIHPIIQRLQSKLNVWYLDDGTLGGDVNTVFNDLGIIINEFRDIGLDLNFSKCELFVCDTCPDKDLVFEKFNSLAPNIKLVDKRSLRLLGSPILDESISPFVEEKIQKFNNASDRLLKINAHMAFTIIRFCLFVPKFTYILRCCQLWKHSELLMGLDNIVKNTLVSVLNVDMDDRTWSQASLPVRLGGLGIRKISSVALPAFLSSVHGTHKLIEKILAPSLGTFEVAHLSEAKNAWGLACPNSDFPVVLSSQRLWDRPLCELARKNLLDTCPSVADRARLLAVSVWESGLWLQTMPSFNTGNLLDPTTFRLAISLRLGARCCVAHHCQCGTAVDQLGHHGLSCSKSAGRISRHASLNDIIRRAFTTANVAAILEPNGLMRDDGKRPDGMTLVPWKMGRPLVWDATCVDTMAPSHLPETHVRAGAAANSAEQLKRRKYSNLGSGYIFEPFGVETLGPWGPGAHRVFQSLSERLVDATRDQNAGTYLAQRVSIAIQRGNAASMLGTLPTGSGLEHLDCL

SEQ ID NO: 18959 - protein, 973 aa, Ennomos quercinarius
MSTQNNVVSLENRIQCPDCPQVRLFKGQKGLKIHQSKCHRVIQIPLSAPVSGSLVASSSPTSAATPSKPFWEVLSSYKRFIPVLKRIPRGARISVAQSLSSSIRNIISKNTKHAWEHLLTFPYHVLYVKLDPTNKSSLTKRVKENCVRYKVLEEQCLDHEIIVPLNRRNNIINSKQNNDSATFKIVESKISDGDIKGAARVLFSSDTIAPYCSETIQSLQDKHPPAAANLHLPEPPLPNDVIVEVTPQEVAAAVTSFQSGSARGLDGLTPQILKDLLSGISGEIGEALLRDLTALVNLMLSGQVNSDVIEILYGANLCALIKKDGGIRPIAVGTTYRRLAAKVGCRKKVAFLSNLFQPIQLGFGSRGGCEAAVHSLRTFLKLNCGEVLLKVDVKNAFNSVDRGALLTQVKDKIPELYKFLYQCYGNPTKLNYQNNAILSSVGCQQGDPLGPAIFSLAIHPIIQRLQSKLNVWYLDDGTLGGDVNTVFNDLGIIINEFRDIGLDLNFSKCELFVCDTCPDKDLVFEKFNSLAPNIKLVDKRSLRLLGSPILDESISPFVEEKIQKFNNASDRLLKINAHMAFTIIRFCLFVPKFTYILRCCQLWKHSELLMGLDSIVKNTLVSVLNVDMDDRTWSQASLPVRLGGLGIRKISSVALPAFLSSVHGTHKLIEKILAPSLGTFEVAHLSEAKNAWGLACPNSDFPVVLSSQRLWDRPLCELARKNLLDTCPSVADRARLLAVSVWESGLWLQAMPSFNTGNLLDPTTFRLAISLRLGARCCVAHRCQCGTAVDQLGHHGLSCSKSAGRISRHASLNDIIRRAFTTANAAAILEPNGLMRDDGKRPDGMTLVPWKMGRPLVWDATCVDTMAPSHLPETHVRAGAAANSAEQLKRRKYSNLGSGYIFEPFGVETLGPWGPGAHRVFQSLSERLVDATRDQNAGTYLAQRISIAIQRGNAASMLGTLPTGSGLEHLDCL

SEQ ID NO: 18960 - protein, 973 aa, Ennomos quercinarius
MSTQNNVVSLENRIQCPDCPQVRLFKGQKGLKIHQSKCHRVIQIPLSAPVSGSLVASSSPTSAATPSKPFWEVLSSYKRFIPVLKRIPRGARISVAQSLSSSIRNVISKNTKHAWEHLLTFPYHVLYVKLDPTNKSSLTKRVKENCVRYKVLEEQCLDHEIIVPLNRRNNIINSKQNNDSATFKIVESKISDGDIKGAARVLFSSDTIAPYCSETIQSLQDKHPPAAANLHLPEPPLPNDVTVEVTPQEVAAAVTSFQSGSAGGLDGLTPQILKDLLSGISGEIGEALLRDLTALVNLMLSGQVNSDVIEILYGANLCALIKKDGGIRPIAVGTTYRRLAAKVGCRKKVAFLSNLFQPIQLGFGSRGGCEAAVHSLRTFLKLNCGEVLLKVDVKNAFNSVDRGALLTQVKDKIPELYKFLYQCYGNPTKLNYQNNAILSSVGCQQGDPLGPAIFSLAIHPIIQRLQSKLNVWYLDDGTLGGDVNTVFNDLGIIINEFRDIGLDLNFSKCELFVCDTCPDKDLVFEKFNSLAPNIKLVDKRSLRLLGSPILDESISPFVEEKIQKFNNASDRLLKINAHMAFTIIRFCLFVPKFTYILRCCQLWKHSELLMGLDSIVKNTLVSVLNVDMDDRTWSQASLPVRLGGLGIRKISSVALPAFLSSVHGTHKLIEKILAPSLGTFEVAHLSEAKNAWRLASPNSDFPVVLSSQRLWDRPLCELARKNLLDTCPSVADRARLLAVSVWESGLWLQAMPSFTTGNLLDPTTFRLAISLRLGARCCVAHRCQCGTAVDQLGHHGLSCSKSAGRISRHASLNDIIRRAFTTANAAAILEPNGLMRDDGKRPDGMTLVPWKMGRPLVWDATCVDTMAPSHLPETHVGAGAAANSAEQLKRRKYSNLGSGYIFEPFGVETLGPWGPGAHRVFQSLSERLVDATRDQNAGTYLTQRISIAIQRGNAASMLGTLPTGSGLEHLDCL

SEQ ID NO: 18961 - protein, 973 aa, Ennomos quercinarius
MSTQNNVVSLENRIQCPDCPQVRLFKGQKGLKIHQSKCHRVIQIPLSAPVSGSLVASSSPTSAATPSKPFWEVLSSYKRFIPVLKRIPRGARISVAQSLSSSIRNVISKNTKHAWEHLLTFPYHVLYVKLDPTNKSSLTKRVKENCVRYKVLEEQCLDHEIIVPLNRRNNIINSKQNNDSATFKIVESKISDGDIKGAARVLFSSDTIAPYCSETIQSLQDKHPPAAANLHLPEPPLPNDVTVEVTPQEVAAAVTSFQSGSAGGLDGLTPQILKDLLSGISGEIGEALLRDLTALVNLMLSGQVNSDVIEILYGANLCALIKKDSGIRPIAVGTTYRRLAAKVGCRKKVAFLSNLFQPIQLGFGSRGGCEAAVHSLRTFLKLNCGEVLLKVDVKNAFNSVDRGALLTQVKDKIPELYKFLYQCYGNPTKLNYQNNAILSSVGCQQGDPLGPAIFSLAIHPIIQRLQSKLNVWYLDDGTLGGDVNTVFNDLGIIINEFRDIGLDLNFSKCELFVCDTCPDKDLVFEKFNSLAPNIKLVDKRSLRLLGSPILDESISPFVEEKIQKFNNASDRLLKINAHMAFTIIRFCLFVPKFTYILRCCQLWKHSELLMGLDSIVKNTLVSVLNVDMDDRTWSQASLPVRLGGLGIRKISSVALPAFLSSVHGTHKLIEKILAPSLGTFEVAHLSEAKNAWGLASPNSDFPVVLSSQRLWDRPLCELARKNLLDTCPSVADRARLLAVSVWESGLWLQAMPSFTTGNLLDPTTFRLAISLRLGARCCVAHRCQCGTAVDQLGHHGLSCSKSAGRISRHASLNDIIRRAFTTANAAAILEPNGLMRDDGKRPDGMTLVPWKMGRPLVWDATCVDTMAPSHLPETHVRAGAAANSAEQLKRRKYSNLGSGYIFEPFGVETLGPWGPGAHRVFQSLSERLVDATRDQNAGTYLAQRISIAIQRGNAASMLGTLPTGSGLVHLDCL

SEQ ID NO: 18962 - protein, 973 aa, Ennomos quercinarius
MSTQNNVVSLENRIQCPDCPQVRLFKGQKGLKIHQSKCHRVIQIPLSAPVSGSVVASSSPTSAATPSKPFWEVLSSYKRFIAVLKRIPRGARISVAQSLSSSIRNVISKNTKHAWEHLLTFPYHVLYVKLDPTNKSSLTKRVKENCVRYKVLEEQCLDHEIIVPLNRRNNIINSKQNNDSATFKIVESKISDGDIKGAARVLFSSDTIAPYCSETIQSLQDKHPPAAANLHLPEPPLPNDVTVEVTPQEVAAAVTSFQSGSAGGLDGLTPQILKDLLSGISGEIGEALLRDLTALVNLMLSGQVNSDVIEILYGANLCALIKKDGGIRPIAVGTTYRRLAAKVGCRKKVAFLSNLFQPIQLGFGSRGGCEAAVHSLRTFLKLNCGEVLLKVDVKNAFNSVDRGALLTQVKDKIPELYKFLYQCYGNPTKLNYQNNAILSSVGCQQGDPLGPAIFSLAIHPIIQRLQSKLNVWYLDDGTLGGDVNTVFNDLGIIINEFRYIGLDLNFSKCELFVCDTCPDKDLVFEKFNSLAPNIKLVDKRSLRLLGSPILDESISPFVEEKIQKFNNASDRLLKINAHMAFTIIRFCLFVPKFTYILRCCQLWKHSEFLMGLDNIVKNTLVSVLNVDMDDRTWSQASLPVRLGGLGIRKISSVALPAFLSSVHGTHKLIEKILAPSLGTFEVAHLSEAKNAWGLACPNSDFPVVLSSQRLWDRPLCELARKNLLDTCPSVADRARLLAVSVWESGLWLQAMPSFNTGNLLDPTTFRLAISLRLGARCCVAHHCQCGTAVDQLGHHGLSCSKSAGRISRHASLNDIIRRAFTTANVAAILEPNGLMRDDGKRPDGMTLVPWKMGRPLVWDATCVDTMELPHLPETHVRAGAAANSAEQLKRRKYSNLGSGYIFEPFGVETLGPWGPGAHRVFQSLSERLVDATRDQNAGTYLAQRISIAIQRGNAASMLGTLPTGSGLEHLDCL

SEQ ID NO: 18963 - protein, 1002 aa, Cosmia trapezina
MLLYIFFFIFISFAFVFKVFLSLVFPLEMPQCAQANEVENSQGVSVENQVQCHECSQVRFFKGQKGLKIHQAKCHKSDNIPLSTSNSNQETNSSRTSPDITFWKTLSHCKISLPVLKRIPRGARIAVATALSHAVKAVLLHNSKRTWEHLLFFPYAVLHVTSDPKNKKSLTVRVKENCVRYGVLEETFSLLDNISFTNRNPKFTLRPFSESATYKLVESKLGDGDIKGAARILFSSDTLAPATPETLSILKEKHPPPAENLHLPEAPEESDDAAVEVTAQEVSAAVASFQSGSAGGLDALTPQHLKDLLCGGTGETGETLLRDLTALINLMLSGRVNGDIVEILYGANLCALKKKDGGIRPIAVGTTYRRLAAKTCCKNAGLTLASIFQPVQLGFGSRGGCEVAVHSVRTFLNQNCGDVLLKVDVKNAFNSVDRGALLTQVKDKIPNLYRFLWQCYGSPTKLTYHGNEILSATGCQQGDPLGPAIFSLAIHPIIQRLHSKLNVWYLDDGTLGGDANTVYDDLRNLIDEFHSIGLDLNFSKCELYVSDTYAAKDLVIQNFNNLAPNITVINKCSLRLLGSPILDESFPLFFEEKIQNFLQYSDRLFKINTHMAFTIVRFCLFVPKFTYIIRCCQLWKHIEILQNLDNIIKTTLASILNINLEERAWLQASLPVRLGGLGVRSISGVALPAFLSSIHSTQNLSKKVLAASLDSFEITYFNEARNAWLLACPNTEFPKIFTSQRLWDGPLCEQVRKQLLHTCLNSADRARLLAVAQWESGLWLQALPSLNTGTLMDTSTFRLAASLRLGASCCAPHRCQCGTAVDRLGHHGLSCTSSAGRIPRHASLNDIIRRAFTTANCAAILEPRGLSRDDGKRPDGMTLIPWKMGRPLVWDATCVDTLAPSHLPGTQNRTGAAAESAENLKRRKYSSLDSGYMFEPFGVETLGPWGPGAHKIFKDLSARLVEATRDQNAGLYFAQRLSIAIQRGNAASILGTLPTGSGFIDL

SEQ ID NO: 18964 - protein, 973 aa, Ennomos quercinarius
MSTQNNVVSLENRIQCPDCPQVRLFKGQKGLKIHQSKCHRVIQIPLSAPVSGSVVASSSPTSAATPSKPFWEVLSSYKRFIPVLKRIPRGARISVAQSLSSSIRNVISKNTKHAWEHLLTFPYHVLYVKLDPTNKSSLTKRVKENCVRYKVLEEQCLDHEIIVPLNRRNNIINSKQNNDSATFKIVESKISDGDIKGAARVLFSSDTIAPYCSETIQSLQDKHPPAAANLHLPEPPLPNDVTVEVTPQEVAAAVTSFQSGSAGGLDGLTPQILKDLLSGISGEIGEALLRDLTALVNLMLSGQVNSDVIEILYGANLCALIKKDGGIRPIAVGTTYRRLAAKVGCRKKVAFLSNLFQPIQLGFGSRGGCEAAVHSLRTFLKLNCGEVLLKVDVKNAFNSVDRGALLTQVKDKIPELYKFLYQCYGNPTKLNYQNNAILSSVGCQQGDPLGPAIFSLAIHPIIQRLQSKLNVWYLDDGTLGGDVNTVFNDLGIIINEFRDIGLDLNFSKCELFVCDTCPDKDLVFEKFNSLAPNIKLVDKRSLRLLGSPILDESISPFVEEKIQKFNNASDRLLKINAHMAFTIIRFCLFVPKFTYILRCCQLWKHSELLMGLDNIVKNTLVSVLNVDMDDRTWSQASLPVRLGGLGIRKISSVALPAFLSSVHGTHKLIEKILAPSLGTFEVAHLSEAKNAWGLACPNSDFPVVLSSQRLWDRPLCELARKNLLDTCPSVADRARLLAVSVWESGLWLQAMPSFNTGNLLDPTTFRLAISLRLGARCCVAHHCQCGTAVDQLGHHGLSCSKSAGRISRHASLNDIIRRAFTTANVAAILEPNGLMRDDGKRPDGMTLVPWKMGRPLVWDATCVDTMAPSHLPETHVRAGAAANSAEQLKRRKYSNLGSGYIFEPFGVETLGPWGPGAHRVFQSLSERLVDATRDQNAGTYLAQRISIAIQRGNAASMLGTLPTGSGLEHLDCL

SEQ ID NO: 18965 - protein, 973 aa, Ennomos quercinarius
MSTQNNVVSLENRIQCPDCPQVRLFKGQKGLKIHQSKCHRVIQIPLSAPVSGSVVASSSPTSAATPSKPFWEVLSSYKRFIPVLKRIPRGARISVAQSLSSSIRNVISKNTKHAWEHLLTFPYHVLYVKLDPTNKSSLTKRVKENCVRYKVLEEQCLDHEIIVPLNRRNNIINSKQNNDSATFKIVESKISDGDIKGAARVLFSSDTIAPYCSETIQSLQDKHPPAAANLHLPEPPIPNDVSVEVTPQEVAAAVTSFQSGSAGGLDGLTPQILKDLLSGISGEIGEALLRDLTALVNLMLSGQVNSDVIEILYGANLCALIKKDGGIRPIAVGTTYRRLAAKVGCRKKVAFLSNLFQPIQLGFGSRGGCEAAVHSLRTFLKLNCGEVLLKVDVKNAFNSVDRGALLTQVKDKIPELYKFLYQCYGNPTKLNYQNNAILSSVGCQQGDPLGPAIFSLAIHPIIQRLQSKLNVWYLDDGTLGGDVNTVFNDLGIIINEFRDIGLDLNFSKCELFVCDTCPDKDLVFEKFNSLAPNIKLVDKRSLRLLGSPILDESISPFVEEKIQKFNNASDRLLKINAHMAFTIIRFCLFVPKFTYILRCCQLWKHSELLMGLDNIVKNTLVSVLNVDMDDRTWSQASLPVRLGGLGIRKISSVALPAFLSSVHGTHKLIEKILAPSLGTFEVAHLSEAKNAWGLACPNSDFPVVLSSQRLWDRPLCELARKNLLDTCPSVADRARLLAVSVWESGLWLQAMPSFNTGNLLDPTTFRLAISLRLGARCCVAHHCQCGTAVDQLGHHGLSCSKSAGRISRHASLNDIIRRAFTTANVAAILEPNGLMRDDGKRPDGMTLVPWKMGRPLVWDATCVDTMAPSHLPETHVRAGAAANSAEQLKRRKYSNLGSGYIFEPFGAETLGPWGPGAHRVFQSLSERLVDATRDQNAGTYLAQRISIAIQRGNAASMLGTLPTGSGLEHLDCL

SEQ ID NO: 18966 - protein, 1001 aa, Ennomos quercinarius
MLLWTIFIVCFLLVFLKIVTKHTRSSMAMQHCAQMDHNSGNDHHTVSLESQVQCPECTQVRFFKGQRGLKIHYGKCHKSPNVPQSASFSSPSPVHPAFSASQTFSKTLAHSKKNIPVLKRIPRGARVSVATALSQAIKAVTSQNSKRTWEHLLYFPYAVFFVRRDPSNRKSLTARVKENCVKYSNMEEPFFPSDINSNQHQNSKKSKSCPESAPYRLVESKLSDGDIKGAARILFSSDTLAPATPETLSILEGKHPPPAANLQLPDAPLESDVAVEVSALDVSAAVTSFQSGSAGGLDALSPQHLKDLLCGGSGEVSEALLKDLTALINLMLSGQVNGDVIQLLYGANLCALKKKDGGIRPIAVGTTYRRLAAKICCKKSAPLLANLFQPVQLGFGSRGGCEAAVHSTRTFLSNSCGDVLLKVDVKNAFNSVDRGALLTQVKDKIPNLYNFIWQCYGGSTTLTYNGNEILSAVGCQQGDPLGPAIFSLAIHPIIQRLQSKFNVWYLDDGTLGGDVTTVYNDLLFLVDEFRAIGLELNFSKCELFISDDIPTKDLVLQKFNSLASNIKIIDKYSLRLLGSPILDEAFPQFIEEKIQNFLQCSERLTKINTHMAFTIIRYCLFVPKFTYTLRCSQLWKHTELLHRLDNIVKSTLATILNINLHEREWLQASLPVLMGGLGIRSISGVALPAFLSSVHSTQNLTEKILATSLGNVEVTFFGEARNAWLLACPNTEIPKSVSSQRLWDGPLCGQVRNQLIHTCSSSADRARLLAVSVWESGLWLQALPSQNTGTLLDSSSFRIAASLRLGASCSAPHHCQCGSAVDQLGHHGLSCVRSAGRIPRHASLNDIIRRAFTSANCAAILEPNGLVRDDGKRPDGMTLIPWKMGRPLVWDATCVDTLAPSHLPETQNKAGAAADSAEKLKRRKYSNLDSGFIFAPFGVETLGPWGPSAHKVFKELCKRLVEATRDQNAGLYLGQRLSIAIQRGNAASILGTLPTGSGLLD

SEQ ID NO: 18967 - protein, 998 aa, Hylaea fasciaria
MLCFVVVCLIILCYFYKYITSLFNTPNMPRCVQASESDTSNQQVVSLEDRVQCHECSQVRVFKGQRGLKIHQSKCHKNVDTPLSAPITNHSFASSAYQPFWKTLSQTKMSKPVLKRIPRGARFSVATVLSQAIRSVISQNTNCAWEHLLFLPYAVLYVSPDQNNKKSLTTRVKENCVQYSALVEPALLSGRDLVLNQSPNFTVKPVTESATIKLVESKLSDGDIKGAARILFSSDTIAPATPETLLELEGKHPTPAANLQLPEAPSDSDASIEITAQDISAAVASFQSGSAGGLDALTPQHLKDLLSGGSGETGEALLRDLTTLITLMLSGRVNRDITEILYGANLCALKKKDGGVRPIAVGMTYRRLAAKICCKKSAPELANLFQPVQLGFGSRGGCEAAVHSVRTFLDQNCGEVLLKVDVKNAFNSVDRGALLTEVKDKIPNLYKFIWQCYSSATKLTYLGHEILSAVGCQQGDPLGPAIFSLAIHPIIQRLQSKLNVWYLDDGTFGGDADTVYGDLLFLIQEFRDIGLELNFSKCELFVSDNCLTKDLVVQKFNTLAPNIKIIDKCSLRLLGSPILDESFPSFFDEKIQNFLQCSDRLSKLNTHMAFTILKYCLFVPKFTYILRCCQLWTHTELLQSLDNIVKNTLASILNLNFEERTWLQASLPVRLGGVGVRSISGVSLPAFLSSDHSTQNLITKILAASLDISVISHMNEARSAWVLACPNTDFPSSTSSQRLWDGPICELTRKKLLNTCSSSTDRARLLAVAEWESGLWLQALPSPNTGTLMDSTSFRISVSLRLGASCCAPHRCQCGTAVDRLGHHGLSCSRSAGRIPRHSSLNDIIRRGFATANCAAILEPSGLMRDDGKRPDGMTLIPWKMGRPLVWDATCVDTLAPSHLSRTETRAGAAAESAEDLKGRKYSALDSGYLFVPFGVETLGPWGPGAHKIFKDLSGRLVDATRDQNAGLYFGQRLSIAIQRGNAASILGTLPTGSGLLD

SEQ ID NO: 18968 - protein, 973 aa, Ennomos quercinarius
MSTQNNVVSLENRIQCPDCPQVRLFKGQKGLKIHQSKCHRVIQIPLSAPVSGSLVASSSPTSAATPSKPFWEVLSSYKRFIPVLKRIPRGARISVAQSLSSSIRNVISKNTKHAWEHLLTFPYHVLYVKLDPTNKSSLTKRVKENCVRYKVLEEQCLDHEIIVPLNRRNNIINSKQNNDSATFKIVESKISDGDIKGAARVLFSSDTIAPYCSETIQSLQDKHPPAAANLHLPEPPLPNDVTVEVTPQEVAAAVTSFQSGSAGGLDGLTPQILKDLLSGISGEIGEALLRDLTALVNLMLSGQVNSDVIEILYGANLCALIKKDGGIRPIAVGTTYRRLAAKVGCRKKVAFLSNLFQPIQLGFGSRGGCEAAVHSLRTFLKLNCGEVLLKVDVKNAFNSVDRGALLTQVKDKIPELYKFLYQCYGNPTKLNYQNNAILSSVGCQQGDPLGPAIFSLAIHPIIQRLQSKLNVWYLDDGTLGGDVNTVFNDLGIIINEFRDIGLDLNFTKSELFVCDTCPDKDLVFEKFNSLAPNIKLVDKRSLRLLGSPILDESISPFVEEKIQKFNNASDRLLKINAHMAFTIIRFCLFVPKFTYILRCCQLWKHSELLMGLDSIVKNTLVSVLNVDMDDRTWSQASLPVRLGGLGIRKISSVALPAFLSSVHGTHKLIEKILAPSLGTFEVAHLSEAKNAWGLASPNSDFPVVLSSQRLWDRPLCELARKNLLDTCPSVADRARLLAVSVWESGLWLQAMPSFTTGNLLDPTTFRLAISLRLGARCCVAHRCQCGTAVDQLGHHGLSCSKSAGRISRHASLNDIIRRAFTTANAAAILEPNGLMRDDGKRPDGMTLVPWKMGRPLVWDATCVDTMAPSHLPETHVRAGAAANSAEQLKRRKYSNLGSGYIFEPFGVETLGPWGPGAHRVFQSLSERLVDATRDQNAGTYLAQRISIAIQRGNAASMLGTLPTGSGLVHLDCL

SEQ ID NO: 18969 - protein, 675 aa, Ennomos quercinarius
MLSGQVNSDVIEILYGANLCALIKKDGGIRPIAVGTTYRRLAAKVGCRKKVAFLSNLFQPIQLGFGSRGGCEAAVHSLRTFLKLNCGEVLLKVDVKNAFNSVDRGALLTQVKDKIPELYKFLYQCYGNPTKLNYQNNAILSSVGCQQGDPLGPAIFSLAIHPIIQRLQSKLNVWYLDDGTLGGDVNTVFNDLGIIINEFRDIGLDLNFSKCELFVCDTCPDKDLVFEKFNSLAPNIKLVDKRSLRLLGSPILDESISPFVEEKIQKFNNASDRLLKINAHMTFTIIRFCLFVPKFTYILRCCQLWKHSELLMGLDSIVKNTLVSVLNVDMDDRTWSQASLPVRLGGLGIRKISSVALPAFLSSVHGTHKLIEKILAPSLGTFEVAHLSEAKNAWGLACPNSDFPVVLSSQRLWDRPLCELARKNLLDTCPSVADRARLLAVSVWESGLWLQAMPSFNTGNLLDPTTFRLAISLRLGARCCVAHRCQCGTAVDQLGHHGLSCSKSAGRISRHASLNDIIRRAFTTANVAAILEPNGLMRDDGKRPDGMTLVPWKMGRPLVWDATCVDTMAPSHLPETHVRAGAAANSAEQLKRRKYSNLGSGYIFEPFGVETLGPWGPGAHRVFQSLSERLVDATRDQNAGTYLAQRISIAIQRGNAASMLGTLPTGSGLEHLDCL

SEQ ID NO: 18970 - protein, 395 aa, Ennomos quercinarius
MAFTIIRFCLFVPKFTYILRCCQLWKHSELLMGLDSIVKNTLVSVLNVDMDDRTWSQASLPVRLGGLGIRKISSVALPAFLSSVHGTHKLIEKILAPSLGTFEVAHLSEAKNAWGLACPNSDFPVVLSSQRLWDRPLCELARKNLLDTCPSVADRARLLAVSMWESGLWLQAMPSFNTGNLLDPTTFRLAISLRLGARCCVAHRCQCGTAVDQLGHHGLSCSKSAGRISRHASLNDIIRRAFTTANAAAILESNGLMRDDGKRPDGMTLVPWKMGRPLVWDATCVDTMAPSHLPETHVRAGAAANSAEQLKRRKYSNLGSGYIFEPFGVETLGPWGPGAHRVFQSLSERLVDATRDQNAGTYLAQRISIAIQRGNAASMLGTLPTGSGLEHLDCL

SEQ ID NO: 18971 - protein, 973 aa, Ennomos quercinarius
MSTQNNVVSLENRIQCPDCPQVRLFKGQKGLKIHQSKCHRVIQIPLSAPVSGSVVASSSPTSAATPSKPFWEVLSSYKRFIPVLKRIPRGARISVAQSLSSSIRNVISKNTKHAWEHLLTFPYHVLYVKLDPTNKSSLTKRVKENCVRYKVLEEQCLDHEIIVPLNRRNNIINSKQNNDSATFKIVESKISDGDIKGAARVLFSSDTIAPYCSETIQSLQDKHPPAAANLHLPEPPLPNDVTVEVTPQEVAAAVTSFQSGSAGGLDGLTPQILKDLLSGISGEIGEALLRDLTALVNLMLSGQVNSDVIEILYGANLCALIKKDGGIRPIAVGTTYRRLAAKVGCRKKVAFLSNLFQPIQLGFGSRGGCEAPVHSLRTFLKLNCGEVLLKVDVKNAFNSVDRGALLTQVKDKIPELYKFLYQCYGNPTKLNYQNNAILSSVGCQQGDPLGPAIFSLAIHPIIQRHQSKLNVWYLDDGTLGGDVNTVFNDLGIIINEFRDIGLDLNFSKCELFVCDTCPDKDLVFEKFNSLAPNIKLVDKRSLRLLGSPILDESISPFVEEKIQKFNNASDRLLKINAHMAFTIIRFCLFVPKFTYILRCCQLWKHSELLMGLDNIVKNTLVSVLNVDMDDRTWSQASLPVRLGGLGIRKISSVALPAFLSSVHGTHKLIEKILAPSLGTFEVAHLSEAKNAWGLACPNSDFPVVLSSQRLWDRPLCELARKNLLDTCPSVADRARLLAVSVWESGLWLQAMPSFNTGNLLDPTTFRLAISLRLGARCCVAHHCQCGTAVDQLGHHGLSCSKCAGRISRHASLNDIIRRAFTTANVAAILEPNGLMRDDGKRPDGMTLVPWKMGRPLVWDATCVDTMAPSHLPETHVRAGAAANSAEQLKRRKYSNLGSGYIFEPFGAETLGPWGPGAHRVFQSLSERLVDATRDQNAGTYLAQRISIAIQRGNAASMLGTLPTGSGLEHLDCL

SEQ ID NO: 18972 - protein, 998 aa, Hylaea fasciaria
MLCFIVVCLIILCYFYKYITSLFNTPNMPRCVQASESDTSNQQVVSLEDRVQCHECSQVRVFKGQRGLKIHQSKCHKNVDTPLSAPITNHSFASSAYQPFWKTLSQTKMSKPVLKRIPRGARFSVATVLSQAIRSVISQNTNRAWEHLLFLPYAVLYVSPDQNNKKSLTTRVKENCVQYSALVEPALLSGRDLVLNQSPNFTVKPVTESATIKLVESKLSDGDIKGAARILFSSDTIAPATPETLLELEGKHPTPAANLQLPEAPSDSDASIEITAQDISAAVASFQSGSAGGLDALTPQHLKDLLSGGSGETGEALLRDLTTLITLMLSGRVNRDITEILYGANLCALKKKDGGVRPIAVGMTYRRLAAKICCKKSAPELANLFQPVQLGFGSRGGCEAAVHSVRTFLDQNCGEVLLKVDVKNAFNSVDRGALLTEVKDKIPNLYKFIWQCYSSATKLTYLGHEILSAVGCQQGDPLGPAIFSLAIHPIIQRLQSKLNVWYLDDGTFGGDADTVYGDLLFLIQEFRDIGLELNFSKCELFVSDNCLTKDLVVQKFNTLAPNIKIIDKCSLRLLGSPILDESFPSVFDEKIQNFLQCSDRLSKLNTHMAFTILKYCLFVPKFTYILRCCQLWTHTELLQSLDNIVKNTLASILNLNFEERTWLQASLPVRLGGLGVRSISGVSLPAFLSSVHSTQNLITKILAASLDISVISHMNEARSAWVLACPNTDFPSSTSSQRLWDGPICELTRKKLLNTCSSSTDRARLLAVAEWESGLWLQALPSPNTGTLMDSTSFRISVSLRLGASCCAPHRCQCGTAVDRLGHHGLSCSRSAGRIPRHSSLNDIIRRGFATANCAAILEPSGLMRDDGKRPDGMTLIPWKMGRPLVWDATCVDTLAPSHLSRTETRAGAAAESAEDLKGRKYSALDSGYLFVPFGVETLGPWGPGAHKIFKDLSGRLVDATRDQNAGLYFGQRLSIAIQRGNAASILGTLPTGSGLLD

SEQ ID NO: 18973 - protein, 973 aa, Ennomos quercinarius
MSTQNNVVSLENRIQCPDCPQVRLFKGQKGLKIHQSKCHRVIQIPLSAPVSGSLVASSSPTSAATPSKPFWEVLSSYKRFIPVLKRIPRGARISVAQSLSSSIRNVISKNTKHAWEHLLTFPYHVLYVKLDPTNKSSLTKRVKENCVRYKVLEEQCLDHEIIVPLNRRNNIINSKQNNDSATFKIVESKISDGDIKGAARVLFSSDTIAPYCSETIQSLQDKHPPAAANLHLPEPPLPNDVTVEVTPQEVAAAVTSFQSGSAGGLDGLTPQILKDLLSGISGEIGEALLRDLTALVNLMLSGQVNSDVIEILYGANLCALIKKDGGIRPIAVGTTYRRLAAKVGCRKKVAFLSNLFQPIQLGFGSRGGCEAAVHSLRTFLKLNCGEVLLKVDVKNAFNSVDRGALLTQVKDKIPELYKFLYQCYGNPTKLNYQNNAILSSVGCQQGDPLGPAIFSLAIHPIIQRLQSKLNVWYLDDGTLGGDVNTVFNDLGIIINEFRDIGLDLNFSKCELFVCDTCPDKDLVFEKFNSLAPNIKLVDKRSLRLLGSPILDESISPFVEEKIQKFNNASDRLLKINAHMAFTIIRFCLFVPKFTYILRCCQLWKHSELLMGLDSIVKNTLVSVLNVDMDDRTWSQASLPVRLGGLGIRKISSVALPAFLSSVHGTHKLIEKILAPSLGTFEVAHLSEAKNAWGLACPNSDFPVVLSSQRLWDRPLCELARKNLLDTCPSVADRARLLAVSVWESGLWLQAMPSFNTGNLLDPTTFRLAISLRLGARCCVAHRCQCGTAVDQLGHHGLSCSKSAGRISRHASLNDIIRRAFTTANAAAILEPNGLMRDDGKRPDGMTLVPWKMGRPLVWDATCVDTMAPSHLPETHVRAGAAANSAEQLKRRKYSNLGSGYIFEPFGVETLGPWGPGAHRVFQSLSERLVDATRDQNAGTYLAQRISIAIQRGNAASMLGTLPTGSGLEHLDCL

SEQ ID NO: 18974 - protein, 973 aa, Ennomos quercinarius
MSTQNNVVSLENRIQCPDCPQVRLFKGQKGLKIHQSKCHRVIQIPLSAPVSGSLVASSSPTSAATPSKPFWEVLSSYKRFIPVLKRIPRGARISVAQSLSSSIRNVISKNTKHAWEHLLTFPYHVLYVKLDPTNKSSLTKRVKENCVRYKVLEEQCLDHEIIVPLNRRNNIINSKQNNDSATFKIVESKISDGDIKGAARVLFPSDTIAPYCSETIQSLQDKHPPAAANLHLPEPPLPNDVTVEVTPQEVAAAVTSFQSGSAGGLDGLTPQILKDLLSGISGEIGEALLRDLTALVNLMLSGQVNSDVIEILYGANLCALIKKDGGIRPIAVGTTYRRLAAKVGCRKKVAFLSNLFQPIQLGFGSRGGCEAAVHSLRTFLKLNCGEVLLKVDVKNAFNSVDRGALLTQVKDKIPELYKFLYQCYGNPTKLNYQNNAILSSVGCQQGDPLGPAIFSLAIHPIIQRLQSKLNVWYLDDGTLGGDVNTVFNDLGIIINEFRDIGLDLNFSKCELFVCDTCPDKDLVFEKFNSLAPNIKLVDKRSLRLLGSPILDESISPFVEEKIQKFNNASDRLLKINAHMAFTIIRFCLFVPKFTYILRCCQLWKHSELLMGLDSIVKNTLVSVLNVDMDDRTWSQASLPVRLGGLGIRKISSVALPAFLSSVHGTHKLIEKILAPSLGTFEVAHLSEAKNAWGLACPNSDFPVVLSSQRLWDRPLCELARKNLLDTCPSVADRARLLAVSVWESGLWLQAMPSFNTGNLLDPTTFRLAISLRLGARCCVAHRCQCGTAVDQLGHHGLSCSKSAGRISRHASLNDIIRRAFTTANVAAILEPNGLMRDDGKRPDGMTLVPWKMGRPLVWDATCVDTMAPSHLPETHVRAGAAANSAEQLKRRKYSNLGSGYIFEPFGVETLGPWGPGAHHVFQSLSERLVDATRDQNAGTYLAQRISIAIQRGNAASMLGTLPTGSGLEHLDCL

SEQ ID NO: 18975 - protein, 973 aa, Ennomos quercinarius
MSTQNNVVSLENRIQCPDCPQVRLFKGQKGLKIHQSKCHRVIQIPLSAPVSGSLVASSSPTSAATPSKPFWEVLSSYKRFIPVLKRIPRGARISVAQSLSSSIRNVISKNTKHAWEHLLTFPYHVLYVKLDPTNKSSLTKRVKENCVRYKVLEEQCLDHEIIVPLNRRNNIINSKQNNDSATFKIVESKISDGDIKGAARVLFSSDTIAPYCSETIQSLQDKHPPAAANLHLPEPPLPNDVTVEVTPQEVAAAVTSFQSGSAGGLDGLTPQILKDLLSGISGEIGEALLRDLTALVNLMLSGQVNSDVIEILYGANLCALIKKDGGIRPIAVGTTYRRLAAKVGCRKKVAFLSNLFQPIQLGFGSRGGCEAAVHSLRTFLKLNCGEVLLKVDVKNAFNSVDRGALLTQVKDKIPELYKFLYQCYGNPTKLNYQNNAILSSVGCQQGDPLGPAIFSLAIHPIIQRLQSKLNVWYLDDGTLGGDVNTVFNDLGIIINEFRDIGLDLNFSKCELFVCDTCPDKDLVFEKFNSLAPNIKLVDKRSLRLLGSPILDESISPFVEEKIQKFNNASDRLLKINAHMAFTIIRFCLFVPKFTYILRCCQLWKHSELLMGLDSIVKNTLVSVLNVDMDDRTWSQASLPVRLGGLGIRKISSVALPAFLSSVHGTHKLIEKILAPSLGTFEVAHLSEAKNAWGLACPNSDFPVVLSSQRLWDRPLCELARKNLLDTCPSVADRARLLAVSVWESGLWLQAMPSFNTGNLLDPTTFRLAISLRLGARCCVAHRCQCGTAVDQLGHHGLSCSKSAGRISRHDSLNDIIRRAFTTANVAAILEPNGLMRDDGKRPDGMTLVPWKMGRPLVWDATCVDTMAPSHLPETHVRAGAAANSAEQLKRRKYSNLGSGYIFEPFGVETLGPWGPGAHRVFQSLSERLVDATRDQNAGTYLAQRISIAIQRGNAASMLGTLPTGSGLEHLDCL

SEQ ID NO: 18976 - protein, 973 aa, Ennomos quercinarius
MSTQNNVVSLENRIQCPDCPQVRLFKGQKGLKIHQSKCHRVIQIPLSAPVSGSLVASSSPTSAATPSKPFWEVLSSYKRFIPVLKRIPRGARISVAQSLSSSIRNVISKNTKHAWEHLLTFPYHVLYVKLDPTNKSSLTKRVKENCVRYKVLEEQCLDHEIIVPLNRRNNIINSKQNNDSATFKIVESKISDGDIKGAARVLFSSDTIAPYCSETIQSLQDKHPPAAANLHLPEPPLPNDVTVEVTPQEVAAAVTSFQSGSAGGLDGLTPQILKDLLSGISGEIGEALLRDLTALVNLMLSGQVNSDVIEILYGANLCALIKKDGGIRPIAVGTTYRRLAAKVGCRKKVAFLSNLFQPIQLGFGSRGGCEAAVHSLRTFLKLNCGEVLLKVDVKNAFNSVDRGALLTQVKDKIPELYKFLYQCYGNPTKLNYQNNAILSSVGCQQGDPLGPAIFSLAIHPIIQRLQSKLNVWYLDDGTLGGDVNTVFNDLGIIINEFRDIGLDLNFSKCELFVCDTCPDKDLVFEKFNSLAPNIKLVDKRSLRLLGSPILDESISPFVEEKIQKFNNASDRLLKINAHMAFTIIRFCLFVPKFTYILRCCQLWKHSELLMGLDNIVKNTLVSVLNVDMDDRTWSQASLPVRLGGLGIRKISSVALPAFLSSVHGTHKLIEKILAPSLGTFEVAHLSEAKNAWGLACPNSDFPVVLSSQRLWDRPLCELARKNLLDTCPSVADRARLLAVSVWESGLWLQAMPSFNTGNLLDPTTFRLAISLRLGARCCVAHRCQCGTAVDQLGHHGLSCSKSAGRISRHASLNDIIRRAFTTANVAAILEPNGLMRDDGKRPDGMTLVPWKMGRPLVWDATCVDTMAPSHLPETHVRAGAAANSAEQLKRRKYSNLGSGYIFEPFGVETLGPWGPGAHRVFQSLSERLVDATRDQNAGTYLAQRISIAIQRGNAASMLGTLPTGSGLEHLDCL

SEQ ID NO: 18977 - protein, 934 aa, Ennomos quercinarius
MSTQNNVVSLENRIQCPDCPQVRLFKGQKGLKIHQSKCHRVIQIPLSAPVSGSLVASSSPTSAATPSKPFWEVLSSYKRFIPVLKRIPRGARISVAQSLSSSIRNVISKNTKHAWEHLLTFPYHVLYVKLDPTNKSSLTKRVKENCVRYKVLEEQCLDHEIIVPLNRRNNIINSKQNNDSATFKIVESKISDGDIKGAARVLFSSDTIAPYCSETIQSLQDKHPPAAANLHLPEPPLPNDVTVEVTPQEVAAAVTSFQSGSAGGLDGLTPQILKDLLSGISGEIGEALLRDLTALVNLMLSGQVNSDVIEILYGANLCALIKKDGGIRPIAVGTTYRRLAAKVGCRKKVAFLSNLFQPIQLGFGSRGGCEAAVHSLRTFLKLNCGEVLLKVDVKNAFNSVDRGALLTQVKDKIPELYKFLYQCYGNPTKLNYQNNAILSSVGCQQGDPLGPAIFSLAIHPIIQRLQSKLNVWYLDDGTLGGDVNTVFNDLGIIINEFRDIGLDLNFSKCELFVCDTCPDKDLVFEKFNSLAPNINLVDKRSLRLLGSPILDESISPFVEEKIQKFNNASDRLLKINAHMAFTIIRFCLFVPKFTYILRCCQLWKHSELLMGLDSIVKNTLVSVLNVDMDDRTWSQASLPVRLGGLGIRKISSVALPAFLSSVHGTHKLIEKILAPSLGTFEVAHLSEAKNAWGLASPNSDFPVVLSSQRLWDRPLCELARKNLLDTCPSVADRARLLAVSVWESGLWLQAMPSFTTGNLLDPTTFRLAISLRLGARCCVAHRCQCGTAVDQLGHHGLSCSKSADRISRHASLNDIIRRAFTTANAAAILEPNGLMRDDGKRPDGMTLVPWKMGRPLVWDATCVDTMAPSHLPETHVRAGAAANSAEQLKRRKYSNLGSGYIFEPFGVETLGPWGPGAHRVFQSLSERLVDATRD

SEQ ID NO: 18978 - protein, 973 aa, Ennomos quercinarius
MSTQNNVVSLENRIQCPDCPQVRLFKGQKGLKIHQSKCHRVIQIPLSAPVSGSVVASSSPTSAATPSKPFWEVLSSYKRFIPVLKRIPRGARISVAQSLSSSIRNVISKNTKHAWEHLLTFPYHVLYVKLDPTNKSSLTKRVKENCVRYKVLEEQCLDHEIIVPLNRRNNIINSKQNNDSATFKIVESKISDGDIKGAARVLFSSDTIAPYCSETIQSLQDKHPPAAANLHLPEPPLPNDVTVEVTPQEVAAAVTSFQSGSAGGLDGLTPQILKDLLSGISGEIGEALLRDLTALVNLMLSGQVNSDVIEILYGANLCALIKKDGGIRPIAVGTTYRRLAAKVGCRKKVAFLSNLFQPIQLGFGSRGGCEAAVHSLRTFLKLNCGEVLLKVDVKNAFNSVDRGALLTQVKDKIPELYKFLYQCYGNPTKLNYQNNAILSSVGCQQGDPLGPAIFSLAIHPIIQRLQSKLNVWYLDDGTLGGDVNTVFNDLGIIINEFRDIGLDLNFSKCELFVCDTCPDKDLVFEKFNSLAPNIKLVDKRSLRLLGSPILDESISPFVEEKIQKFNNASDRLLKINAHMAFTIIRFCLFVPKFTYILRCCQLWKHSELLMGLDKIVKNTLVSVLNVDMDDRTWSQASLPVRLGGLGIRKISSVALPAFLSSVHGTHKLIEKILAPSLGTFEVAHLSEAKNAWGLACPNSDFPVVLSSQRLWDRPLCELARKNLLDTCPSVADRARLLAVSVWESGLWLQAMPSFNTGNLLDPTTFRLAISLRLGARCCVAHHCQCGTAVDQLGHHGLSCSKSAGRISRHASLNDIIRRAFTTANVAAILEPNGLMRDDGKRPDGMTLVPWKMGRPLVWDATCVDTMAPSHLPETHVRAGAAANSAEQLKRRKYSNLGSGYIFEPFGAETLGPWGPGAHRVFQSLSERLVDATRDQNAGTYLAQRISIAIQRGNAASMLGTLPTGSGLEHLDCL

SEQ ID NO: 18979 - protein, 675 aa, Ennomos quercinarius
MLSGQVNSDVIEILYGANLCALIKKDGGIRPIAVGTTYRRLAAKVGCRKKVAFLSNLFQPIQLGFGSRGGCEAAVHSLRTFLKLNCGEVLLKVDVKNAFNSVDRGALLTQVKDKIPELYKFLYQCYGNPTKLNYQNNAILSSVGCQQGDPLGPAIFSLAIHPIIQRLQSKLNVWYLDDGTLGGDVNTVFNDLGIIINEFRDIGLDLNFSKCELFVCDTCPDKDLVFEKFNSLAPNIKLVDKRSLRLLGSPILDESISPFVEEKIQKFNNASDRLLKINAHMAFTIIRFCLFVPKFTYILRCCQLWKHSELLMGLDSIVKNTLVSVLNVDMDDRTWSQASLPVRLGGLGIRKISSVALPAFLSSVHGTHKLIEKILAPSLGTFEVAHLSEAKNAWGLACPNSDFPVVLSSQRLWDRPLCELARKNLLDTCPSVADRARLLAVSVWESGLWLQAMPSFNTGNLLDPTTFRLAISLRLGARCCVAHRCQCGTAVDQLGHHGLSCSKSAGRISRHASLNDIIRRAFTTANVAAILEPNGLMRDDGKRPDGMTLVPWKMGRPLVWDATCVDTMAPSHLPETHVRAGAAANSAEQLKRRKYSNLGSGYIFEPFGVETLGPWGPGAHRVFQSLSERLVDATRDQNAGTYLAQRISIAIQRGNAASMLGTLPTGSGLEHLDCL

SEQ ID NO: 18980 - protein, 973 aa, Ennomos quercinarius
MSTQNNVVSLENRIQCPDCPQVRLFKGQKGLKIHQSKCHRVIQIPLSAPVSGSVVASSSPTSAATPSKPFWEVLSSYKRFIPVLKRIPRGARISVAQSLSSSIRNVISKNTKHAWEHLLTFPYHVLYVKLDPTNKSSLTKRVKENCVRYKVLEEQCLDHEIIVPLNRRNNIINSKQNNDSATFKIVESKISDGDIKGAARVLFSSDTIAPYCSETIQSLQDKHPPAAANLHLPEPPLPNDVTVEVTPQEVAAAVTSFQSGSAGGLDGLTPQILKDLLSGISGEIGEALLRDLTALVNLMLSGQVNSDVIEILYGANLCALIKKDGGIRPIAVGTTYRRLAAKVGCRKKVAFLSNLFQPIQLGFGSRGGCEAAVHSLRTFLKLNCGEVLLKVDVKNAFNSVDRGALLTQVKDKIPELYKFLYQCYGNPTKLNYQNNAILSSVGCQQGDPLGPAIFSLAIHPIIQRLQSKLNVWYLDDGTLGGDVNTVFNDLGIIINEFRDIGLDLNFSKCELFVCDTCPDKDLVFEKFNSLAPNIKLVDKRSLRLLGSPILDESISPFVEEKIQKFNNASDRLLKINAHMAFTIIRFCLFVPKFTYILRSCQLWKHSELLMGLDNIVKNTLVSVLNVDMDDRTWSQASLPVRLGGLGIRKISSVALPAFLSSVYGTHKLIEKILAPSLGTFEVAHLSEAKNAWGLACPNSDFPVVLSSQRLWDRPLCELARKNLLDTCPSVADRARLLAVSVWESGLWLQAMPSFNTGNLLDPTTFRLAISLRLGARCCVAHHCQCGTAVDQLGHHGLSCSKSAGRISRHASLNDIIRRAFTTANVAAILEPNGLMRDDGKRPDGMTLVPWKMGRPLVWDATCVDTMAPSHLPETHVRAGAAANSAEQLKRRKYSNLGSGYIFEPFGVETLGPWGPGAHRVFQSLSERLVDATRDQNAGTYLAQRISIAIQRGNAASMLGTLPTGSGLEHLDCL

SEQ ID NO: 18981 - protein, 973 aa, Ennomos quercinarius
MSTQNNVVSLENRIQCPDCPQVRLFKGQKGLKIHQSKCHRVIQIPLSAPVSGSLVASSSPTSAATPSKPFWEVLSSYKRFIPVLKRIPRGARISVAQSLSSSIRNVITKNTKHAWEHLLTFPYHVLYVKLDPTNKSSLTKRVKENCVRYKVLEEQCLDHEIIVPLNRRNNIINSKQNNDSATFKIVESKISDSDIKGAARVLFSSDTIAPYCSETIQSLQDKHPPAAANLHLPEPPLPNDVTVEVTPQEVAAAVTSFQSGSAGGLDGLTPQILKDLLSGISGEIGEALLRDLTALVNLMLSGQVNSDVIEILYGANLCALIKKDGGIRPIAVGTAYRRLAAKVGCRKKVAFLSNLFQPIQLGFGSRGGCEAAVHSLRTFLKLNCGEVLLKVDVKNAFNSVDRGALLTQVKDKIPELYKFLYQCYGNPTKLNYQNNAILSSVWCQQGDPLGPAIFSLAIHPIIQRLQSKLNVWYLDDGTLGGDVNTVFNDLGIIINEFRDIGLDLNFSKCELFVCDTCPDKDLVFEKFNSLAPNIKLVDKRSLRLLGSPILDESISPFVEEKIQNFNNASDRLLKINAHMAFTIIRFCLFVPKFTYILRCCQLWKHSELLMGLDSIVKNTLVSVLNVDMDDRTWSQASLPVRLGGLGIRKISSVALPAFLSSVHGTHKLIEKILAPSLGTFEVAHLSEAKNAWGLACPNSDFPVVLSSQRLWDRPLCELARKNLLDTCPSVADRARLLAVSVWESGLWLQAMPSFNTGNLLDPTTFRLAISLRLGARCCVAHRCQCSTAVDQLGHHGLLCSKSTGRISRHASLNDIIRRAFTTANVAAILEPNGLMRDDGKRPDGMTLVPWKMGRPLVWDATCVDTMAPSHLPETHVRAGAAANSAEQLKRRKYSNLGSGYIFEPFGVETLGPWGPRAHRVFQSLSERLVDTTRDQNAGTYLAQRISIAIQRGNAASMLGTLPTGSRLEHLDCL

SEQ ID NO: 18982 - protein, 974 aa, Cosmia trapezina
MPQCAQANEVENSQGVSVENQVQCHECSQVRFFKGQKGLKIHQAKCHKSDNIPLSTSNSNQETNSSRTSPDITFWKTLSHCKISLPVLKRIPRGARIAVATALSQAVKAVLLHNSKRTWEHLLFFPYAVLHVTSDPKNKKSLTVRVKENCVRYGVLEETFSLLDNISFTNRNPKFTLRPFSESATYKLVESKLGDGDIKGAARILFSSDTLAPATPETLSILKEKHPPPAENLHLPEAPEESDDAAVEVTAQEVSAAVASFQSGSAGGLDALTPQHLKDLLCGGTGETGETLLRDLTALINLMLSGRVNGDIVEILYGANLCALKKKDGGIRPIAVGTTYRRLAAKTCCKNAGLTLASIFQPVQLGFGSRGGCEVAVHSVRTFLNQNCGDVLLKVDVKNAFNSVDRGALLTQVKDKIPNLYRFLWQCYGSPTKLTYHGNEILSATGCQQGDPLGPAIFSLAIHPIIQRLHSKLNVWYLDDGTLGGDANTVYDDLRNLIDEFHSIGLDLNFSKCELYVSDTYAAKDMVIQNFNNLAPNITVINKCSLRLLGSPILDESFPLFFEEKIQNFLQYSDRLFKINTHMAFTIVRFCLFVPKFTYIIRCCQLWKHIEILQNLDNIIKTTLASILNINLEERAWLQASLPVRLGGLGVRSISGVALPAFLSSIHSTQNLSKKVLAASLDSFEITYFNEARNAWLLACPNTEFPKILTSQRLWDGPLCEQVRKQLLHTCLNSADRARLLAVAQWESGLWLQALPSPNTGTLMDTSTFRLAASLRLGASCCAPHRCQCGTAVDRLGHHGLSCTSSAGRIPRHASLNDIIRRAFTTANCAAILEPRGLSRDDGKRPDGMTLIPWKMGRPLVWDATCVDTLAPSHLPGTQNRTGAAAESAENLKRRKYSSLDSGYMFEPFGVETLGPWGPGAHKIFKDLSARLVEATRDQNAGLYFAQRLSIAIQRGNAASILGTLPTGSGFIDL

SEQ ID NO: 18983 - protein, 675 aa, Ennomos quercinarius
MLSGQVNSDVIEILYGANLCALIKKDGGIRPIAVGTTYRRLAAKVGCRKKVAFLSNLFQPIQLGFGSRGGCEAAVHSLRTFLKLNCGEVLLKVDVKNAFNSVDRGALLTQVKDKIPELYKFLYQCYGNPTKLNYQNNAILSSVGCQQGDPLGPAIFSLAIHPIIQRLQSKLNVWYFDDGTLGGDVNTVFNDLGIIINEFRDIGLDLNFSKCELFVCDTCPDKDLVFEKFNSLAPNIKLVDKRSLRLLGSPILDESISPFVEEKIQKFNNASDRLLKINAHMAFTIIRFCLFVPKFTYILRCCQLWKHSELLMGLDSIVKNTLVSVLNVDMDDRTWSQASLPVRLGGLGIRKISSVALPAFLSSVHGTHKLIEKILAPSLGTFEVAHLSEAKNAWGLACPNSDFPVVLSSQRLWDRPLCELARKNLLDTCPSVADRARLLAVSVWESGLWLQAMPSFNTGNLLDPTTFRLAISLRLGARCCVAHRCQCGTAVDQLGHHGLSCSKSAGRISRHANLNDIIRRAFTTANVAAILEPNGLMRDDGKRPDGMTLVPWKMGRPLVWDATCVDTMAPSHLPETHVRAGAAANSAEQLKRRKYSNLGSGYIFEPFGVETLGPWGPGAHRVFQSLSERLVDATRDQNAGTYLAQRISIAIQRGNAASMLGTLPTGSGLEHLDCL

SEQ ID NO: 18984 - protein, 1001 aa, Ennomos quercinarius
MLLWTIFIVCFLLVFLKIATKHTRSSMAMQHCAQMDHNSGNDHHTVSLESQVQCPECTQVRFFKGQRGLRIHYGKCHKSPNVPQSASFSSPSPVHPAFSASQTFSKTLAHSKKNIPVLKRIPRGARVSVATALSQAIKAVTSQNSKRTWEHLLYFPYAVFFVRRDPSNRKSLTARVKENCVKYSNMEEPFFPSDINSNQHQNSKKSKSCPESAPYRLVESKLSDGDIKGAARILFSSDTLAPATPETLSILEGKHPPPAANLQLPDAPLESDVAVEVSALDVSAAVTSFQSGSAGGLDALSPQHLKDLLCGGSGEVSEALLKDLTALINLMLSGQVNGDVIQLLYGANLCALKKKDGGIRPIAVGTTYRRLAAKICCKKSAPLLANLFQPVQLGFGSRGGREAAVHSTRTFLSNSCGDVLLKVDVKNAFNSVDRGALLTQVKDKIPNLYNFIWQCYGGSTTLTYNGNEILSEVGCQQGDPLGPAIFSLAIHPIIQRLQSKLKSWYLDDGTLGGDVTTVYNDLLFLVDEFRAIGLELNFSKCELFISDDIPTKDLVLQKFNSLASNIKIIDKYSLRLLGSPILDEAFPQFIEEKIQNFLQCSERLTKINTHMAFTIIRYCLFVPKFTYTLRCSQLWKHTELLHRLDNIVKSTLATILNINLHEREWLQASLPVRMGGLGIRSIFGVALPAFLSSVHSTQNLTEKILATSLGNVEVTFFGEARNAWLLACPNTEIPKSVSSQRLWDGPLCEQVRNQLIHTCSSSADRARLLAVSVWESGLWLQALPSQNTGTLLDSSSFRIAASLRLGASCSAPHHCQCGSAVDQLGHHGLSCVRSAGRVPRHASLNDIIRRAFTSANCAAILEPNGLVRDDGKRPDGMTLIPWKMGRPLVWDATCVDTLAPSHLPETQNKAGAAADSAEKLKRRKYSNLDSGFIFAPFGVETLGPWGPSAHKVFKELCKRLVEATRDQNAGLYLGQRLSIAIQRGNAASILGTLPTGSGLLD

SEQ ID NO: 18985 - protein, 973 aa, Ennomos quercinarius
MSTQNNVVSLENRIQCPDCPQVRLFKGQKGLKIHQSKCHRVIQIPLSAPVSGSLVASSSPTSAATPSKPFWEVLSSYKRFIPVLKRIPRGARISVAQSLSSSIRNVISKNTKHAWEHLLTFPYHVLYVKLDPTNKSSLTKRVKENCVRYKVLEEQCLDHEIIVPLNRRNNIINSKQNNDSATFKIVESKISDGDIKGAARVLFSSDTIAPYCSETIQSLQDKHPPAAANLHLPEPPLPNDVTVEVTPQEVAAAVTSFQSGSAGGLDGLTPQILKDLLSGISGEIGEALLRDLTALVNLMLSGQVNSDVIEILYGANLCALIKKDGGIRPIAVGTTYRRLAAKVSCRKKVAFLSNLFQPIQLGFGSRGGCEAAVHSLRTFLKLNCGEVLLKVDVKNAFNSVDRGALLTQVKDKIPELYKFLYQCYGNPTKLNYQNNAILSSVGCQQGDPLGPAIFSLAIHPIIQRLQSKLNVWYLDDGTLGGDVNTVFNDLGIIINEFRDIGLDLNFSKCELFVCDTCPDKDLVFEKFNSLAPNIKLVDKRSLRLLGSPILDESISPFVEEKIQKFNNASDRLLKINAHMAFTIIRFCLFVPKFTYILRCCQLWKHSELLMGLDSIVKNTLVSVLNVDMDDRTWSQASLPVRLGGLGIRKISSVALPAFLSSVHGTHKLIEKILAPSLGTFEVAHLSEAKNAWGLACPNSDFPVVLSSQRLWDRPLCELARKNLLDTCPSVADRARLLAVSVWESGLWLQAMPSFNTGNLLDPTTFRLAISLRLGARCCVAHRCQCGTAVDQLGHHGLSCSKSAGRISRHASLNDIIRRAFTTANAAAILEPNGLMRDDGKRPDGMTLVPWKMGRPLVWDATCVDTMAPSHLPETHVRAGAAANSAEQLKRRKYSNLGSGYIFEPFGVETLGPWGPGAHRVFQSLSERLVDATRDQNAGTYLAQRISIAIQRGNAASMLGTLPTGSGLEHLDCL

SEQ ID NO: 18986 - protein, 1001 aa, Ennomos quercinarius
MLLWTIFIVCFLLVFLMIVTKHTRSSMAMQHCAQMDHNSGNDHHTVSLESQVQCPECTQVRFFKGQRGLRIHYGKCHKSPNVPQSASFSSPSPVHPAFSASQTFSKTLAHSKKNIPVLKRIPRGARVSVATALSQAIKAVTSQNSKRTWEHLLYFPYAVFFVRRDPSNRKSLTARVKENCVKYSNMEEPFFPSDINSNQHQNSKKSKSCPESAPYRLVESKLSDGDIKGAARILFSSDTLAPATPETLSILEGKHPPPAANLQLPDAPLESDVAVEVSALDVSAAVTSFQSGSAGGLDALSPQHLKDLLCGGSGEVSEALLKDLTALINLMLSGQVNGDVIQLLYGANLCALKKKDGGIRPIAVGTTYRRLAAKICCKKSAPLLANLFQPVQLGFGSRGGCEAAVHSTRTFLSNSCGDVLLKVDVKNAFNSVDRGALLTQVKDKIPNLYNFIWQCYGGSTTLTYNGNEILSAVGCQQGDPLGPAIFSLAIHPIIQRLQSKLNVWYLDDGTLGGDVTTVYNDLLFLVDEFRAIGLELNFSKCELFISDDIPTKDLVLQKFNSLASNIKIIDKYSLRLLGSPILDEAFPQFIEEKIQNFLQCSERLTKINTHMAFTIIRYCLFVPKFTYTLRCSQLWKHTELLHRLDNIVKSTLATILNINLHEREWLQASLPVRMGGLGIRSISGVALPAFLSSVHSTQNLTEKILATSLGNVEVTFFGEARNAWLLACPNTEIPKSVSSQRLWDGPLCGQVRNQLIHTCSSSADRARLLAVSVWESGLWLQALPSQNTGTLLDSSSFRIAASLRLGASCSAPHHCQCGSAVDQLGHHGLSCVRSAGRIPRHASLNDIIRRAFTSANCAAILEPNGLVRDDGKRPDGMTLIPWKMGRPLVWDATCVDTLAPSHLPETQNKAGAAADSAEKLKRRKYSNLDSGFIFAPFGVETLGPWGPSAHKVFKELCKRLVEATRDQNAGLYLGQRLSIAIQRGNAASILGTLPTGSGLLD

SEQ ID NO: 18987 - protein, 973 aa, Ennomos quercinarius
MSTQNNVVSLENRIQCPDCPQVRLFKGQKGLKIHQSKCHRVIQIPLSAPVSGSLVASSSPTSAATPSKPFWEVLSSYKRFIPVLKRIPRGARISVAQSLSSSIRNVISKNTKHAWEHLLTFPYHVLYVKLDPTNKSSLTKRVKENCVRYKVLEEQCLDHEIIVPLNRRNNIINSKQNNDSATFKIVESKISDGDIKGAARVLFSSDTIAPYCSETIQSLQDKHPPAAANLHLPEPPLPNDVTVEVTPQEVAAAVTSFQSGSAGGLDGLTPQILKDLLSGISGEIGEALLRDLTALVNLMLSGQVNSDVIEILYGANLCALIKKDGGIRPIAVGTTYRRLAAKVGCRKKVAFLSNLFQPIQLGFGSRGGCEAAVHSLRTFLKLNCGEVLLKVDVKNAFNSVDRGALLTQVKDKIPELYKFLYQCYGNPTKLNYQNNAILSSVGCQQGDPLGPAIFSLAIHPIIQRLQSKPNVWYLDDGTLGGDLNTVFNDLGIIINEFRDIGLDLNFSKCELFVCDTCPDKDLGFEKFNSLAPNIKLVDKRSLRLLGSPILDESISPFVEEKIQKFNNASDRLLKINAHMAFTIIRFCLFVPKFTYILRCCQLWKHSELLMGLDSIVKNTLVSVLNVDMDDRTWSQASLPVRLGGLGIRKISSVALPAFLSSVHGTHKLIEKILAPSLGTFEVAHLSEAKNAWGLACPNSDFPVVLSSQRLWDRPLCELARKNLLDTCPSVADRARLLAVSVWESGLWLQAMPSFNTGNLLDPTTFRLAISLRLGARCCVAHRCQCGTAVDQLGHHGLSCSKSAGRISRHASLNDIIRRAFTTANAAAILEPNGLMRDDGKRPDGMTLVPWKMGRPLVWDATCVDTMAPSHLPETHVRAGAAANSAEQLKRRKYSNLGSGYIFEPFGVETLGPWGPGAHRVFQSLSERLVDATRDQNAGTYLAQRISIAIQRGNAASMLGTLPTGSGLEHLDCL

SEQ ID NO: 18988 - protein, 998 aa, Hylaea fasciaria
MLCFIVVCLIILCYFYKYITSLFNTPNMPRCVQASESDTSNQQVVSLEDRVQCHECSQVRVFKGQRGLKIHQSKCHKNVDTPLSAPITNHSFASSAYQPFWKTLSQTKMSKPVLKRIPRGARFSVATVLSQAIRSVISQNTNRAWEHLLFLPYAVLYVSPDQNNKKSLTTRVKENCVQYSALVEPALLSGRDLVLNQSPNFTVKPVTESATIKLVESKLSDGDIKGAARILFSSDTIAPATPETLLELEGKHPTPAANLQLPEAPSDSDASIEITAQDISAAVASFQSGSAGGLDALTPQHLKDLLSGGSGETGEALLRDLTTLITLMLSGRVNRDITEILYGANLCALKKKDGGVRPIAVGMTYRRLAAKICCKKSAPELANLFQPVQLGFGSRGGCEAAVHSVRTFLDQYCGEVLLKVDVKNAFNSVDRGALLTEVKDKIPNLYKFIWQCYSSATKLTYLGHEILSAVGCQQGDPLGPAIFSLAIHPIIQRLQSKLNVWYLDDGTFGGDADTVYGDLLFLIQVFRDIGLELNFSKCELFVSDNCLTKDLVVQKFNTLAPNIKIIDKCSLRLLGSPILDESFPSFFDEKIQNFLQCSDRLSKLNTHMAFTILKYCLFVPKFTYILRCCQLWTHTELLQSLDNIVKNTLASILNLNFEERTWLQASIPVRLGGLGVRSISGVSLPAFLSSVHSTQNLITKILAASLDISVISHMNEARSAWVLACPNTDFPSSTSSQRLWDGPICELTRKKLLNTCSSSTDRARLLAVAEWESGLWLQALPSPNTGTLMDSTSFRISVSLRLGASCCAPHRCQCGTAVDRLGHHGLSCSRSAGRIPRHSSLNDIIRRGFATANCAAILEPSGLMRDDGKRPDGMTLIPWRMGRPLVWDATCVDTLAPSHLSRTETRAGAAAESAENLKGRKYSALDSGYLFVPFGVETLGPWGPGAHKIFKDLSGRLVDATRDQNAGLYFGQRLSIAIQRGNAASILGTLPTGSGLLD

SEQ ID NO: 18989 - protein, 973 aa, Ennomos quercinarius
MSTQNNVVSLENRIQCPDCPQVRLFKGQKGLKIHQSKCHRVIQIPLSAPVSGSLVASSSPTSAATPSKPFWEVLSSYKRFIPVLKRIPRGARISVAQSLSSSIRNVISKNTKHAWEHLLTFPYHVLYVKLDPTNKSSLTKRVKENCVRYKVLEEQCLDHEIIVPHNRRNNIINSKQNNDSATFKIVESKISDGDIKGAARVLFSSDTIAPYCSETIQSLQDKHPPAAANLHLPEPPLPNDVTVEVTPQEVAAAVTSFQSGSAGGLDGLTPQILKDLLSGISGEIGEALLRDLTALVNLMLSGQVNSDVIEILYGANLCALIKKDGGIRPIAVGTTYRRLAAKVGCRKKVAFLSNLFQPIQLGFGSRGGCEAAVHSLRTFLKLNCGEVLLKVDVKNAFNSVDRGALLTQVKDKIPELYKFLYQCYGNPTKLNYQNNAILSSVGCQQGDPLGPAIFSLAIHPIIQRLQSKLNVWYLDDGTLGGDVNTVFNDLGIIINEFRDIGLDLNFSKCELFVCDTCPDKDLVFEKFNSLAPNIKLVDKRSLRLLGSPILDESISPFVEEKIQKFNNASDRLLKINAHMAFTIIRFCLFVPKFTYILRCCQLWKHSELLMGLDSIVKNTLVSVLNVDMDDRTWSQASLPVRLGGLGICKISSVALPAFLSSVHGTHKLIEKILAPSLGTFEVAHLSEAKNAWGLACPNSDFPVVLSSQRLWDRPLCELARKNLLDTCPSVADRARLLAVSVWESGLWLQAMPSFNTGNLLDPTTFRLAISLRLGARCCVAHRCQCGTAVDQLGHHGLSCSKSAGRISRHASLNDIIRRAFTTANVAAILEPNGLMRDDGKRPDGMTLVPWKMGWPLVWDATCVDTMAPSHLPETHVRAGAAANSAEQLKRRKYSNLGSGYIFEPFGVETLGPWGPGAHRVFQSLSERLVDATRDQNAGTYLAQRISIAIQRGNAASMLGTLPTGSGLEHLDCL

SEQ ID NO: 18990 - protein, 917 aa, Ennomos quercinarius
MSTQNNVVSLENRIQCPDCPQVRLFKGQKGLKIHQSKCHRVIQIPLSAPVSGSLVASSSPTSAATPSKPFWEVLSSYKRFIPVLKRIPRGARISVAQSLSSSIRNVISKNTKHAWEHLLTFPYHVLYVKLDPTNKSSLTKRVKENCVRYKVLEEQCLDHEIIVPLNRRNNIINSKQNNDSATFKIVESKISDGDIKGAARVLFSSDTIAPYCSETIQSLQDKHPPAAANLHLPEPPLPNDVTVEVTPQEEIEIENLYGANLCALIKKDGGIRPIAVGTTYRRLAAKVGCRKKVAFLSNLFQPIQLGFGSRGGCEAAVHSLRTFLKLNCGEVLLKVDVKNAFNSVDRGALLTQVKDKIPELYKFLYQCYGNPTKLNYQNNAILSSVGCQQGDPLGPAIFSLAIHPIIQRLQSKLNVWYLDDGTLGGDVNTVFNDLGIIINEFRDIGLDLNFSKCELFVCDTCPDKDLVFEKFNSLAPNIKLVDKRSLRLLGSPILDESISPFVEEKIQKFNNASDRLLKINAHMAFTIIRFCLFVPKFTYILRCCQLWKHSELLMGLDSIVKNTLVSVLNVDMDDRTWSQASLPVRLGGLGIRKISSVALPAFLSSVHGTHKLIEKILAPSLGTFEVAHLSEAKNAWGLASPNSDFPVVLSSQRLWDRPLCELARKNLLDTCPSVADRARLLAVSVWESGLWLQAMPSFTTGNLLDPTTFRLAISLRLGARCCVAHRCQCGTAVDQLGHHGLSCSKSAGRISRHASLNDIIRRAFTTANAAAILEPNGLMRDDGKRPDGMTLVPWKMGRPLVWDATCVDTMAPSHLPETHVRAGAAANSAEQLKRRKYSNLGSGYIFEPFGVETLGPWGPGAHRVFQSLSERLVDATRDQNAGTYLAQRISIAIQRGNAASMLGTLPTGSGLEHLDCL

SEQ ID NO: 18991 - protein, 975 aa, Ennomos quercinarius
MAMQHCAQMDHNSGNDHHTVSLESQVQCPECTQVRFFKGQRGLRIHYGKCHKSPNVPQSASFSSPSPVHPAFSASQTFSKTLAHSKKNIPVLKRIPRGARVSVATALSQAIKAVTSQNSKRTWEHLLYFPYAVFFVRRDPSNRKSLTARVKENCVKYSNMEEPFFPSDINSNQHQNSKKSKSCPESAPYRLVESKLSDGDIKGAARILFSSDTLAPATPETLSILEGKHPPPAANLQLPDAPLESDVAVEVSALDVSAAVTSFQSGSAGGLDALSPQHLKDLLCGGSGEVSEALLKDLTALINLMLSGQVNGDVIQLLYGANLCALKKKDGGIRPIAVGTTYRRLAAKICCKKSAPLLANLFQPVQLGFGSRGGCEAAVHSTRTFLSNSCGDVLLKVDVKNAFNSVDRGALLTQVKDKIPNLYNFIWQCYGGSTTLTYNGNEILSAVGCQQGDPLGPAIFSLAIHPIIQRLQSKLNVWYLDDGTLGGDVTTVYNDLLFLVDEFRAIGLELNFSKCELFISDDIPTKDLVLQKFNSLASNIKIIDKYSLRLLGSPILDEAFPQFIEEKIQNFLQCSERLTKINTHMAFTIIRYCLFVPKFTYTLRCSQLWKHTELLHRLDNIVKSTLATILNINLHEREWLQASLPVRMGGLGIRSISGVALPAFLSSVHSTQNLTEKILATSLSNVEVTFFGEARNAWLLACPNTEIPKSVSSQRLWDGPLCGQVRNQLIHTCSSSADRARLLAVSVWESGLWLQALPSQNTGTLLDSSSFRIAASLRLGASCSAPHHCQCGSAVDQLGHHGLSCVRSAGRIPRHASLNDIIRRAFTSANCAAILEPNGLVRDDGKRPDGMTLIPWKMGRPLVWDATCVDTLAPSHLPETQNKAGAAADSAEKLKRRKYSNLDSGFIFAPFGVETLGPWGPSAHKVFKELCKRLVEATRDQNAGLYLGQRLSIAIQRGNAASILGTLPTGSGLLD

SEQ ID NO: 18992 - protein, 973 aa, Ennomos quercinarius
MSTQNNVVSLENRIQCPDCPQVRLFKGQKGLKIHQSKCHRVIQIPLSAPVSGSLVASSSPTSAATPSKPFWEVLSSYKRFIPVLKRIPRGARISVAQSLSSSIRNVISKNTKHAWEHLLTFPYHVLYVKLDPTNKSSLTKRVKENCVRYKVLEEQCLDNEIIVPLNRRNNIINSKQNNDSATFKIVESKISDGDIKGAARVLFSSDTIAPYCSETIQSLQDKHPPAAANLHLPEPPLPNDVTVEVTPQEVAAAVTSFQSGSAGGLDGLTPQILKDLLSGISGEIGEALLRDLTALVNLMLSGQVNSDVIEILYGANLCALIKKDGGIRPIAVGTTYRRLAAKVGCRKKVAFLSNLFQPIQLGFGSRGGCEAAVHSLRTFLKLNCGEVLLKVDVKNAFNSVDRGALLTQVKDKIPELYKFLYQCYGNPTKLNYQNNAILSSVGCQQGDPLGPAIFSLAIHPIIQRLQSKLNVWYLDDGTLGGDVNTVFNDLGIIINEFRDIGLDLNFSKCELFVCDTCPDKDLVFEKFNSLAPNIKLVDKRSLRILGSPILDESISPFVEEKIQKFNNASDRLLKINAHMAFTIIRFCLFVPKFTYILRCCQLWKHSELLMGLDSIVKNTLVSVLNVDMDDRTWSQASLPVRLGGLGIRKISSVALPAFLSSVHGTHKLIEKILAPSLGTFEVAHLSEAKNAWGLASPNSDFPVVLSSQRLWDRPLCELARKNLLDTCPSVADRARLLAVSVWESGLWLQAMPSFNTGNLLDPTTFRLAISLRLGARCCVAHRCQCGTAVDQLGHHGLSCSKSAGRISRHASLNDIIRRAFTTANVAAILEPNGLMRDDGKRPDGMTLVPWKMGRPLVWDATCVDTMAPSHLPETHVRAGAAANSAEQLKRRKYSNLGSGYIFEPFGVETLGPWGPGAHRVFQSLSERLVDATRDQNAGTYLAQRISIAIQRGNAASMLGTLPTGSGLEHLDCL

SEQ ID NO: 18993 - protein, 973 aa, Ennomos quercinarius
MSTQNNVVSLENRIQCSDCPQVRLFKGQKGLKIHQSKCHRVIQIPLSAPVSGSLVASSSPTSAATPSKPFWEVLSSYKRFIPVLKRIPRGARISVAQSLSSSIRNVISKNTKHAWEHLLTFPYHVLYVKLDPTNKSSLTKRVKENCVRYKVLEEQCLDHEIIVPLNRRNNIINSKQNNDSATFKIVESKISDGDIKGAARVLFSSDTIAPYCSETIQSLQDKHPPAAANLHLPEPPLPNDVTVEVTPQEVAAAVTSFQSGSAGGLDGLTPQILKDLLSGISGEIGEALLRDLTALVNLMLSGQVNSDVIEILYGANLCALIKKDGGIRPIAVGTTYRRLAAKVGCRKKVAFLSNLFQPIQLGFGSRGGCEAAVHSLRTFLKLNCGEVLLKVDVKNAFNSVDRGALLTQVKDKTPELYKFLYQCYGNPTKLNYQNNAVLSSVGCQQGDPLGPAIFSLAIHPIIQRLQSKLNVWYLDDGTLGGDVNTVFNDLGIIINEFRDIGLDLNFSKCELFVCDTCPDKDLVFEKFNSLAPNIKLVDKRSLRLLGSPILDESISPFVEEKIQKFNNASDRLLKINAHMAFTIIRFCLFVPKFTYILRCCQLWKHSELLMGLDSIVKNTLVSVLNVDMDDRTWSQTSLPVRLGGLGIRKISSVALPAFLSSVHGTHKLIEKILAPSLGTFEVAHLSEAKNAWGLACPNSDFPVVLSSQRLWDRPLCELARKNLLDTCPSVADRARLLAVSVWESGLWLQAMPSFNTGNLLDPTTFRLAISLRLGARCCVAHRCQCGTAVDQLGHHGLSCSKSAGRISRHASLNDIIRRAFTTANAAAILEPNGLMRDDGKRPDGMTLVPWKMGRPLVWDATCVDTMAPSHLPETHVRAGAAANSAEQLKRRKYSNLGSGYIFEPFGVETLGPWGPGAHRVFQSLSERLVDATRDQNAGTYLAKRISIAIQRGNAASMLGTLPTGSGLEHLDCL

SEQ ID NO: 18994 - protein, 974 aa, Ennomos quercinarius
MSTQNNVVSLENRIQCPDCPQVRLFKGQKGLKIHQSKCHRVIQIPLSAPVSGSVVASSSPTSAATPSKPFWEVLSSYKRFIPVLKRIPRGARISVAQSLSSSIRNVISKNTKHAWEHLLTFPYHVLYVKLDPTNKSSLTKRVKENCVRYKVLEEQCLDHEIIVPLNRRNNIINSKQNNDSATFKIVESKISDGDIKGAARVLFSSDTIAPYCSETIQSLQDKHPPAAANLHLPEPPLPNDVTVEVTPQEVAAAVTSFQSGSAGGLDGLTPQILKDLLSGISGEIGEALLRDLTALVNLMLSGQVNSDVIEILYGANLCALIKKDGGIRPIAVGTTYRRLAAKVGCRKKVAFLSNLFQPIQLGFGSRGGCEAAVHSLRTFLKLNCGEVLLKVDVKNAFNSVDRGALLTQVKDKIPELYKFLYQCYGNPTKLNYQNNAILSSVGCQQGDPLGPAIFSLAIHPIIQRLQSKLNVWYLDDGTLGGDVNTVFNDLGIIINEFRDIGLDLNFSKCELFVCDTCPDKDLVFEKFNSLAPNIKLVDKRSLRLLGSPILDESISPFVEEKIQKFNNASDRLLKINAHMAFTIIRFCLFVPKFTYILRCCQLWKHSELLMGLDNIVKNTLVSVLNVDMDDRTWSQASLPVRLGGLGIRKISSVALPAFLSSVHGTHKLIEKILAPSLGTFEVAHLSEAKNAWGLACPNSDFPVVFSSQRLWDRPLCELARKNLLDTCPSVADRARLLAVSVWESGLWLQAMPSFNTGNLLDPTTFRLAISLRLGARCCVAHRCQCGTAVDQLGHHGLSCSKSAGRISRHASLNDIIRRAFTTANVAAILEPNGLMRDDGKRPDGMTLVPWKMGRPLVWDATCVDTMAPSHLPETHVRAGAAANSAEQLKRRKYSNLGSGYIFEPFGAETLGPWGPGAHRVFQSLSERLVDATRDQNAGTYLAQRISIAIQRGNAASGMLGTLPTGSGLEHLDCL

SEQ ID NO: 18995 - protein, 973 aa, Ennomos quercinarius
MSTQNNVVSLENRIQCPDCPQVRLFKGQKGLKIHQSKCHRVIQIPLSASVSGSLVASSSPTSAATPSKPFWEVLSSYKRFIPVLKRIPRGARISVAQSLSSSIRNVISKNTKHAWEHLLTFPYHVLYVKLDPTNKSSLTKRVKENCVRYKVLEEQCLDHEIIVPLNRRNNIINSKQNNDSATFKIVESKISDGDIKGAARVLFSSDTIAPYCSETIQSLQDKHPPAAANLHLPEPPLPNDVTVEVTPQEVAAAVTSFQSGSAGGLDGLTPQILKDLLSGISGEIGEALLRDLTALVNLMLSGQVNSDVIEILYGANLCALIKKDGGIRPIAVGTTYRRLAAKVGCRKKVAFLSNLFQPIQLGFGSRGGCEAAVHSLRTFLKLNCGEVLLKVDVKNAFNSVDRGALLTQVKDKIPELYKFLYQCYGNPTKLNYQNNAILSSVGCQQGDPLGPAIFSLAIHPIIQRLQSKLNVWYLDDGTLGGDVNTVFNDLGIIINEFRDIGLDLNFSKCELFVCDTCPDKDLVFEKFNSLAPNIKLVDKRSLRLLVSPILDESISPFVEEKIQKFNNASDRLLKINAHMAFTIIRFCLFVPKFTYILRCCQLWKHSELLMGLDSIVKNTLVSVLNVDMDDRTWSQASLPVRLGGLGIRKISSVALPAFLSSVHGTHKLIEKILAPSLGTFEVAHLSEAKNAWGLACPNSDFPVVLSSQRLWDRPLCELARKNLLDTCPSVADRARLLAVSVWESGLWLQAMPSFNTGNLLDPTTFRLAISLRLGARCCVAHRCQCGTAVDQLGHHGLSCSKSAGRISRHASLNDIIRRAFTTANVAAILEPNGLMRDDGKRPDGMTLVPWKMGRPLVWDATCVDTMAPSHLPETHVRAGAAANSAEQLKRRKYSNLGSGYIFEPFGVETLGPWGPGAHRVFQSLSERLVDATRDQNAGTYLAQRISIAIQRGNAASMLGTLPTGSGLEHLDCL

SEQ ID NO: 18996 - protein, 973 aa, Ennomos quercinarius
MSTQNNVVSLENRIQCPDCPQVRLFKGQKGLKIHQSKCHRVIQIPLSAPVSGSVVASSSPTSAATPSKPFWEVLSSYKRFIPVLKRIPRGARISVAQSLSSSIRNVISKNTKHAWEHLLTFPYHVLYVKLDPTNKSSLTKRVKENCVRYKVLEEQCLDHEIIVPLNRRNNIINSKQNNDSATFKIVESKISDGDIKGAARVLFSSDTIAPYCSETIQSLQDKHPPAAANLHLPEPPLPNDVTVEVTPQEVAAAVTSFQSGSAGGLDGLTPQILKDLLSGISGEIGEALLRDLTALVNLMLSGQVNSDVIEILYGANLCALIKKDGGIRPIAVGTTYRRLAAKVGCRKKVAFLSNLFQPIQLGFGSRGGCEAAVHSLRTFLKLNCGEVLLKVDVKNAFNSVDRGALLTQVKDKIPELYKFLYQCYGNPTKLNYQNNAILSSVGCQQGDPLGPAIFSLAIHPIIQRLQSKLNVWYLDDGTLGGDVNTVFNDLGIIINEFRDIGLDLNFSKCELFVCDTCPDKDLVFEKFNSLAPNIKLVDKRSLRLLGSPILDESISPFVEEKIQKFNNASDRLLKINAHMAFTIIRFCLFVPKFTYILRCCQLWKHSELLMGLDNIVKNTLVSVLNVDMDDRTWSQASLPVRLGGLGIRKISSVALPAFLSSVHGTHKLIEKILAPSLGTFEVAHLSEAKNAWGLACPNSDFPVVLSSQRLWDRPLCELARKNLLDTCPSVADRARLLAVSVWESGLWLQTMPSFNTGNLLDPTTFRLAISLRLGARCCVAHHCQCGTAVDQLGHHGLSCSKSAGRISRHASLNDIIRRAFTTANVAAILEPNGLMRDDGKRPDGMTLVPWKMGRPLVWDATCVDTMAPSHLPETHVRAGAAANSAEQLKRRKYSNLGSGYIFEPFGVETLGPWGPGAHRVFQSLSERLVDATRDQNAGTYLAQRVSIAIQRGNAASMLGTLPTGSGLEHLACL

SEQ ID NO: 18997 - protein, 998 aa, Hylaea fasciaria
MLCFIVVCLIILCYFYKYITSLFNTPNMPRCVQASESDTSNQQVVSLEDRVQCHECSQVRVFKGQRGLKIHQSKCHKNVDTPLSAPITNHSFASSAYQPFWKTLSQTKMSKPVLKRIPRGARFSVATVLSQAIRSVISQNTNRAWEHLLFLPYAVLYVSPDQNNKKSLTTRVKENCVQYSALVEPALLSGRDLVLNQSPNFTVKPVTESATIKLVESKLSDGDIKGAARILFSSDTIAPATPETLLELEGKHPTPAANLQLPEAPSDSDASIEITAQDISAAVASFQSGSAGGLDALTPQHLKDLLSGGSGETGEALLRDLTTLITLMLSGRVNRDITEILYGANLCALKKKDGGVRPIAVGMTYRRLAAKICCKKSAPELANLFQPVQLGFGSRGGCEAAVHSVRTFLDQNCGEVLLKVDVKNAFNSVDRGALLTEVKDKIPNLYKFIWQCYSSATKLTYLGHEILSAVGCQQGDPLGPAIFSLAIHPIIQRLQSKLNVWYLDDGTFGGDADTVYGDLLFLIQEFRDIGLELNFSKCELFVSDNCLTKDLVVQKFNTLAPNIKIIDKCSLRLLGSPILDESFPSFFDEKIQNFLQCSDRLSKLNTHMAFTILKYCLFVPKFTYILRCCQLWTHTELLQSLDNIVKNTLASILNLNFEERTWLQASLPVRLGGLGVRSISGVSLPAFLSSVHSTQNLITKILAASLDISVISHMNEARSAWVLACPNTDFPSSTSSQRLWDGPICELTRKKLLNTCSSSTDRARLLAVAEWESGLWLQALPSPNTGTLMDSTSFRISVSLRLGASCCAPHRCQCGTAVDRLGHHGLSCSRSAGRIPRHSSLNDIIRRGFATANCAAILEPSGLMRDDGKRPDGMTLIPWKMGRPLVWDATCVDTLAPSHLSRTETRAGAAAESAEDLKGRKYSALDSGYLFVPFGVETLGPWGPGAHKIFKDLSGRLVDATRDQNAGLYFGQRLSIAIQRGNAASILGTLPTGSGLLD

SEQ ID NO: 18998 - protein, 985 aa, Ennomos quercinarius
MIFINNQQILEKMSTQNNVVSLENRIQCPDCPQVRLFKGQKGLKIHQSKCHRVIQIPLSAPVSGSVVASSSPTSAATPSKPFWEVLSSYKRFIPVLKRIPRGARILVAQSLSSSIRNVISKNTKHAWEHLLTFPYHVLYVKLDPTNKSSLTKRVKENCVRYKVLEEQCLDHEIIVPLNRRNNIINSKQNNDSATFKIVESKISDGDIKGAARVLFSSDTIAPYCSETIQSLQDKHPPAAANLHLPEPPLPNDVTVEVTPQEVAAAVTSFQSGSAGGLDGLTPQILKDLLSGISGEIGEALLRDLTALVNLMLSGQVNSDVIEILYGANLCALIKKDGGIRPIAVGTTYRRLAAKVGCRKKVAFLSNLFQPIQLGFGSRGGCEAAVHSLRTFLKLNCSEVLLKVDVKNAFNSVDRGALLTQVKDKIPELYKFLYQCYGNPTKLNYQNNAILSSIGCQQGDPLGPAIFSLAIHPIIQRLQSKLNVWYLDDGTLGGDVNTVFNDLGIIINEFRDIGLDLNFSKCELFVCDTCPDKDLIFEKSNSLAPNIKLVDKRSLRLLGSPILDESISPFVEEKIQKFNNASDRLLKINAHMAFTIIRFCLFVPKFTYILRCCQLWKHSELLMGLDNIVKNTLVSVLNVDMDDRTWSQASLPVRLGGLGIRKISSVALPAFLSSVHGTHKLIEKILAPSLGTFEVAHLSEAKNAWGLACPNSDFPVVLSSQRLWDRPLCELARKNLLDTCPSVADRARLLAVSVWESGLWLQAMPSFNTGNLLDPTTFRLAISLRLGARCCVAHHCQCGTAVDQLGHHGLSCSKSAGRISRHASLNDIIRRAFTTANVAAILEPNGLMRDDGKRPDGMTLVPWKMGRPLVWDATCVDTMAPSHLPETHVRAGAAANSAEQLKRRKYSNLGSGYIFEPFGVETLGPWGPGAHRVFQSLSERLVDATRDQNAGTYLAQRISIAIQRGNAASMLGTLPTGSGLEHLDCL

SEQ ID NO: 18999 - protein, 973 aa, Ennomos quercinarius
MSTQNNVVSLENRIQCPDCPQVRLFKGQKGLKIHQSKCHRVIQIPLSAPVSGSVVASSSPTSAATPSKPFWEVLSSYKRFIPVLKRIPRGARISVAQSLSSSIRNVISKNTKHAWEHLLTFPYHVLYVKLDPTNKSSLTKRVKENCVRYKVLEEQCLDHEIIVPLNRRNNIINSKQNNDSATFKIVESKISDGDIKGAARVLFSSDTIAPYCSETIQSLQDKHPPAAANLHLPEPPLPNDVTVEVTPQEVAAAVTSFQSGSAGGLDGLTPQILKDLLSGISGEIGEALLRDLTALVNLMLSGQVNSDVIEILYGANLCALIKKDGGIRPIAVGTTYRRLAAKVGCRKKVAFLSNLFQPIQLGFGSRGGCEAAVHSLRTFLKLNCGEVLLKVDVKNAFNSVDRGALLTQVKDKIPELYKFLYQCYGNPTKLNYQNNAILSSVGCQQGDPLGPAIFSLAIHPIIQRLQSKLNVWYLDDGTLGGDVNTVFNDLGIIINEFRDIGLDLNFSKCELFVCDTCPDKDLVFEKFNSLAPNIKLVDKRSLRLLGSPILDESISPFVEEKIQKFNNASDRLLKINAHMAFTIIRFCLFVPKFTYILRCCQLWKHSELLMGLDSIVKNTLVSVLNVDMDDRTWSQASLPVRLGGLGIRKISSVALPAFLSSVHGTHKLIEKILAPSLGTFEVAHLSEAKNAWGLACPNSDFPVVLSSQRLWDRPLCELARKNLLDTCPSVADRARLLAVSVWESGLWLQAMPSFNTGNLLDPTTFRLAISLRLGARCCVAHRCQCGTAVDQLGHHGLSCSKSAGRISRHASLNDIIRRAFTTANVAAILEPNGLMRDDGKRPDGMTLVPWKMGRPLVWDATCVDTMAPSHLPETHVRAGAAANSAEQLKRRKYSNLGSGYIFEPFGVETLGPWGPGAHRVFQSLSERLVDATRDQNAGTYLAQRISIAIQRGNAASMLGTLPTGSGLEHLDCL

SEQ ID NO: 19000 - protein, 973 aa, Ennomos quercinarius
MSTQNNVVSLENRIQCPDCPQVRLFKGQKGLKIHQSKCHRVIQIPLSAPVSGSLVASSSPTSAATPSKPFWEVLSSYKRFIPVLKRIPRGARISVAQSLSSSIRNVISKNTKHAWEHLLTFPYHVLYVKLDPTNKSSLTKRVKENCVRYKVLEEQCLDHEIIVPLNRRNNIINSKQNNDSATFKIVESKISDGDIKGAARVLFSSDTIAPYCSETIQSLQDKHPPAAANLHIPEPPLPNDVTVEVTPQEVAAAVTSFQSGSAGGLDGLTPQILKDLLSGISGEIGEALLRDLTALVNLMLSGQVNSDVIEILYGANLCALIKKDGGIRPIAVGTTYRRLAAKVGCRKKVAFLSNLFQPIQLGFGSRGGCEAAVHSLRTFLKLNCGEVLLKVDVKNAFNSVDRGALLTQVKDKIPELYKFLYQCYGNPTKLNYQNNAILSSVGCQQGDPLGPAMFSLAIHPIIQRLQSKLNVWYLDDGTLGGDVNTVFNDLGIIINEFRDIGLDLNFSKCELFVCDTCPDKDLVFEKFNSLAPNIKLVDKRSLRLLGSPILDESISPFVEEKIQKFNNASDRLLKINAHMAFTIIRFCLFVPKFTYILRCCQLWKHSELLMGLDSIVKNTLVSVLNVDMDDRTWSQASLPVRLGGLGIRKISSVALPAFLSSVHGTHKLIEKILAPALGTFEVAHLSEAKNAWGLACPNSDFPVVLSSQRLWDRPLCELARKNLLDTCPSVADRARLLAVSVWESGLWLQAMPSFNTGNLLDPTTFRLAISLRLGARCCVAHRCQCGTAVDQLGHHGLSCSKSAGRISRHASLNDIIRRAFTTANVAAILEPNGLMRDDGKRPDGMTLVPWKMGRPLVWDATCVDTMAPSHLPETHVRAGAAANSAEQLKRRKYSNLGSGYIFEPFGVETLGPWGPGAHRVFQSLSERLVDATRDQNAGTYLAQRISIAIQRGNAASMLGTLPTGSGLEHLDCL

SEQ ID NO: 19001 - protein, 675 aa, Ennomos quercinarius
MLSGQVNSDVIEILYGANLCALIKKDGGIRPIAVGTTYRRLAAKVGCRKKVAFLSNLFQPIQLGFGSRGGCEAAVHSLRTFLKLNCGEVLLKVDVKNAFNSVDRGALLTQVKDKIPELYKFLYQCYGNPTKLNYQNNAILSSVGCQQGDPLGPAIFSLAIHPIIQRLQSKLNVWYLDDGTLGGDVNTVFNDLGIIINEFRDIGLDLNFSKCELFVCDTCPDKDLVFEKFNSLAPNIKLVDKRSLRLLGSPILDESISPFVEEKIQKFNNASDRLLKINAHMAFTIIRFCLFVPKFTYILRCCQLWKHSELLMGLDNIVKNTLVSVLNVDMDDRTWSQASLPVRLGGLGIRKISSVALPAFLSSVHGTHKLIEKILAPSLGTFEVAHLSEAKNAWGLACPNSDFPVVLSSQRLWDRPLCELARKNLLDTCPSVADRARLLAVSVWESGLWLQAMPSFNTGNLLDPTTFRLAISLRLGARCCVAHHCQCGTAVDQLGHHGLSCSKSAGRISRHASLNDIIRRAFTTANVAAILEPNGLMRDDGKRPDGMTLVPWKMGRPLVWDATCVDTMAPSHLPETHVRAGAAANSAEQLKRRKYSNLGSGYIFEPFGAETLGPWGPGAHRVFQSLSERLVDATRDQNAGTYLAQRISIAIQRGNAASMLGTLPTGSGLEHLDCL

SEQ ID NO: 19002 - protein, 973 aa, Ennomos quercinarius
MSTQNNVVSLENRIQCPDCPQVRLFKGQKGLKIHQSKCHRVIQIPLSAPVSGSLVASSSPTSAATPSKPFWEVLSSYKRFIPVLKRIPRGARISVAQSLSSSIRNVISKNTKHAWEHLLTFPYHVLYVKLDPTKKSSLTKRVKENCVRYKVLEEQCLDHEIIVPLNRRNNIINSKQNNDSATFKIVESKISDGDIKGAARVLFSSDTIAPYCSETIQSLQDKHPPAAANLHLPEPPLPNDVTVEVTPQEVAAAVTSFQSGSAGGLDGLTPQILKDLLSGISGEIGEALLRDLTALVNLMLSGQVNSDVIEILYGANLCALIKKDGGIRPIAVGTTYRRLAAKVGCRKKVAFLSNLFQPIQLGFGSRGGCEAAVHSLRTFLKLNCGEVLLKVDVKNAFNSVDRGALLTQVKDKIPELYKFLYQCYGNPTKLNYQNNAILSSVGCQQGDPLGPAIFSLAIHPVIQRLQSILNVWYLDDGTLGGDVNTVFNDLCIIINEFRDIGLDLNFSKCELFVCDTCPDKDLVFEKFNSLAPNIKLVDKRSLRLLGSPILDESISPFVEEKIQKFNNASDRLLKINAHMAFTIIRFCLFVPKFTYILRCCQLWKHSELLMGLDSIVKNTLVSVLNVDMDDRTWSQASLPVRLGGLGIRKISSVALPAFLSSVHGTHKLIEKILAPSLGTFEVAHLSEAKNAWGLACPNSDFPVVLSSQRLWDRPLCELARKNLLDTCPSVADRARLLAVSVWESGLWLQAMPSFNTGNLLDPTTFRLAISLRLGARCCVAHRCQCGTAVDQLGHHGLSCSKSAGRISRHASLNDIIRRAFTTANVAAILEPNGLMRDDGKRPNGMTLVPWKMGRPLVWDATCVDTMAPSHLPETHVRAGAAANSAEQLKRRKYSNLGSGYIFEPFGVETLGPWGPGAHRVFQSLSERLVDATRDQNAGTYLAQRISIAIQRGNAASMLGTLPTGSGLEHLDCL

SEQ ID NO: 19003 - protein, 675 aa, Ennomos quercinarius
MLSGQVNSDVIEILYGANLCALIKKDGGIRPIAVGTTYRRLAAKVGCRKKVAFLSNLFQPIQLGFGSRGGCEAAVHSLRTFLKLNCGEVLLKVDVKNAFNSVDRGALLTQVKDKIPELYKFLYQCYGNPTKLNYQNNAILSSVGCQQGDPLGPAIFSLAIHPIIQRLQSKLNVWYLDDGTLGGDVNTVFNDLGIIINEFRDIGLDLNFSKCELFVCDTCPDKDLVFEKFNSLAPNIKLVDKRSLRLLGSPILDESISPFVEEKIQKFNNASDRLLKINAHMAFTIIRFCLFVPKFTYILRCCQLWKHSEFLMGLDNIVKNTLVSVLNVDMDDRTWSQASLPVRLGGLGIRKISSVALPAFLSSVHGTHKLIEKILAPSLGTFEVAHLSEAKNAWGLACPNSDFPVVLSSQRLWDRPLCELARKNLLDTCPSVADRARLLAVSVWESGLWLQAMPSFNTGNLLDPTTFRLAISLRLGARCCVAHHCQCGTAVDQLGHHGLSCSKSAGRISRHASLNDIIRRAFTTANVAAILEPNGLMRDDGKRPDGMTLVPWKMGRPLVWDATCVDTMAPSHLPETHVRAGAAANSAEQLKRRKYSNLGSGYIFEPFGVETLGPWGPGAHRVFQSLSERLVDATRDQNAGTYLAQRISIAIQRGNAASMLGSLPTGSGLEHLDCL

SEQ ID NO: 19004 - protein, 973 aa, Ennomos quercinarius
MSTQNNVVSLENRIQCPDCPQVRLFKGQKGLKIHQSKCHRVIQIPLSAPVSGLLVASSSPTSAATPSKPFWEVLSSYKRFIPVLKRIPRGARISVAQSLSSSIRNVISKNTKHAWEHLLTFPYHVLYVKLDPTNKSSLTKRVKENCVRYKVLEEQCLDHEIIVPLNRRNNIINSKQNNDSATFKIVESKISDGDIKGAARVLFSSDTIAPYCSETIQSLQDKHPPAAANLHLPEPPLPNDVTVEVTPQEVAAAVTSFQSGSAGVLDGLTPQILKDLLSGISGEIGEALLRDLTALVNLMLSGQVNSDIIEILYGANLCALIKKDGGIRPIAVGTTYRRLAAKVGCRKKVAFLSNLFQPIQLGFGSRGGCEAAVHSLRTFLKLNCGEVLLKVDVKNAFNSVDRGALLTQVKDKIPELYKFLYQCYGNPTKLNYQNNAILSSVGCQQGDPLGPAIFSLVIHPIIQRLQSKLNVWYLDDGTLGGDVNTVFNDLGIIINEFRDIGLDLNFSKCELFVCDTCPDKDLVFEKFNSLAPNIKLVDKRSLRLLGSPILDESISPFVEEKIQKFNNASDRLLKINAHMAFTIIRFCLFVPKFTYILRCCQLWKHSELLMGLDSIVKNTLVSVLNVDMDDRTWSQASLPVRLGGLGIRKISSVALPAFLSSVHGTHKLIEKILAPSLGTFEVAHLSEAKNAWGLASPNSDFPVVLSSQRLWDRPLCELARKNLLDTCPSVADRARLLAVSVWESGLWLQAMPSFTTGNLLDPTTFRLAISLRLGARCCVAHRCQCGTAVDQLGHHGLSCSKSAGRISRHASLNDIIRRAFTTANAAAILEPNGLMRDDGKRPDGMTLVPWKMGRPLVWDATCVDTMAPSHLPETHVRAGAAANSAEQLKRRKYSNLGSGYIFEPFGVETLGPWGPGAHRVFQSLSERLVDATRDQNAGTYLAQRISIAIQRGNAASMLGTLPTGSGLVHLDCL

SEQ ID NO: 19005 - protein, 675 aa, Ennomos quercinarius
MLSGQVNSDVIEILYGANLCALIKKDGGIRPIAVGTTYRRLAAKVGCRKKVAFLSNLFQPIQLGFGSRGGCEAAVHSLRTFLKLNCGEVLLKVDVKNAFNSVDRGALLTQVKDKIPELYKFLYQCYGNPTKLNYQNNAILSSVGCQQGDPLGPAIFSLAIHPIIQRLQSKLNVWYLDDGTLGGDVNTVFNDLGIIINEFRDIGLDLNFSKCELFVCDTCPDKDLVFEKFNSLAPNIKLVDKRSLRLLGSPILDESISPFVEEKIQKFNNASDRLLKINAHMAFTIIRFCLFVPKFTYILRCCQLWKHSELLMGLDNIVKNTLVSVLNVDMDDRTWSQASLPVRLGGLGIRKISSVALPAFLSSVHGTHKLIEKILAPSLGTFEVAHLSEAKNAWGLACPNSDFPVVLSSQRLWDRPICELARKNLLDTCPSVADRARLLAVSVWESGLWLQAMPSFNTGNLLDPTTFRLAISLRLGARCCVAHHCQCGTAVDQLGHHGLSCSKSAGRISRHASLNDIIRRAFTTANVAAILEPNGLMRDDGKRPDGMTLVPWKMGRPLVWDATCVDTMAPSHLPETHVRAGAAANSAEQLKRRKYSNLGSGYIFEPFGAETLGPWGPGAHRVFQSLSERLVDATRDQNAGTYLAQRISIAIQRGNAASMLGTLPTGSGLEHLDCL

SEQ ID NO: 19006 - protein, 973 aa, Ennomos quercinarius
MSTQNNVVSLENRIQCPDCPQVRLFKGQKGLKIHQSKCHRVIQIPLSAPVSGSLVASSSPTSAATPSKPFWEVLSSYKRFIPVLKRIPRGARISVAQSLSSSIRNVISKNTKHAWEHLLTFPYHVLYVKLDPTNKSSLTKRVKENCVRYKVLEEQCLDYEIIVPLNRRNNIINSKQNNDSATFKIVESKISDGDIKGAARVLFSSDTIAPYCSETIQSLQDKHPPAAANLHLPEPPLPNDVTVEVTPQEVAAAVTSFQSGSAGGLDGLTPQILKDLLSGISGEIGEALLRDLTALVNLMLSGQVNSDVIEILYGANLCALIKKDGGIRPIAVGTTYRRLAAKVGCRKKVAFLSNLFQPIQLGFGSRGGCEAAVHSLRTFLKLNCGEVLLKVDVKNAFNSVDRGALLTQVKDKIPELYKFLYQCYGNPTKLNYQNNAILSSVGCQQGDPLGPAIFSLAIHPIIQRLQSKLNVWYLDDGTLGGDVNTVFNDLGIIINEFRDIGLDLNFSKCELFVCDTCPDKDLVFEKFNSLAPNIKLVDKRSLRLLGSPILDESISPFVEEKIQKFNNASDRLLKINAHMAFTIIRFCLFVPKFTYILRCCQLWKHSELLMGLDSIVKNTLVSVLNVDMDDRTWSQASLPVRLGGLGIRKISSVALPAFLSSVHGTHKLIEKILAPSLGTFEVAHLSEAKNAWGLACPNSDFPVVLSSQRLWDRPLCELARKNLLDTCPSVADRARLLAVSVWESGLWLQAMPSFNTGNLLDPTTFRLAISLRLGARCCVAHRCQCGTAVDQLGHHGLSCLKSAGRISRHASLNDIIRRAFTTANAAAILEPNGLMRDDGKRPDGMTLVPWKMGRPLVWDATCVDTMAPSHLPETHVRAGAAANSAEQLKRRKYSNLGSGYIFEPFGVETLGPWGPGAHRVFQSLSERLVDATRDQNAGTYLAQRISIAIQRGNAASMLGTLPTGSGLEHLDCL

SEQ ID NO: 19007 - protein, 973 aa, Ennomos quercinarius
MSTQNNVVSLENRIQCPDCPQVRLFKGQKGLKIHQSKCHRVIQIPLSAPVSGSLVASSSPTSAATPSKPFWEVLSSYKRFIPVLKRIPRGARISVAQSLSSSIRNVISKNTKHAWEHLLTFPYHVLYVKLDPTNKSSLTKRVKENCVRYKVLEEQCLDHEIIVPLNRRNNIINSKQNNDSATFKIVESKISDGDIKGAARVLFSSDTIAPYCSETIQSLQDKHPSAAANLHLPEPPLPNDVTVEVTPQEVAAAVTSFQSGSAGGLDGLTPQILKDLLSGISGEIGEALLRDLTALVNLMLSGQVNSDVIEILYGANLCALIKKDGGIRPIAVGTTYRRLAAKVGCRKKVAFLSNLFQPIQLGFGSRGGCEAAVHSLRTFLKLNCGEVLLKVDVKNAFNSVDRGALLTQIKDKIPELYKFLYQCYGNPTKLNYQNNAILSSVGCQQGDPLGPAIFSLAIHPIIQRLQSKLNVWYLDDGTLGGDVNTVFNDLGIIINEFRDIGLDLNFSKCELFVCDTCPDKDLVFEKFNSLAPNIKLVDKRSLRLLGSPILDESISPFVEEKIQKFNNASDRLLKINAHMAFTIIRFCLFVPKFTYILRCCQLWKHSELLMGLDSIVKNTLVSVLNVDMDDRTWSQASLPVRLGGLGIRKISSVALPAFLSSVHGTHKLIEKILAPSLGTFEVAHLSEAKNAWGLACPNSDFPVVLSSQRLWDRPLCELARKNLLDTCPSVADRARLLAVSVWESGLWLQAMPSFNTGNLLDPTTFRLAISLRLGARCCVAHRCQCGTAVDQLGHHGLSCSKSAGRISRHASLNDIIRRAFTTANVAAILEPNGLMRDDGKRPDGMTLVPWKMGRPLVWDATCVDTMAPSHLPETHVRAGAAANSAEQLKRRKYSNLGSGYIFEPFGVETLGPWGPGAHRVFQSLSERLVDATRDQNAGTYLAQRISIAIQRGNAASMLGTLPTGSGLEHLDCL

SEQ ID NO: 19008 - protein, 973 aa, Ennomos quercinarius
MSTQNNVVSLENRIQCPDCPQVRLFKGQKGLKIHQSKCHRVIQIPLSAPVSGSLVASSSPTSAATPSKPFWEVLSSYKRFIPVLKRIPRGARISVAQSLSSSIRNVISKNTKHAWEHLLTFPYHVLYVKLDPTNKSSLTKRVKENCVRYKVLEEQCLNHEIIVPLNRRNNIINSKQNNDSATFKIVESKISDGDIKGAARVLFSSDTIAPYCSETIQSLQDKHPPAAANLHLPEPPLPNDVTVEVTPQEVAAAVTSFQSGSAGGLDGLTPQILKDLLSGISGEIGEALLRDLTALVNLMLSGQVNSDVIEILYGANLCALIKKDGGIRPIAVGTTYRRLAAKVGCRKKVAFLSNLFQPIQLGFGSRGGCEAAVHSLRTFLKLNCGEVLLKVDVKNAFNSVDRGALLTQVKDKIPELYKFLYQCYGNPTKLNYQNNAILSSVGCQQGDPLGPVIFSLAIHLIIQRLQSKLNVWYLDDGTLGGDVNTVFNDLGIIINEFRDIGLDLNFYKCELFVCDTCPDKDLVFEKFNSLAQSIKLVDKRSLRLLGSPILDEPISPFVEEKIQKFNNASDRLLKINAHMAFTIIRFCLFVPKFTYILRCCQLWKHSELLMGLDSIVKNTLVSVLNVDMDDRTWSQASLPVRLGGLGIRKISSVALPAFLSSVHGTHKLIEKILAPSLGTFEVAHLSEAKNAWGLACPNSDFPVVLSSQRLWDRPLCELARKNLLDTCPSVADRARLLAVSVWESGLWLQAMPSFNTGNLLDPTTFRLAISLRLGARCCVAHRCQCGTAVDQLGHHGLSCSKSAGRISRHASLNDIIRRAFTTANVAAILEPNGLMRDDGKRPDGMTLVPWKMGRPLVWDATCVDTMAPSHLPETHVRAGAAANSAEQLKRRKYSNLGSGYIFEPFGVETLGPWGPGAHRVFQSLSERLVDATRDQNAGTYLAQRISIAIQRGNAASMLGTLPTGSGLEHLDCL

SEQ ID NO: 19009 - protein, 675 aa, Ennomos quercinarius
MLSGQVNSDVIEILYGANLCALIKKDCGIRPIAVGTTYRRLAAKVGCRKKVAFLSNLFQPIQLGFGSQGGCEAAVHSLRTFLKLNCGEVLLKVDVKNAFNSVDRGALLTQVKDKIPELYKFLYQCYGNPTKLNYQNNAILSSVGCQQGDPLGPAIFSLAIHPIIQRLQSKLNVWYLDDGTLGGDVNTVFNDLGIIINEFRDIGLDLNFSKCELFVCDTCPDKDLVFEKFNSLAPNIKLVDKRSLRLLGSPILDESISPFVEEKIQKFNNASDRLLKINAHMAFTIIRFCLFVPKFTYILRCCQLWKHSELLMGLDNIVKNTLVSVLNVDMDDRTWSQASLPVRLGGLGIRKISSVALPAFLSSVHGTHKLIEKILAPSLGTFEVAHLSEAKNAWGLACPNSDFPVVLSSQRLWDRPLCELARKNLLDTCPSVADRARLLAVSVWESGLWLQAMPSFNTGNLLDPTTFRLAISLRLGARCCVAHHCQCGTAVDQLGHHGLSCSKSAGRISRHASLNDTIRRAFTTANVAAILEPNGLMRDDGKRPDGMTLVPWKMGRPLVWDATCVDTMAPSHLPETHVRSGAAANSAEQLKRRKYSNLGSGYIFEPFGVETLGPWGPGAHRVFQSLSERLVDATRDQNAGTYLAQRISIAIQRGNAASMLGTLPTGSGLEHLDCL

SEQ ID NO: 19010 - protein, 973 aa, Ennomos quercinarius
MSTQNNVVSLENRIQCPDCPQVRLFKGQKGLKIHQSKCHRVIQIPLSAPVSGSLVASSSPTSAATPSKPFREVLSSYKRFIPVLKRIPRGARISVAQSLSSSIRNVISKNTKHAWEHLLTFPYHVLYVKLDPTNKSSLTKRVKENCVRYKVLEEQCLDHEIIVPLNRRNNIINSKQNNDSATFKIVESKISDGDIKGAARVLFSSDTIAPYCSETIQSLQDKHPPAAANLHLPEPPLPNDVTVEVTPQEVAAAVTSFQSGSAGGLDGLTPQILKDLLSGISGEIGEALLRDLTALVNLMLSGQVNSDVIEILYGANLCALIKKDGGIRPIAVGTTYRRLAAKVGCRKKVAFLSNLFQPIQLGFGSRGGCEAAVHSLRTFLKLNCGEVLLKVDVKNAFNSVDRGALLTQVKDKIPELYKFLYQCYGNPTKLNYQNNAILSSVGCQQGDPLGPAIFSLAIHPIIQRLQSKLNVWYLDDGTLGGDVNTVFNDLGIIINEFRDIGLDLNFSKCELFVCDTCPDKDLVFEKFNSLAPNIKLVDKRSLRLLGSPILDESISPFVEEKIQKFNNASDRLLKINAHMAFTIIRFCLFVPKFTYILRCCQLWKHSELLMGLDSIVKNTLVSVLNVDMDDRTWSQASLPVRLGGLGIRKISSVALPAFLSSVHGTHKLIEKILAPSLGTFEVAHLSEAKNAWGLTCPNSDFPVVLSSQRLWDRPLCELARKNLLDTCPSVADRARLLAVSVWESGLWLQAMPSFTTGNLLDPTTFRLAISLRLGARCCVAHRCQCGTAVDQLGHHGLSCSKSAGRISRHASLNDIIRRAFTTANAAAILEPNGLMRDDGKRPDGMTLVPWKMGRPLVWDATCVDTMAPSHLPETHVRAGAAANSAEQLKRRKYSNLGSGYIFEPFGVETLGPWGPGAHRVFQSLSERLVDATRDQNAGTYLAQRISIAIQRGNAASMLGTLPTGSGLVHLDCL

SEQ ID NO: 19011 - protein, 949 aa, Hylaea fasciaria
MLCFIVVCLIILCYFYKYITSLFNTPNMPRCVQASESDTSNQQVVSLEDRVQCHECSQVRVFKGQRGLKIHQSKCHKNVDTPLSAPITNHSFASSAYQPFWKTLSQTKMSKPVLKRIPRGARFSVATVLSQAIRSVISQNTNRAWEHLLFLPYAVLYVSPDQNNKKSLTTRVKENCVQYSALVEPALLSGRDLVLNQSPNFTVKPVTESATIKLVESKLSDGDIKGAARILFSSDTIAPATPETLLELEGKHPTPAANLQLPEAPSDSDASIEITAQDISAAVASFQSGSAGGLDALTPQHLKDLLSGGSGETGEALLRDLTTLITLMLSGRVNRDITEILYGANLCALKKKDGGVRPIAVGMTYRRLAAKICCKKSAPELANLFQPVQLGFGSRGGCEAAVHSVRTFLDQNCGEVLLKVDVKNAFNSVDRGALLTEVKDKIPNLYKFIWQCYSSATKLTYLGHEILSAVGCQQGDPLGPAIFSLAIHPIIQRLQSKLNVWYLGDGTFGGDADTVYGDLLFLIQEFRDIGLELNFSKCELFVSDNCLTKDLVVQKFNTLAPNIKIIDKCSLRLLGSPILDESFPSFFDEKIQNFLQCSDRLSKLNTHMAFTILKYCLFVPKFTYILRCCQLWTHTELLQSLDNIVKNTLASILNLNFEERTWLQASLPVRLGGLGVRSISGVSLPAFLSSVHSTQNLITKILAASLDISVISHMNEARSAWVLACPNTDFPSSTSSQRLWDGPICELTRKKLLNTCSSSTDRARLLAVAEWESGLWLQALPSPNTGTLMDSTSFRISVSLRLGASCCAPHRCQCGTAVDRLGHHGLSCSRSAGRIPRHSSLNDIIRRGFATANCAAILEPSGLMRDDGKRPDGMTLIPWKMGRPLVWDATCVDTLAPSHLSRTETRAGAAAESAEDLKGRKYSALDSGYLFVPFGWGHGDREPTKSSKT

SEQ ID NO: 19012 - protein, 997 aa, Crocallis elinguaria
MLLLTFFLISIVFLIITYVKKSKLCTPEMQHCVQANASDPIVSQNSLVQCPDCSQVRFFKGHRGLKIHQGKCHKNSNIPLSDPISNENSNTLSSLGQPFWHILSQCKINIPVLKRIPRGARLSVATVLSQAIRDVILQNSKHTWERLLFFPYAVLYVRKEPHNKTSLTTRVKENCVKYSSMEVPFFLSDNNLDLNKNSKCTLKPFTESSIFRRIENKLSDGDIKGAARMLFSSDTMAPSNPETLSILEGKHPPPAASLQLPDAPEDSDVSVEITAFDVSSAVTSFQSGSAGGLDALTPQHLKDLLCGGNGEAGEALLRDLTALINLMLSGRVNGDIIEILYGANLCALKKKDGGIRPIAIGMTYRRLAAKICCKKIAPQLENLFQPIQLGFGSRGGCEAAVHSVRTFLNKNCGELLLKVDVKNAFNSVDRGALLTQVKDKIPNLYNYLWQCYGSSTKLTYNGKEISSAVGCQQGDPLGPAVFSLAIHPIIQRLQSKLNVWYLDDGTLGGDVNTVYDDLLFLTEEFRSIGLVLIFSKCELFISDNCPAKDFILQKFNNFAPNIKVIDKYSLRLLGSPILDESFPLFVEEKIQNFLLCSDRLSKISTHMAFTIIRFCLFVPKFTYTLRCCQLWKHTDLLQTLDNIVKTTLESILNINLKDREWLQASRPVRSGGLGIRSISGVALPAFLSSVHSTQKLTQKILAASITDPEITFSTEAKNTWLLACPNSEFPNTPSSQKLWDRPLCEQVRKQLFNTYLSSAERARLLAVAEWESGLWLQALPSQNTGTLLDSSAFRIAASLRLGASCCAPHRCQCGSAVDRLGHHGLSCQRSAGRISRHASLNDIIRRAFASANCAAILEPNGLVRDDGKRPDGMTLIPWKMGRPLVWDATCVDTLAPSHLPGTQNKAGAAAESAENLKRRKYSSLDSSYIFEPFGVETLGPWGPGAHRIFKDLSGRLVEATRDQNAGLYLGQRLSIAIQRGNAASILGTLPTGSGLLD

SEQ ID NO: 19013 - protein, 958 aa, Ennomos quercinarius
MSTQNNVVSLENRIQCPDCPQVRLFKGQKGLKIHQSKCHRVIQIPLSAPVSGSLVASSSPTSAATPSKPFWEVLSSYKRFAQSLSSSIRNVISKNTKHAWEHLLTFPYHVLYVKLDPTNKSSLTKRVKENCVRYKVLEEQCLDHEIIVPLNRRNNIINSKQNNDSATFKIVESKISDGDIKGAARVLFSSDTIAPYCSETIQSLQDKHPPAAANLHLPEPPLPNDVTVEVTPQEVAAAVTSFQSGSAGGLDGLTPQILKDLLSGISGEIGEALLRDLTALVNLMLSGQVNSDVIEILYGANLCALIKKDGGIRPIAVGTTYRRLAAKVGCRKKVAFLSNLFQPIQLGFGSRGGCEAAVHSLRTFLKLNCGEVLLKVDVKNAFNSVDRGALLTQVKDKIPELYKFLYQCYGNPTKLNYQNNAILSSVGCQQGDPLGPAIFSLAIHPIIQRLQSKLNVWYLDDGTLGGDVNTVFNDLGIIINEFRDIGLDLNFSKCELFVCDTCPDKDLVFEKFNSLAPNIKLVDKRSLRLLGSPILDESISPFVEEKIQKFNNASDRLLKINAHMAFTIIRFCLFVPKFTYILRCCQLWKHSELLMGLDSIVKNTLVSVLNVDMDDRTWSQASLPVRLGGLGIRKISSVALPAFLSSVHGTHKLIEKILAPSLGTFEVAHLSEAKNAWGLACPNSDFPVVLSSQRLWDRPLCELARKNLLDTCPSVADRARLLAVSVWESGLWLQAMPSFNTGNLLDPTTFRLAISLRLGARCCVAHRCQCGTAVDQLGHHGLSCSKSAGRISRHASLNDIIRRAFTTANVAAILEPNGLMRDDGKRPDGMTLVPWKMGRPLVWDATCVDTMAPSHLPETHVRAGAAANSAEQLKRRKYSNLGSGYIFEPFGVETLGPWGPGAHRVFQSLSERLVDATRDQNAGTYLAQRISIAIQRGNAASMLGTLPTGSGLEHLDCL

SEQ ID NO: 19014 - protein, 973 aa, Ennomos quercinarius
MSTQNNVVSLENRIQCPDCPQVRLFKGQKGLKIHQSKCHRVIQIPLSAPVSGSVVASSSPTSAATPSKPFWEVLSSYKRFIPVLKRIPRGARISVAQSLSSSIRNVISKNTKHAWEHLLTFPYHVLYVKLDPTNKSSLTKRVKENCVRYKVLEEQCLDHEIIVPLNRRNNIINSKQNNDSATFKIVESKISDGDIKGAARVLFSSDTIAPYCSETIQSLQDKHPPAAANLHLPEPPLPNDVTVEVTPQEVAAAVTSFQSGSAGGLDGLTPQILKDLLSGISGEIGEALLRDLTALVNLMLSGQVNSDVIEILYGANLCALIKKDGGIRPIAVGTTYRRLAAKVGCRKKVAFLSNLFQPIQLGFGSRGGCEAAVHSLRTFLKLNCGEVLLKVDVKNAFNSVDRGALLTQVKDKIPELYKFLYQCYGNPTKLNYQNNAILSSVGCQQGDPLGPAIFSLAIHPIIQRLQSKLNVWYLDDGTLGGDVNTVFNDLGIIINEFRDIGLDLNFSKCELFVCDTCPDKDLVFEKFNSLAPNIKLVDKRSLRLLGSPILDESISPSVEEKIQKFNNASDRLLKINAHMAFTIIRFCLFVPKFTYILRCCQLWKHSEFLMGLDNIVKNTLVSVLNVDMDDRTWSQASLPVRLGGLGIRKISSVALPAFLSSVHGTHKLIEKILAPSLGTFEVAHLSEAKNAWGLACPNSDFPVVLSSQRLWDRPLCELARKNLLDTCPSVADRARLLAVSVWESGLWLQAMPSFNTGNLLDPTTFRLAISLRLGARCCVAHHCQCGTAVDQLGHHGLSCSKSAGRISRHASLNDIIRRAFTTANVAAILEPNGLMRDDGKRPDGMTLVPWKMGRPLVWDATCVDTMAPSHLPETHVRAGAAANSAEQLKRRKYSNLGSGYIFEPFGVETLGPWGPGAHRVFQSLSERLVDATRDQNAGTYLAQRISIAIQRGNAASMLGTLPTGSGLEHLDCL

SEQ ID NO: 19015 - protein, 973 aa, Ennomos quercinarius
MSTQNNVVSLENRIQCPDCPQVRLFKGQKGLKIHQSKCHRVIQIPLSAPVSGSVVASSSPTSAATPSKPFWEVLSSYKRFIPVLKRIPRGARISVAQSLSSSIRNVISKNTKHAWEHLLTFPYHVLYVKLDPTNKSSLTKRVKENCVRYKVLEEQCLDHEIIVPLNRRNNIINSKQNNDSATFKIVESKISDGDIKGAARVLFSSDTIAPYCSETIQSLQDKHPPAAANLHLPEPPLPNDVTVEVTPQEVAAAVTSFQSGSAGGLDGLTPQILKDLLSGISGEIGEALLRDLTALVNLMLSGQVNSDVIEILYGANLCALIKKDGGIRPIAVGTTYRRLAAKVGCRKKVAFLSNLFQPIQLGFGSRGGCEAAVHSLRTFLKLNCGEVLLKVDVKNAFNSVDRGALLTQVKDKIPELYKFLYQCYGNPTKLNYQNNAILSSVGCQQGDPLGPAIFSLAIHPIIQRLQSKLNVWYLDDGTLGGDVNTVFNDLGIIINEFRDIGLDLNFSKCELFVCDTCPDKDLVFEKFNSLAPNIKLVDKRSLRLLGSPILDESISPFVEEKIQKFNNASDRLLKINAHMAFTIIRFCLFVPKFTYILRCCQLWKHSELLMGLDNIVKNTLVSVLNVDMDDRTWSQASLPVRLGGLGIRKISSVALPAFLSSVHGTHKLIEKILAPSLGTFEVAHLSEAKNAWGLACPNSDFPVVLSSQRLWDRPLCELARKNLLDTCPSVADRARLLAVSVWESGLWLQAMPSFNTGNLLVPTTFRLAISLRLGARCCVAHHCQCGTAVDQLGHHGLSCSKSAGRISRHASLNDIIRRAFTTANVAAILEPNGLMRDDGKRPDGMTLVPWKMGRPLVWDATCVDTMAPSHLPETHVRAGAAANSAEQLKRRKYSNLGSDYIFEPFGAETLGPWGPGAHRVFQSLSERLVDATRDQNAGTYLAQRISIAIQRGNAASMLGTLPTGSGLEHLDCL

SEQ ID NO: 19016 - protein, 973 aa, Ennomos quercinarius
MSTQNNVVSLENRIQCPDCPQVRLFKGQKGLKIHQSKCHRVIQIPLSAPVSGSLVASSSPTSAATPSKPFWEVLSSYKRFIPVLKRIPRGARISVAQSLSSSIRNVISKNTKHAWEHLLTFPYHVLYVKLDPTNKSSLTKRVKENCVRYKVLEEQCLDHEIIVPLNRRNNIINSKQNNDSATFKIVESKISDGDIKGAARVLFSSDTIAPYCSETIQSLQDKHPPAAANLHLPEPPLPNDVTVEVTPQEVAAAVTSFQSGSAGGLDGLTPQILKDLLSGISGEIGEALLRDLTALVNLMLSGQVNSDVIEILYGANLCALIKKDGGIRPIAVGTTYRRLAAKVGCRKKVAFLSNLFQPIQLGFGSRGGCEAAVHSLRTFLKLNCGEVLLKVDVKNAFNSVDRGALLTQVKDKIPELYKFLYQCYGNPTKLNYQNNAILSSVGCQQGDPLGPAIFSLAIHPIIQRLQSKLNVWYLDDGTLGGDVNTVFNDLGIIINEFRDIGLDLNFSKCELFVCDTCPDKDLVFEKFNSLAPNIKLVDKRSLRLLGSPILDESISPFVEEKIQKFNNASDRLLKINAHMAFTIIRFCLFVPKFTYILRCCQLWKHSELLMGLDSIVKNTLVSVLNVDMDDRTWSQASLPVRLGGLGIRKISSVALPAFLSSVHGTHKLIEKILAPSLGTFEVAHLSEAKNAWGLASPNSDFPVVLSSQRLWDRPLCELARKNLLDTCPSVADRARLLAVSVWESGLWLQAMPSFTTGNLLDPTTFRLAISLRLGARCCVAHRCQCGTAVDQLGHHGLSCSKSAGRISRHASLNDIIRRAFTTANAAAILEPNGLMRDDGKRPDGMTLVPWKMGRPLVWDATCVDTMAPSHLPETHVRAGAAANSAEQLKRRKYSNLGSGYIFEPFGVETLGPWGPGAHRVFQSLSERLVDATRDQNAGTYLAQRISIAIQRGNAASMLGTLPTGSGLVHLDCL

SEQ ID NO: 19017 - protein, 1002 aa, Cosmia trapezina
MLLYIFFFIFISFAFVFKVFLSLVFPLEMPQCAQANEVENSQGVSVENQVQCHECSQVRFFKGQKGLKIHQAKCHKSDNIPLSTSNSNQETNSSRTSPDITFWKTLSHCKISLPVLKRIPRGARISVATALSHAVKAVLLHNSKRTWEHLLFFPYAVLHVTSDPKNKKSLTVRVKENCVRYGVLEETFSLLDNISFTNRNPKFTLRPFSESATYKLVESKLGDGDIKGAARILFSSDTLAPATPETLSILKEKHPPPAENLHLPEAPEESDDAAVEVTAQEVSAAVASFQSGSAGGLDALTPQHLKDLLCGGTGETGETLLRDLTALINQMLSGRVNGDIVEILYGANLCALKKKDGGIRPIAVGTTYRRLAAKTCCKNAGLTLASIFQPVQLGFGSRGGCEVAVHSVRTFLNQNCGDVLLKVDVKNAFNSVDRGALLTQVKDKIPNLYRFLWQCYGSPTKLTYHGNEILSATGCQQGDPLGPAIFSLAIHPIIQRLHSKLNVWYLDDGTLGGDANTVYDDLRNLIDEFHSIGLDLNFSKCELYVSDTYAAKDLVIQNFNILAPNITVINKCSLRLLGSPILDESFPLFFEEKIQNFLQYSDRLFKINTHMAFTIVRFCLFVPKFTYIIRCCQLWKHIEILQNLDNIIKTTLASILNINLEERAWLQASLPVRLGGLGVRSISGVALPAFLSSIHSTQNLSKKVLAASLDSFEITYFNEARNAWLLACPNTEFPKILTSQRLWDGPLCEQVRKQLLHTCLNSADRARLLAVAQWESGLWLQALPSLNTGTLMDTSTFRLAASLRLGASCCAPHRCQCGTAVDRLGHHGLSCTSSAGRIPRHASLNDIIRRAFTTANCAAILEPRGLSRDDGKRPDGMTLIPWKMGRPLVWDATCVDTLAPSHLPGTQNRTGAAAESAENLKRRKYSSLDSGYMFEPFGVETLGPWGPGAHKIFKDLSARLVEATREQNAGLYFAQRLSIAIQRGNAASILGTLPTGSGFIDL

SEQ ID NO: 19018 - protein, 998 aa, Crocallis elinguaria
MLLLTFFLVFIVFLIITYVKKSKLCTPEMQHCVQANGSDHPIVSQNSLVQCPDCSQVRFFKGQRGLKIHQGKCHKNSNIPLTDPISNENSNTLSSLGQPFWHILSQCKINIPVLKRIPRGARLSVATVLSQAIRDVILQNSKHTWERLLFFPYAVLYVRKEPHNKTSLTTRVKENCVKYSSMEVPFFLSDNNLDLNQNSKCTLKPFTESSIFRRIENKLSDGDIKGAARMLFSSDTMAPSNPETLSILEGKHPPPAASLQLPDAPEDSDVSVEITAFDVSSAVTSFQSGSAGGLDALTPQHLKDLLCGGNGEAGEALLRDLTGLINLMLSGRVNGDIIEILYGANLCALKKKDGGIRPIAIGMTYRRLAAKICCKKIAPQLENLFQPIQLGFGSRGGCEAAVHSVRTFLNKNCGELLLKVDVKNAFNSVDRGALLTQVKDKIPNLYNYLWQCYGSSTKLTYNGKEISSAVGCQQGDPLGPAVFSLAIHPIIQRLQSKLNVWYLDDGTLGGDVNTVYDDLLFLTEEFRSIGLVLNFSKCELFISDNCPAKDFILQKFNNLAPNIKVIDKYSLRLLGSPILDESFPLFVEEKIQNFLLCSDRLSKISTHMAFTIIRFCLFVPKFTYTLRCCQLWKHTDLLQTLDNIVKTTLESILNINLKDREWLQASLPVRSGGLGIRSISGVALPAFLSSVHSTQKLTQKILAASITDPEITFSTEAKNTWLLACPNSEFPNTPSSQRLWDRPLCEQVRKQLFNTYLSSAERARLLAVAEWESGLWLQALPSQNTGTLLDSSAFRIAASLRLGASCCAPHRCQCGSAVDRLGHHGLSCQRSAGRISRHASLNDIIRRAFASANCAAILEPNGLVRDDGKRPDGMTLIPWKMGRPLVWDATCVDTLAPSHLPGTQNKAGAAAESAENLKRRKYSSLDSSYIFEPFGVETLGTWGPGAHRIFKDLSGRLVEATRDQNAGLYLGQRLSIAIQRGNAASILGTLPTGSGLLD

SEQ ID NO: 19019 - protein, 973 aa, Ennomos quercinarius
MSTQNNVVSLENRIQCPDCPQVRLFKGQKGLKIHQSKCHRVIQIPLSAPVSGSVVASSSPTSAATPSKPFWEVLSSYKRFIPVLKRIPRGARISVAQSLSSSIRNVISKNTKHAWEHLLTFPYHVLYVKLDPTNKSSLTKRVKENCVRYKVLEEQCLDHEIIVPLNRRSNIINSKQNNDSATFKIVESKISDGDIKGAARVLFSSDTIAPYCSETIQSLQDKHPPAAANLHLPEPPLPNDVTVEVTPQEVAAAVTSFQSGSAGGLDGLTPQILKDLLSGISGEIGEALLRDLTALVNLMLSGQVNSDVIEILYGANLCALIKKDGGIRPIAVGTTYRRLAAKVGCRKKVAFLSNLFQPIQLGFGSRGGCEAAVHSLRTFLKLNCGEVLLKVDVKNAFNSVDRGALLTQVKDKIPELYKFLYQCYGNPTKLNYQNNAILSSVGCQQGDPLGPAIFSLAIHPIIQRLQSKLNVWYLDDGTLGGDVNTVFNDLGIIINEFRDIGLDLNFSKCELFVCDTCPDKDLVFKKFNSLAPNIKLVDKRSLRLLGSPILDESISPFVEEKIQKFNNASDRLLKINAHMAFTIIRFCLFVPKFTYILRCCQLWKHSELLMGLDNIVKNTLVSVLNVDMDDRTWSKASLPVRLRGLGIRKISSVALPAFLSSVHGTHKLIEKILAPSLGTFEVAHLSEAKNAWGLACPNSDFPVVLSSQRLWDRPLCELARKNLLDTCPSVADRARLLAVSVWESGLWLQAMPSFNTGNLLDPTTFRLAISLRLGARCCVAHHCQCGTAVDQLGHHDLSCSKSAGRISRHASLNDIIRRAFTTANVAAILEPNGLMRDDGKRPDGMTLVPWKMGRPLVWDATCVDTMALSHLPETHVGAGAAANSAEQLKRRKYSNLGSGYIFEPFGVETLGPWGPGAHRVFQSLSERLVDATRDQNAGTYLAQRISIAIQRGNAASMLGTLPTGSGLEHLDCL

SEQ ID NO: 19020 - protein, 972 aa, Ennomos quercinarius
MSTQNNVVSLENRIQCPDCPQVRLFKGQKGLKIHQSKCHRVIQIPLSAPVPGSLVASSSPTSAATPSKLFWEVLSSYKRFIPVLKRIPRGARISVAQSLSSSIRNVISKNTKHAWEHLLTFPYHVLYVKLDPTNKSSLTKRVKENCVRYKVLEEQCLDHEIIVPLNRRNNIINSKQNNDSATFKIVESKISDGDIKGAARVLFSSDTIAYCSETIQSLQDKHPPAAANLHLPEPPLPNDVTVEVTPQEVAAAVTSFQSGSAGGLDGLTPQILKDLLSGISGEIGEALLRDLTALVNLMLSGQVNSDVIEILYGANLCALIKKDGGIRPIAVGTTYRRLAAKVGCRKKVAFLSNLFQPIQLGFGSRGGCEAAVHSLRTFLKLNCGEVLLKVDVKNAFNSVDRGALLTQVKDKIPELYKFLYQCYGNPTKLNYQNNAILSSVGCQQGDPLGPAIFSLAIHPIIQRLQSKLNVWYLDDGTLGGDVNTVFNDLGIIINEFRDIGLDLNFSKCELFVCDTCPDKDLVFEKFNSLAPNIKLVDKRFLRLLGSPILDESISPFVEEKIQKFNNASDRLLKINAHMAFTIIRFCLFVPKFTYILRCCQLWKHSELLMGLDSIVKNTLVSVLNVDMDDRTWSQASLPVRLGGLGIRKISSVALPAFLSSVHGTHKLLEKILAPSLGTFEVAHLSEAKNAWGLACPNSDFPVVLSSQRLWDRPLCELARKNLLDTCPSVADRARLLAVSVWESGLWLQAMPSFNTGNLLDPTTFRLAISLRLGARCCVAHRCQCGTAVDQLGHHGLSCSKSAGRISRHASLNDIIRRAFTTANVAAILEPNGLMRDDGKRPDGMTLVPWKMGRPLVWDATCVDTMAPSHLPETHVRAGAAANSAEQLKRRKYSNLGSGYIFEPFGVETLGPWGPGAHRVFQSLSERLVDATRDQNAGTYLAQRISIAIQRGNAASMLGTLPTGSGLEHLDCL

SEQ ID NO: 19021 - protein, 970 aa, Ennomos quercinarius
MSTQNNVVSLENRIQCPDCPQVRLFKGQKGLKIHQSKCHRVIQIPLSAPVSGSLVASSSPTSAATPSKPFWEVLSSYKRFIPVLKRIPRGARISVAQSLSSSIRNVISKNTKHAWEHLLTFPYHVLYVKLDPTNKSSLTKRVKENCVRYKVLEEQCLDHEIIVPLNRRNNIINSKQNNDSATFKIVESKISDGDIKGAARVLFSSDTIAPYCSETIQSLQDKHPPAAANLHLPEPPLPNDVTVEVTPQEVAAAVTSFQSGSAGGLDGLTPQILKDLLSGISGEIGEALLRDLTALVNLMLSGQVNSDVIEILYGANLCALIKKDGGIRPIAVGTTYRRLAAKVGCRKKVAFLSNLFQPIQLGFGSRGGCEAAVHSLRTFLKLNCGEVLLKVDVKNAFNSVDRGALLTQVKDKIPELYKFLYGNPTKLNYQNNAILSSVGCQQGDPLGPAIFSLAIHPIIQRLQSKLNVWYLDDGTLGGDVNTVFNDLGIIINEFRDIGLDLNFSKCELFVCDTCPDKDLVFEKFNSLAPNIKLVDKRSLRLLGSPILDESISPFVEEKIQKFNNASDRLLKINAHMAFTIIRFCLFVPKFTYILRCCQLRKHSELLMGLDSIVKNTLVSFLNVDMDDRTWSQASLPVRLGGLGIRKISSVALPAFLSSVHGTHKLIEKILAPSLGTFEVAHLSEAKNAWGLACPNSDFPVVLSSQRLWDRPLCELARKNLLDTCPSVADRARLLAVSVWESGLWLQAMPSFNTGNLLDPTTFRLAISLRLGARCCVAHRCQCGTAVDQLGHHGLSCSKSAGRISRHASLNDIIRRAFTTANVAAILEPNGLMRDDGKRPDGMTLVPWKMGRPLVWDATCVDTMAPSHLPETHVRAGAAANSAEQLKRRKYSNLGSGYIFEPFGVETLGPWGPGAHRVFQSLSERLVDATRDQNAGTYLAQRISIAIQRGNAASMLGTLPTGSGLEHLDCL

SEQ ID NO: 19022 - protein, 989 aa, Blastobasis adustella
MLFLCVICIFVCYIFRYNSFFTKVQRNTRMDVAENERIVSLENLVQCSECSQTRFFKGQRGLKIHQTKCHKRLIPLSAPTTSTSHNSSVKPFWQTLSHHKITTPVVKRIPRGARITVAAALSQAIKTVISQNSKQAWEHLLLFPYAVFYVVPEAGNNKSLTARIKENCVKYSTLLDPTYPNNASVAIKNSKFSVKHISESSTYRLVENKLSDGDVKGAARILFSCDTIAPTTPETLSALKLKHPSSAVGSKLPEAPQDFNDSIEASAQDVSAAVASFNSGSAGGLDALTPQHLKDLLCGTSGESGESLLRDLTSLTNLMLSGRVNGDIIEILYGANLCALKKKDGGIRPIAVGMTYRRIAAKICCKKTAPKLCDLFQPIQLGFGSRGGCEAAVYSLRTYLKQDCGQALLKLDVRNAFNSVDRGALLTQVKDKIPNLYNFLWQCYGYSSKLTYSGNEITSAVGCQQGDPLGPAIFSLAIHQIIQRLQSKLNIWYLDDGTLGGDVDTLCKDLVFLIDEFRAIGLDLNLSKCELYISNTCPAKDLAIQKFNDLAPNITIVDKYSLRLLGSPVLDESLPLFFEEKIQNFLQCSDRLTKINIHMAFTIIRFCLFVPKFTYTIRCCQLWKHPDIFQRIDNILKNTLAVNLNINLEERGWLQASLPVRLGGLGIRSISGVALPAFLSSIHDTASLINKILTNSTWDKKISYLDDARNAWLSACPNSDPPITPSSQRQWDGPLCEQVRNNLLHTCVSSADRARLLAVAEWESGLWLQVLPSANTGTLIDNSSFRIAASLRLGASCCAPHRCQCGVAVDRLGHHGLSCVKSAGRFSRHSSLNDIIRRAFASAKCAAVLEPGGLMRDDGKRPDGMTLVPWKLGRPLVWDATCVDTLAPSHLSRTQGRAGAAAESAEALKRLKYSNLDSGYLFEPFGVETLGPWGPGAHRIFKDVSARLVEASCDQNAGIYLAQRLSIAIQRGNAASILGTLPNGSGLLD

SEQ ID NO: 19023 - protein, 973 aa, Ennomos quercinarius
MSTQNNVVSLENRIQCPDCPQVRLFKGQKGLKIHQSKCHRVIQIPLSAPVSGSVVASSSPTSAATPSKPFWEVLSSYKRFIPVLKRIPRGARISVAQSLSSSIRNVISKNTKHAWEHLLTFPYNVLYVKLDPTNKSSLTKRVKENCVRYKVLEEQCLDHEIIVPLNRRNNIINSKQNNDSATFKIVESKISDGDIKGAARVLFSSDTIAPYCSETIQSLQDKHPPAAANLHLPEPPLPNDVTVEVTPQEVAAAVTSFQSGSAGGLDGLTPQILKDLLSGISGEIGEALLRDLTALVNLMLSGQVNSDVIEILYGANLCALIKKDGGIRPIAVGTTYRRLAAKVGCRKKVAFLSNLFQPIQLGFGSRGGCEAAVHSLRTFLKLNCGEVLLKVDVKNAFNSVDRGALLTQVKDKIPELYKFLYQCYGNPTKLNYQNNAILSSVGCQQGDPLGPAIFSLAIHPIIQRIQSKLNVWYLDDGTLGGDVNTVFNDLGIIINEFRDIGLDLNFSKCELFVCDTCPDKDLVFEKFNSLAPNIKLVDKCSLRLLGSPILDESISPFVEEKIQKFNNASDRLLKINAHMAFTIIRFCLFVPKFTYILRCCQLWKHSELLMGLDNIVKNTLVSVLNVDMDDRTWSQASLPVRLGGLGIRKISSVALPAFLSSVHGTHKLIEKILAPSLGTFEVAHLSEAKNAWGLACPNSDFPVVLSSQRLWDRPLCELARKNLLDTCPSVADRARLLAVSVWESGLWLQAMPSFNTGNLLDPTTFRLAISLRLGARCCVAHHCQCGTAVDQLGHHGLSCSKSAGRISRHASLNDIIRRAFTTANVAAILEPNGLMRDDGKRPDGMTLVPWKMGRPLVWDATCVDTMAPSHLPETHVRAGAAANSAEQLKRRKYSNLGSGYIFEPFGAETLGPWGPGVHRVFQSLSERLVDATRDQNAGTYLAQRISIAIQRGNAASMLGTLPTGSGLEHLDCL

SEQ ID NO: 19024 - protein, 973 aa, Ennomos quercinarius
MSTQNNVVSLENRIQCPDCPQVRLFKGQKGLKIHQSKCHRVIQIPLSAPVSGSLVASSSPTSAATPSKPFWEVLSSYKRFIPVLKRIPRGARISVAQSLSSSIRNVISKNTKHAWEHLLTFPYHVLYVKLDPTNKSSLTKRVKENCVRYKVLEEQCLDHEIIVPLNRRNNIINSKQNNDSATFKIVESKISDGDIKGAARVLFSSDTIAPYCSETIQSLQDKHPPAAANLHLPEPPLPNDVTVEVTPQEVAAAVTSFQSGSAGGLDGLTPQILKDLLSGISGEIGEALLRDLTALVNLMLSGQVNSDVIEILYGANLCALIKKDGGIRPIAVGTTYRRLAAKVGCRKKVAFLSNLFQPIQLGFGSRGGCEAAVHSLRTFLKLNCGEVLLKVDVKNAFNSVDRGALLTQVKDKIPELYKFLYQCYGNPTKLNYQNNAILSSVGCQQGDPLGPAIFSLAIHPIIQRLQSKLNVWYLDDGTLGGDVNTVFNDLGIIINEFRDIGLDLNFSKCELFVCDTCPDKDLVFEKFNSLAPNIKLVDKRSLRLLGSPILDESISPFVEEKIQKFNNASDRLLKINAHMAFTIIRFCLFVPKFTYILRCCQLWKHSELLMGLDNIVKNTLVSVLNVDMDDRTWSQASLPVRLGGLGIRKISSVALPAFLSSVHGTHKLIEKILAPSLGTFEVAHLSEAKNAWGLACPNSDFPVVLSSQRLWDRPLCELARKNLLDTCPSVADRARLLAVSVWESGLWLQAMPSFNTGNLLDPTTFRLAISLRLGARCGVAHHCQCGTAVDQLGHHGLSCSKSAGRISRHASLNDIIRRAFTTANVAAILEPNGLMRDDGKRPDGMTLVPWKMGRPLVWDATCVDTMAPSHLPKTHVRAGAAANSAEQLKRRKYSNLGSGYIFEPFGVETLGPWGPGAHRVFQSLSERLVDATRDQNAGTYLAQRISIAIQRGNAASMLGTLPTGSGLEHLDCL

SEQ ID NO: 19025 - protein, 973 aa, Ennomos quercinarius
MSTQNNVVSLENRIQCPDCPQVRLFKGQKGLKIHQSKCHRVIQIPLSAPVSGSLVASSSPTSAATPSKPFWEVLSSYKRFIPVLKRFPRGARISVAQSLSSSIRNVISKNTKHAWEHLLTLPYHVLYVKLDPTNKSSLTKRVKENCVRYKVLEEQCLDHEIIVPLNKRNNIINSKQNNDSATFKIVESKISDGDIKGAARVLFSSDTIAPYCSETIQSLQDKHPPAAANLHLPEPPLPNDVTVEVTPQEVAAAVTSFQSGSAGGLDGLTPQILKDLLSGISGEIGEALLRDLTALVNLMLSGQVNSDVIEILYGANLCALIKKDGGIRPIAVGTTYRRLAAKVGCRKKVAFLSNLFQPIQLGFGSRGGCEAAVHSLRTFLKLNCGEVLLKVDVKNAFNSVDRGALLTQVKDKIPELYKFLYQCYGNPTKLNYQNNAILSSVGCQQGDPLGPAIFSLAIHPIIQRLQSKLNVWYLDDGTLGGDVNTVFNDLGIIINEFRDIGLDLNFSKCELFVCDTCPDKDLVFEKFNSLAPNIKLVDKRSLRLLGSPILDESISPFVEEKIQKFNNASDRLLKINAHMAFTIIRFCLFVPKFTYILRCCRLWKHSELLMGLDSIVKNTLVSVLNVDMDDRTWSQASLPVRLGGLGIRKISSVALPAFLSSVHGTHKLIEKILAPSLGTFEVAHLSEAKNAWGLASPNSDFPVVLSSQRLWDRPLCELARKNLLDTCPSVADRARLLAVSVWESGLWLQAMPSFTTGNLLDPTTFRLAISLRLGARCCVAHRCQCGTAVDQLGHHGLSCSKSAGRISRHAILNDIIRRAFTTANAAAILEPNGLMRDDGKRPDGMTLVPWKMGRPLVWDATCVDTMAPSHLPETHVRAGAAANSAEQLKRRKYSNLGSGYIFEPFGVETLGLWGPGAHRVFQSLSERLVDATRDQNAGTYLAQRISIAIQRGNAASMLGTLPTGSGLEHLDCL

SEQ ID NO: 19026 - protein, 973 aa, Ennomos quercinarius
MSTQNNVVSLENRIQCPDCPQVRLFKGQKGLKIHQSKCHRVIQIPLSAPVSGSVVASSSPTSAATPSKPFWEVLSSYKRFIPVLKRIPRGARISVAQSLSSSIRNVISKNTKHAWEHLLTFPYHVLYVKLDPTNKSSLTKRVKENCVRHKVLEEQCLDHEIIVPLNRRNNIINSKQNYDSATFKIVESKISDGDIKGAARVLFSSDTIAPYCSETIQSLQDKHPPAAANLHLPEPPLPNDVTVEVTPQEVAAAVTSFQSGSAGGLDGLTPQILKDLLSGISGEIGEALLRDLTALVNLMLSGQVNSDVIEILYGANLCALIKKDGGIRPIAVGTTYRRLAAKVGCRKKVAFLSNLFQPIQLGFGSRGGCEAAVHSLRTFLKLNCGEVLLKVDVKNAFNSVDRGALLTQVKDKIPELYKFLYQCYGNPTKLNYQNNAILSSVGCQQGDPLGPAIFSLAIHPIIQRLQSKLNVWYLDDGTLGGDVNTVFNDLGIIINEFRDIGLDLNFSKCELFVCDTCPDKDLVFEKFNSLAPNIKLVDKRSLRLLGSPILDESISPFVEEKIQKFNNASDRLLKINAHMAFTIIRFCLFVPKFTYILRCCQLWKHSELLMGLDNIVKNTLVSVLNVDMDDRTWSQASLPVRLGGLGIRKISSVALPAFLSSVHGTHKLIEKILAPSLGTFEVAHLSEAKNAWGLACPNSDFPAVLSSQRLWDRPLCELARKNLLDTCPSVADRARLLAVSVWESGLWLQAMPSFNTGNLLDPTTFRLAISLRLGARCCVAHHCQCGTAVDQLGHHGLSCSKSAGRISRHASLNDIIRRAFTTANVAAILEPNGLMRDDGKRPDGMTLVPWKMGRPLVWDATCVDTMAPSHLPETHVRAGAAANSAEQLKRRKYSNLGSGYIFEPFGVETLGPWGPWAHRVFQSLSERLVDATRDQNAGTYLAQRISIAIQRGNAASMLGTLPTGSGLEHLDCL

SEQ ID NO: 19027 - protein, 973 aa, Ennomos quercinarius
MSTQNNVVSLENRIQCPDCPQVRLFKGQKGLKIHQSKCHRVIQIPLSAPVSGSLVASSSPTSAATPSKPFWEVLSSYKRFIPVLKRIPRGARISVAQSLSSSIRNVISKNTKHAWEHLLTFPYHVLYVKLDPTNKSSLTKRVKENCVRYKVLEEQCLDHEIIVPLNRRNNIINSKQNNDSATFKIVESKISDGDIKGAARVLFSSDTIAPYCSETIQSLQDKHPPAAANLHLPEPPLPNDVTVEVTPQEVAAAVTSFQSGSAGGLDGLTPQILKDLLSGISGEIGEALLRDLTALVNLMLSGQVNSDVIEILYGANLCALIKKDGGIRPIAVGTTYRRLAAKVGCRKKVAFLSNLFQPIQLGFGSRGGCEAAVHSLRTFLKLNCGEVLLKVDVKNAFNSVDRGALLTQVKDKIPELYKFLYQCYGNPTKLNYQNNAILSSVGCQQGDPLGPAIFSLAIHPIIQRLQSKLNVWYLDDGTLGGDVNTVFNDLGIIINEFRDIGLDLNFSKCELFVCDTCPDKDLVFEKFNSLAPNIKLVDKRSLRHLGSPILDESISPFVEEKIQKFNNASDRLLKINAHMAFTIIRFCLFVPKFTYILRCCQLWKHSELLMGLDSIVKNTLVSVLNVDMDDRTWSQASLPVRLGGLGIRKISSVALPAFLSSVHGTHKLIEKILAPSLGTFEVAHLSEAKNAWGLACPNSDFPVVLSSQRLWDRPLCELARKNLLDTCPSVADRARLLAVSVWESGLWLQAMPSFTTGNLLDPTTFRLAISLRLGARCCVAHRCQCGTAVDQLGHHGLSCSKSAGRISRHASLNDIIRRAFTTANAAAILEPNGLMRDDGKRPDGMTLVPWKMGRPLVWDATCVDTMAPSHLPETHVRAGAAANSAEQLKRRKYSNLGSGYIFEPFGVETLGPWGPGAHRVFQSLSERLVDATRDQNAGTYLAQRISIAIQRGNAASMLGTLPTGSGLEHLDCL

SEQ ID NO: 19028 - protein, 973 aa, Ennomos quercinarius
MSTQNNVVSLENRIQCPDCPQVRLFKGQKGLKIHQSKCHRVIQIPLSAPVSGSLVASSSPTSAATPSKPFWEVLSSYKRFIPVLKRIPRGARISVAQSLSSSIRNVISKNTKHAWEHLLTFPYHVLYVKLDPTNKSSLTKRVKENCVRYKVLEEQCLDHEIIVPLNRRNNIINSKQNNDSATFKIVESKISDGDIKGAARVLFSSDTIAPYCSETIQSLQDKHPPAAANLHLPEPPLPNDVTVEVTPQEVAAAVTSFQSGSAGGLDGLTPQILKDLLSGISGEIGEALLRDLTALVNLMLSGQVNSDVIEILYGANLCALIKKDGGIRPIAVGTTYRRLAAKVGCRKKVAFLSNLFQPIQLGFGSRGGCEAAVHSLRTFLKLNCGEVLLKVDVKNAFNSVDRGALLTQVKDKIPELYKFLYQCYGNPTKLNYQNNAILSSVGCQQGDPLGPAIFSLAIHPIIQRLQSKLNVWYLDDGTLGGDVNTVFNDLGIIIKEFRDIGLDLNFSKCELFVCDTCPDKDLVFEKFNSLAPNIKLVDKRSLRLLGSPILDESISPFVEEKIQKFNNASDRLLKINAHMAFTIIRFCLFVPKFTYILRCCQLWKHSELLMGLDSIVKNTLVSVLNVDMDDRTWSQASLPVRLGGLGIRKISSVALPAFLSSVHGTHKLIEKILAPSLGTFEVAHLSEAKNAWGLACPNSDFPVVLSSQRLWDRPLCELARKNLLDTCPSVADRARLLAVSVWESGLWLQAMPSFNTGNLLDPTTFRLAISLRLGARCCVAHRCQCGTAVDQLGHHGLSCSKSAGRISRHASLNDIIRRAFTTANAAAILEPNGLMRDDGKRPDGMTLVPWKMGWPLVWDATCVDTMAPSHLPETHVRAGAAANSAEQLKRRKYSNLGSGYIFEPFGVETLGPWGPGAHRVFQSLSERLVDATRDQNAGTYLAQRISIAIQRGNAASMLGTLPTGSGLEHLDCL

SEQ ID NO: 19029 - protein, 973 aa, Ennomos quercinarius
MSTQNNVVSLENRIQCPDCPQVRLFKGQKGLKIHQSKCHRVIQIPLSAPVSGSLVASSSPTSAATPSKPFWEVLSSYKRFIPVLKRIPRGARISVAQSLSSSIRNVISKNTKHAWEHLLTFPYHVLYVKLDPTNKSSLTKRVKENCVRYKVLEEQCLDHEIIVPLNRRNNIINSKQNNDSATFKIVESKISDGDIKGAARVLFSSDTIAPYCSETIQSLQDKHPPAAANLHLPEPPLPNDVTVEVTPQEVAAAVTSFQSGSAGGLDGLTPQILKDLLSGISGEIGEALLRDLTALVNLMLSGQVNSDVIEILYGANLCALIKKDGGIRPIAVGTTYRRLAAKVGCRKKVAFLSNLFQPIQLGFGSRGGCEAAVHSLRTFLKLNCGEVLLKVDVKNAFNSVDRGALLTQVKDKIPELYKFLYQCYGNPTKLNYQNNAILSSVGCQQGDPLGPAIFSLAIHPIIQRLQSKLNVWYLDDGTLGGDVNTVFNDLGIIINEFRDIGLDLNFSKCELFVCDTCPDKDLVFEKFNSLAPNIKLVDKRSLRLLGSPILDESISPFVEEKIQKFNNASDRLLKINAHMTFTIIRFCLFVPKFTYILRCCQLWKHSELLMGLDSIVKNTLVSVLNVDMDDRTWSQASLPVRLGGLGIRKISSVALPAFLSSVHGTHKLIEKILAPSLGTFEVAHLSEAKNAWGLACPNSDFPVVLSSQRLWDRPLCELARKNLLDTCPSVADRARLLAVSVWESGLWLQAMPSFNTGNLLDPTTFRLAISLRLGARCCVAHRCQCGTAVDQLGHHGLSCSKSAGRISRHASLNDIIRRAFTTANVAAILEPNGLMRDDGKRPDGMTLVPWKMGRPLVWDATCVDTMAPSHLPETHVRAGAAANSAEQLKRRKYSNLGSGYIFEPFGVETLGPWGPGAHRVFQSLSERLVDATRDQNAGTYLAQRISIAIQRGNAASMLGTLPTGSGLEHLDCL

SEQ ID NO: 19030 - protein, 672 aa, Cosmia trapezina
MLSGRVNGDIVEILYGANLCALKKKDGGIRPIAVGTTYRRLAAKTCCKNAGLTLASIFQPVQLGFGSRGGCEVAVHSVRTFLNQNCGDVLLKVDVKNAFNSVDRGALLTQVKDKIPNLYRFLWQCYGSPTKLTYHGNEILSATGCQQGDPLGPAIFSLAIHPIIQRLHSKLNVWYLDDGTLGGDANTVYDDLRNLIDEFHSIGLDLNFSKCELYVSDTYAAKDMVIQNFNNLAPNITVINKCSLRLLGSPILDESFPLFFEEKIQNFLQYSDRLFKINTHMAFTIVRFCLFVPKFTYIIRCCQLWKHIEILQNLDNIIKTTLASILNINLEERAWLQASLPVRLGGLGVRSISGVALPAFLSSIHSTQNLSKKVLAASLDSFEITYFNEARNAWLLACPNTEFPKILTSQRLWDGPLCEQVRKQLLHTCLNSADRARLLAVAQWESGLWLQALPSPNTGTLMDTSTFRLAASLRLGASCCAPHRCQCGTAVDRLGHHGLSCTTSAGRIPRHASLNDIIRRAFTTANCAAILEPRGLSRDDGKRPDGMTLIPWKMGRPLVWDATCVDTLAPSHLPGTQNRTGAAAESAENLKRRKYSSLDSGYMFEPFGVETLGPWGPGAHKIFKDLSARLVEATRDQNAGLYFAQRLSIAIQRGNAASILGTLPTGSGFIDL

SEQ ID NO: 19031 - protein, 997 aa, Crocallis elinguaria
MLLLTFFLVSIVFLIITYVKKSKLCTPEMQHCVQANANHPIVSQNSLVQCHDCSQVRFFKGQRGLKIHQGKCHKNSNIPLSDPISNENSNTLSSLGQPFWHILSQCKISIPVLKRIPRGARLSVATVLSQAIRDVILQNSKHTWERLLYFPFAVLHVRKEPDNKTSLTTRVKENCVKYSSMEVPFFLSDNNLDLNQNSKCTLKPFTESSIFRRIENKLSDGDIKGAARMLFSSDTMAPSNPETLSILEGKHPPPAASLQLPDAPEDSDVSVEITAFDVSSAVTSFQSGSAGGLDALTPQHLKDLLCGGNGEAGEALLRDLTALINLMLSGRVNGDIIEILYGANLCALKKKDGGIRPIAIGMTYRRLAAKICCKKIAPQLENLFQPIQLGFGSRGGCEAAVHSVRTFLNKNCGELLLKVDVKNAFNSVDRGALLTQVKDKIPNLYNYLWQCYGSSTKLTYNGKEISSAVGCQQGDPLGPAVFSLAIHPIIQRLQSKLNVWYLDDGTLGGDVNTVYDDLLFLTEEFRSIGLVLNFSKCELFISDNCAAKDFILQKFNNLAPNIKVIDKYSLRLLGSPILDESFPLFVEEKIQNFLLCSDRLSKISTHMAFTIIRFCLFVPKFTYTLRCCQLWKHTDLLQSLDNIVKTTLESILNINLKDREWLQASLPVRSGGLGIRSISGVALPAFLSSVHSTQKLTQKILAASITDPEITFSTEAKNTWLLACPNSEFPNTPSSQRLWDRPLCEQVRKQLFNTYLSSAERARLLAVAEWESGLWLQALPSQNTGTLLDSSAFRIAASLRLGASCCAPHRCQCGSAVDRLGHHGLSCQRSAGRISRHASLNDIIRRAFASANCAAILEPNGLVRDDGKRPDGMTLIPWKMGRPLVWDATCVDTLAPSHLPGTQNKAGAAAESAENLKRRKYSSLDSSYIFEPFGVETLGPWGPGAHRIFKELSGRLVEATRDQNAGLYFGQRLSIAIQRGNAASILGTLPTGSGLLD

SEQ ID NO: 19032 - protein, 973 aa, Ennomos quercinarius
MSTQNNVVSLENRIQCPDCPQVRLFKGQKGLKIHQSKCHRVIQIPLSAPVSGSLVASSSPTSAATPSKPFWEVLSSYKRFIPVLKRIPRGARISVAQSLSSSIRNVISKNTKHAWEHLLTFPYHVLYVKLDPTNKSSLTKRVKENCVRYKVLEEQCLDHEIIVPLNRRNNIINSKQNNDSATFKIVESKISDGDIKGAARVLFSSDTIAPYCSETIQSLQDKHPPAAANLHLPEPPLPNDVTVEVTPQEVAAAVTSFQSGSAGGLDGLTPQILKDLLSGISGEIGEALLRDLTALVNLMLSGQVNSDVIEILYGANLCALIKKDGGIRPIAVGTTYRRLAAKVGCRKKVAFLSNLFQPIQLGFGSRGGCEAAVHSLRTFLKLNCGEVLLKVDVKNAFNSVDRGALLTQVKDKIPELYKFLYQCYGNPTKLNYQNNAILSSVGCQQGDPLGPAIFSLAIHPIIQRLQSKLNVWYLDDGTLGGDVNTVFNDLGIIINEFRDIGLDLNFSKCELFVCDTCPDKDLVFEKFNSLAPNIKLVDKRSLRLLGSPILDESISPFVGEKIQKFNNASDRLLKINAHMAFTIIRFCLFVPKFTYILRCCQLWKHSELLMGLDSIVKNTLVSVLNVDMDDRTWSQASLPVRLGGLGIRKISSVTLPAFLSSVHGTHKLIEKILAPSLGTFEVAHLSEAKNAWGLACPNSDFPVVLSSQRLWDRPLCELARKNLLDTCPSVADRARLLAVSVWESGLWLQAMPSFNTGNLLDPTTFRLAISLRLGARCCVAHRCQCGTAVDQLGHHGLSCSKSAGRISRHASLNDIIRRAFTTANAAAILEPNGLMRDDGKRPDGMTLVPWKMGRPLVWDATCVDTMAPSHLPETHVRAGAAANSAEQLKRRKYSNLGSGYIFEPFGVETLGPWGPGAHRVFQSLSERLVDATRDQNAGTYLAQRISIAIQRGNAASMLGTLPTGSGLEHLDCL

SEQ ID NO: 19033 - protein, 973 aa, Ennomos quercinarius
MSTQNNVVSLENRIQCPDCPQVRLFKGQKGLKIHQSKCHRVIQIPLSAPVSGSLVASSSPTSAATPSKPFWEVLSSYKRFIPVLKRIPRGARISVAQSLSSSIRNVISKNTKHAWEHLLTFPYHVLYVKLDLTNKSSLTKRVKENCVRYKVLEEQCLDHEIIVPLNRRNNIINSKQNNDSATFKIVESKISDGDIKGAARVLFSSDTIAPYCSETIQSLQDKHPPAAANLHLPEPPLPNDVTVEVTPQEVAAAVTSFQSGSAGGLDGLTPQILKDLLSGISGEIGEALLRDLTALVNLMLSGQVNSDVIEILYGANLCALIKKDGGIRPIAVGTTYRRLAAKVGCRKKVAFLSNLFQPIQLGFGSRGGCEAAVHSLRTFLKLNCGEVLLKVDVKNAFNSVDRGALLTQVKDKIPELYKFLYQCYGNPTKLNYQNNAILSSVGCQQGDPLGPAIFSLAIHPIIQRLQSKLNVWYLDDGTLGGDVNTVFNDLGIIINEFRDIGLDLNFSKCELFVCDTCPDKDLVFEKFNSLAPNIKLVDKRSLRLLGSPILDESISPFVEEKIQKFNNASDRLLKINAHMAFTIIRFCLFVPKFTYILRCCQLWKHSELLMGLDSIVKNTLVSVLNVDMDDRTWSQASLPVRLGGLGIRKISSVALPAFLSSVHGTHKLIEKILAPSLGTFEVAHLSEAKNAWGLVSPNSDFPVVLSSQRLWDRPLCELARKNLLDTCPSVADRARLLAVPVWESGLWLQAMPSFTTGNHLDPTTFRLAISLRLGARCCVAHRCQCGTAVDQLGHHGLSCSKSAGRISRHASLNDIIRRAFTTANAAAILEPNGLMRDDGKRPDGMTLVPWKMGRPLVWDATCVDTMAPSHLPETHVRAGAAANSAEQLKRRKYSNLGSGYIFEPFGVETLGPWGPGAHRVFQSLSERLVDATRDQNAGTYLAQRISIAIQRGNAASMLGTLPTGSGLEHLDCL

SEQ ID NO: 19034 - protein, 973 aa, Ennomos quercinarius
MSTQNNVVSLENRIQCPDCPQVRLFKGQKGLKIHQSKCHRVIQIPLSAPVSGSLVASSSPTSAATPSKPFWEVLSSYKRFIPVLKRIPRGARISVAQSLSSSIRNVISKNTKHAWEHLLTFPYHVLYVKLDPTNKSSLTKRVKENCVRYKVLEEQCLDHEIIVPLNRRNNIINSKQNNDSATFKIVESKISDGDIKGAARVLFSSDTIAPYCSETIQSLQDKHPPAAANLHLPEPPLPNDVTVEVTPQEVAAAVTSFQSGSAGGLDGLTPQILKDLLSGISGEIGEALLRDLTALVNLMLSGQVNSDVIEILYGANLCALIKKDGGIRPIAVGTTYRRLAAKVGCRKKVAFLSNLFQPIQLGFGSRGGCEAAVHSLRTFLKLNCGEVLLKVDVKNAFNSVDRGALLTQVKDKIPELYKFLYQCYGNPTKLNYQNNAILSSVGCQQGDPLGPAIFSLAIHPIIQRLQSKLNVWYLDDGTLGGDVNTVFNDLGIIINEFRDIGLDLNFSKCELFVCDTCPDKDLVFEKFNSLAPNIKLVDKRSLRLLGSPILDESISPFVEEKIQKFNNASDRLLKINAHMAFTIIRFCLFVPKFTYILRCCQLWKHSELLMGLDSIVKNTLVSVLNVDMDDRTWSQASLPVRLGGLGIRKISSVALPAFLSSVHGTHKLIEKILAPSLGTFEVAHLSEAKNAWGLACPNSDFPVVLSSQRLWDRPLCELARKNLLDTCPSVADRARLLAVSVWESGLWLQAMPSFNTGNLLDPTTFRLAISLRLGARCCVAHRCQCGTAVDQLGHHGLSCSKSAGRISRHASLNDIIRRAFTTANVAAILEPNGLMRDDGKRPDGMTLVPWKVGRPLVWDATCVDTMAPSHLPETHVRAGAAANSAEQLKRRKYSNLGSGYIFEPFGVETLGPWGPGAHRVFQSLSERLVDATRDQNAGTYLAQRISIAIQRGNAASMLGTLPTGSGLEHLDCL

SEQ ID NO: 19035 - protein, 681 aa, Ennomos quercinarius
MALVNLMLSGQVNSDVIEILYGANLCALIKKDGGIRPIAVGTTYRRLAAKVGCRKKVAFLSNLFQPIQLGFGSRGGCEAAVHSLRTFLKLNCGEVLLKVDVKNAFNSVDRGALLTQVKDKIPELYKFLYQCYGNPTKLNYQNNAILSSVGCQQGDPLGPAIFSLAIHPIIQRLQSKLNVWYLDDGTLGGDVNTVFNDLGIIINEFRDIGLDLNFSKCELFVCDTCPDKDLVFEKFNSLAPNIKLVDKRSLRLLGSPILDESISPFVEEKIQKFNNASDRLLKINAHMAFTIIRFCLFVPKFTYILRCCQLWKHSELLMGLDSIVKNTLVSVLNVDMDDRTWSQASLPVRLGGLGIRKISSVALPAFLSSVHGTHKLIEKILAPSLGTFEVAHLSEAKNAWGLACPNSDFPVVLSSQRLWDRPLCELARKNLLDTCPSVADRARLLAVSVWESGLWLQAMPSFNTGNLLDPTTFRLAISLRLGARCCVAHRCQCGTAVDQLGHHGLSCSKSAGRISRHASLNDIIRRAFTTANVAAILEPNGLMRDDGKRPDGMTLVPWKMGRPLVWDATCVDTMAPSHLPETHVRAGAAANSAEQLKRRKYSNLGSGYIFEPFGVETLGPWGPGAHRVFQSLSERLVDATRDQNAGTYLAQRISIAIQRGNAASMLGTLPTGSGLEHLDCL

SEQ ID NO: 19036 - protein, 997 aa, Crocallis elinguaria
MLLLTFFLISIVFLIITYVKKSKLCTPEMQHCVQANASDPIISQNSLVQCPDCSQVRFFKGHRGLKIHQGKCHKNSNIPLSDPISNENSNTLSSLGQPFWHILSQCKINIPVLKRIPRGARLSVATVLSQAIRDVILQNSKHTWERLLYFPYAVLYVRKEPHNKTSLTTRVKENCVKYSSMEVPFFLSDNNLDLNQNSKCTLKPFTESSIFRRIENKLSDGDIKGAARMLFSSDTMAPSNPETLSILEGKHPPPAASLQLPDAPEDSDVSVEITAFDVSSAVTSFQSGSAGGLDALTPQHLKDLLCGGNGEAGEALLRDLTALINLMLSGRVNGDIIEILYGANLCALKKKDGGIRPIAIGMTYRRLAAKICCKKIAPQLENLFQPIQLGFGSRGGCEAAVHSVRTFLNKNCGELLLKVDVKNAFNSVDRGALLTQVKDKIPNLYNYLWQCYGSSTKLTYNGKEISSAVGCQQGDPLGPAVFSLAIHPIIQRLQSKLNVWYLDDGTLGGDVNTVYDDLLFLTEEFRSIGLVLNFSKCELFISDNCPAKDFILQKFNNLAPNIKVIDKYSLRLLGSPILDESFPLFVEEKIQNFLLCSDRLSKISTHMAFTIIRFCLFVPKFTYTLRCCQLWKHTDLLQTLDNIVKTTLESILNINLKDREWLQASLPVRSGGLGIRSISGVALPAFLSSVHSTQKLTQKILAASITDPEITFSTEAKNTWLLACPNSEFPNTPSSQKLWDRPLCEQVRKQLFNTYLSSAERARLLAVAEWESGLWLQALPSQNTGTLLDSSAFRIAASLRLGASCCAPHRCQCGSAVDRLGHHGLSCQRSAGRISRHASLNDIIRRAFASANCAAILEPNGLVRDDGKRPDGMTLIPWKMGRPLVWDATCVDTLAPSHLPGTQNKAGAAAESAENLKRRKYSSLDSSYIFEPFGVETLGPWGPGAHRIFKDLSGRLVEATRDQNAGLYLGQRLSIAIQRGNAASILGTLPTGSGLLD

SEQ ID NO: 19037 - protein, 973 aa, Ennomos quercinarius
MSTQNNVVSLENRIQCPDCPQVRLFKGQKGLKIHQSKCHRVIQIPLSAPVSGSVVASSSPTSAATPSKPFWEVLSSYKRFIPVLKRIPRGARISVAQSLSSSIRNVISKNTKHAWEHLLTFPYHVLYVKLDPTNKSSLTKRVKENCVRYKVLEEQCLDHEIIVPLNRRNNIINSKQNNDSATFKIVESKISDGDIKGAARVLFSSDTIAPYCSETIQSLQDKHPPAAANLHLPEPPLPNDVTVEVTPQEVAAAVTSFQSGSAGGLDGLTPQILKDLLSGISGEIGEALLRDLTALVNLMLSGQVNSDVIEILYGANLCALIKKDGGIRPIAVGTTYRRLAAKVGCRKKVAFLSNLFQPIQLGFGSRGGCEAAVHSLRTFLKLNCGEVLLKVDVKNAFNSVDRGALLTQVKDKIPELYKFLYQCYGNPTKLNYQNNAILSSVGCQQGDPLGPAIFSLAIHPIIQRLQSKLNVWYLDDGTLGGDVNTVFNDLGIIINEFRDIGLDLNFSKCELFVCDTCPDKDLVFEKFNSLAPNIKLVDKRSLRLLGSPILDESISPFVEEKIQKFNNASDRLLKINAHMAFTIIRFCLFVPKFTYILRCCQLWKHSEFLMGLDNIVKNTLVSVLNVDMDDRTWSQASLPVRLGGLGIRKISSVALPAFLSSVHGTHKLIEKILAPSLGTFEVAHLSEPKNAWGLACPNSDFPVVLSSQRLWDRPLCELARKNLLDTCPSVADRARLLAVSVWESGLWLQAMPSFNTGNLLDPTTFRLAISLRLGARCCVAHHCQCGTAVDQLGHHGLSCSKSAGRISRHASLNDIIRRAFTTANVAAILEPNGLMRDDGKRPDGMTLVPWKMGRPLVWDATCVDTMAPSHLPETHVRAGAAANSAEQLKRRKYSNLGSGYIFEPFGVETLGPWGPGAHRVFQSLSERLVDATRDQNAGTYLAQRISIAIQRGNAASMLGTLPTGSGLEHLDCL

SEQ ID NO: 19038 - protein, 675 aa, Ennomos quercinarius
MLSGQVNSDVIEILYGANLCALIKKDGGIRPIAVGTTYRRLAAKVGCRKKVAFLSNLFQPIQLGFGSRGGCEAAVHSLRTFLKLNCGEVLLKVDVKNAFNSVDRGALLTQVKDKIPELYKFLYQCYGNPTKLNYQNNAILSSVGCQQGDPLGPAIFSLAIHPIIQRLQSKLNVWYLDDGTLGGDVNTVFNDLGIIINEFRDIGLDLNFSKCELFVCDTCPDKDLVFEKFNSLAPNIKLVDKRSLRLLGSPILDESISPFVEEKIQKFNNASDRLLKINAHMAFTIIRFCLFVPKFTYILRCCQLWKHSELLMGLDSIVKNTLVSVLNVDMDDRTWSQASLPVRLGGLGIRKISSVALPAFLSSVHGTHKLIEKILAPSLGTFEVAHLSEAKNAWGLASPNFDFPVVLSSQRLWDRPLCELARKNLLDTCPSVADRARLLAVSVWESGLWLQAMPSFTTGNLLDPTTFRLAISLRLGARCCVAHRCQCGTAVDQLGHHGLSCSKSAGRISRHASLNDIIRRAFTTANAAAILEPNGLMRDDGKRPDGMTLVPWKMGRPLVWDATCVDTMAPSHLPETHVRAGAAANSAEQLKRRKYSNLGSGYIFEPFGVETLGPWGPGAHRVFQSLSERLVDATRDQNAGTYLAQRISIAIQRGNAASMLGTLPTGSGLVHLDCL

SEQ ID NO: 19039 - protein, 998 aa, Crocallis elinguaria
MLLLTFFLVFIVFLIITYVKKSKLCTPEMQHCVQANGSDHPIVSQNSLVQCPDCSQVRFFKGQRGLKIHQGKCHKNSNIPLSDPISNENSNTLSSLGQPFWHILSQCKINIPVLKRIPRGARLFVATVLSQAIRDVILQNSKHTWERLLYFPYAVLYVRKEPHNKTSLTTRVKENCVKYSSMEVPFFLSDNNLDLNQNSKCTLKPFTESSIFRRIENKLSDGDIKGAARMLFSSDTMAPSNPETLSILEGKHPPPAASLQLPDAPEDSDVSVEITAFDVSSAVTSFQSGSAGGLDALTPQHLKDLLCGGNGEAGEALLRDLTALINLMLSGRVNGDIIEILYGANLCALKKKDGGIRPIAIGMTYRRLAAKICCKKIAPQLENLFQPIQLGFGSRGGCEAAVHSVRTFLNKNCGELLLKVDVKNAFNSVDRGALLTQVKDKIPNLYNYLWQCYGSSTKLTYNGKEISSAVGCQQGDPLGPAVFSLAIHPIIQRLQSKLNVWYLDDGTLGGDVNTVYDDLLFLTEELRSIGLVLNFSKCELFISDNCPAKDFILQKFNNLAPNIKVIDKYSLRLLGSPILDESFPLFVEEKIQNFLLCSDRLSKISTHMAFTIIRFCLFVPKFTYTLRCCQLWKHTDLLQTLDNIVKTTLESILNINLKDREWLQASLPVRSGGLGIRSISGVALPAFLSSVHSTQKLTQKILAASITDPEITFSTEAKNTWLLACPNSEFPNTPSSQRLWDRPLCEQVRKQLFNTYLSSAERARLLAVAEWESGLWLQALPSQNTGTLLDSSAFRIAASLRLGASCCAPHRCQCGSAVDRLGHHGLSCQRSAGRISRHASLNDIIRRAFASANCAAILEPNGLVRDDGKRPDGMTLIPWKMGRPLVWDATCVDTLAPSHLPGTQNKAGAAAESAENLKRRKYSSLDSSYIFEPFGVETLGPWGPGAHRIFKELSGRLVEATRDQNAGLYLGQRLSIAIQRGNAASILGTLPTGSGLLD

SEQ ID NO: 19040 - protein, 973 aa, Ennomos quercinarius
MSTQNNVVSLENRIQCPDCPQVRLFKGQKGLKIHQSKCHRVIQIPLSAPVSGSVVASSSPTSTATPSKPFWEVLSSYKRFIPVLKRIPRGARISVAQSLSSSIRNVISKNTKHAWEHLLTFPYHVLYVKLDPTNKSSLTKRVKENCVRYKVLEEQCLDHEIIVPLNRRNNIINSKQNNDSATFKIVESKISDGDIKGAARVLFSSDTIAPYCSETIQSLQDKHPPAAANLHLPEPPLPNDVTVEVTPQEVAAAVTSFQSGSAGGLDGLTPQILKDLLSGISGEIGEALLRDLTALVNLMLSGQVNSDVIEILYGANLCALIKKDGGIRPIAVGTTYHRLAVKVGCRKKVAFLSNLFQPIQLGFGSRGGCEAAVHSLRTFLKLNCGEVLLKVDVKNAFNSVDRGALLTQVKDKIPELYKFLYQCYGNPTKLNYQNNAILSSVGCQQGDPLGPAIFSLAIHPIIQRLQSKLNVWYLDDGTLGGDVNTVFNDLGIIINEFRDIGLDLNFSKCEFFVCDTCPDKDLVFEKFNSLAPNIKLVDKRSLRLLGSPILDESISPFVEEKIQKFNNASDRLLKINAHMAFTIIRFCLFVPKFTYILRCCQLWKHSELLMGLDNIVKNTLVSVVNVDMDDRTWSQASLPVRLGGLGIRKISSVALPAFLSSVHGTHKLIEKILAPSLGTFEVAHLSEAKNAWGLACPNSDFPVVLSSQRLWDRPLCELARKNLLDTCPSVADRARLLAVSVWESGLWLQAMSSFNTGNLLDTTTFRLAISLRLGARCCVAHHCQCGTAVDQLGHHGLSCSKSAGRISRHASLNDIIRRAFTTANVAAILEPNGLMRDDGKRPDGMTLVPWKMGRPLVWDATCVDTMAPSHLPETHVRAGAAANSAEQLKRRKYSNLGSGYIFEPFGVETLGPWGPGAHRVFQSLSERLVDATRDQNAGTYLAQRISIAIQRGNAASMLGTLPTGIGREHLDCL

SEQ ID NO: 19041 - protein, 973 aa, Ennomos quercinarius
MSTQNNVVSLENRIQCPDCPQVRLFKGQKGLKIHQSKCHRVIQIPLSAPVSGSLVASSSPTSAATPSKPFWEVLSSYKRFIPVLKRIPRGARISVAQSLSSSIRNVISKNTKHAWEHLLTFPYHVLYVKLDPTNKSSLTKRVKENCVRYKVLEEQCLDHEIIVPLNRRNNIINSKQNNDSATFKIVESKISDGDIKGAARVLFSSDTIAPYCSETIQSLQDKHPPAAANLHLPEPPLPNDVTVEVTPQEVAAAVTSFQSGSAGGLDGLTPQILKDLLSGISGEIGEALLRDLTALVNLMLSGQVNSDVIEILYGANLCALIKKDGGIRPIAVGTTYRRLAAKVGCRKKVAFLSNLFQPIQLGFGSRGGCEAAVHSLRTFLKLNCGEVLLKVDVKNAFNSVDRGALLTQVKDKIPELYKFLYQCYGNPTKLNYQNNAILSSVGCQQGDPLGPAIFSLAIHPIIQRLQSKLNVWYLDDGTLGGDVNTVFNDLGIIINEFCDIGLDLNFSKCELFVCDTCPDKDLVFEKFNSLAPNIKLVDKSSLRLLGSPILDESISPFVEEKIQKFNNASDRLLKINAHMAFTIIRFCLFVPKFTYILRCCQLWKHSELLMGLDSIVKNTLVSVLNVDMDDRTWSQASLPVRLGGLGIRKISSVALPAFLSSVHGTHKLIEKILAPSLGTFEVAHLSEAKNAWGLACPNSDFPVVLSSQRLWDRPLCELARKNLLDTCPSVADRARLLAVSVWESGLWLQAMPSFNTGNLLDPTTFRLAISLRLGARCCVAHRCQCGTAVDQLGHHGLSCSKSAGRISRHASLNDIIRRAFTTANAAAILEPNGLMRDDGKRPDGMTLVPWKMGRPLVWDATCVDTMAPSHLPETHVRAGAAANSAEQLKRRKYSNLGSGYIFEPFGVETLGPWGPGAHRVFQSLSERLVDATRDQNAGTYLAQRISIAIQRGNAASMLGTLPTGSGLEHLDCL

SEQ ID NO: 19042 - protein, 973 aa, Ennomos quercinarius
MSTQNNVVSLENRIQCPDCPQVRLFKGQKGLKIHQSKCHRVIQIPLSAPVSGSLVASSSPTSAATPSKPFWEVLSSYKRFIPVLKRIPRGARISVAQSLSSSIRNVISKNTKHAWEHLLTFPYHVLYVKLDPTNKSSLTKRVKENCVRYKVLEEQCLDHEIIVPLNRRNNIINSKQNNDSATFKIVESKISDGDIKGAARVLFSSDTIAPYCSETIQSLQDKHPPAAANLHLPEPPLPNDVTVEVTPQEVAAAVTSFQSGSAGGLDGLTPQILKDLLSGISGEIGEALLRDLTALVNLMLSGQVNSDVIEILYGANLCALIKKDGGIRPIAVGTTYRRLAAKVGCRKKVAFLSNLFQPIQLGFGSRGGCEAAVHSLRTFLKLNCGEVLLKVDVKNAFNSVDRGALLTQVKDKIPELYKFLYQCYGNPTKLNYQNNAILSSVGCQQGDPLGPAIFSLAVHPIIQRLQSKLNVWYLDDGTLGGDVNTVFNDLGIIINEFRDIGLDLNFSKCELFVCDTCPDKDLVFEKFNSLAPNIKLVDKRSLRLLGSPILDESISPFVEEKIQKFNNASDRLLKINAHMAFTIIRFCLFVPKFTYILRCCQLWKHSELLMGLDSIVKNTLVSVLNVDMDDRTWSQASLPVRLGGLGIRKISSVALPAFLSSVHGTHKLIEKILAPSLGTFEVAHLSEAKNAWGLACPNSDFPVVLSSQRLWDRPLCELARKNLLDTCPSVADRARLLAVSVWESGLWLQAMPSFNTGNLLDPTTFRLAISLRLGARCCVAHRCQCGTAVDQLGHHGLSCSKSAGRISRHASLNDIIRRAFTTANVAAILEPNGLMRDDGKRPDGMTLVPWKMGRPLVWDATCVDTMAPSHLPETHVRAGAAANSAEQLKRRKYSNLGSGYIFEPFGVETLGPWGPGAHRVFQSLSERLVDATRDQNAGTYLAQRISIAIQRGNAASMLGTLPTGSGLEHLDCL

SEQ ID NO: 19043 - protein, 973 aa, Ennomos quercinarius
MSTQNNVVSLENRIQYPDCPQVRLFKGQKGLKIHQSKCHRVIQIPLSAPVSGSLVASSSPTSAATPSKPFWEVLSSYKRFIPVLKRIPRGARISVAQSLSSSIRNVISKNTKHAWEHLLTFPYHVLYVKLDPTNKSSLTKRVKENCVRYKVLEEQCLDHEIIVPLNRRNNIINSKQNNDSATFKIVESKISDGDIKGAARVLFSSDTIAPYCSETIQSLQDKHPPAAANLHLPEPPLPNDVTVEVTPQEVAAAVTSFQSGSAGGLDGLTPQILKDLLSGISGEIGEALLRDLTALVNLMLSGQVNSDVIEILYGANLCALIKKDGGIRPIAVGTTYRRLAAKVGCRKKVAFLSNLFQPIQLGFGSRGGCEAAVHSLRTFLKLNCGEVLLKVDVKNAFNSVDRGALLTQVKDKIPELYKFLYQCYGNPTKLNYQNNAILSSVGCQQGDPLGPAIFSLAIHPIIQRLQSKLNVWYLDDGTLGGDVNTVFNDLGIIINEFRDIGLDLNFSKCELFVCDTCPDKDLVFEKFNSLAPNIKLVDKSSLRLLGSPILDESISPFVEEKIQKFNNASDRLLKINAHMAFTIIRFCLFVPKFTYILRCCQLWKHSELLMGLDSIVKNTLVSVLNVDMDDRTWSQASLPVRLGGLGIRKISSVALPAFLSSVHGTHKLIEKILAPSLGTFEVAHLSEAKNAWGLACPNSDFPVVLSSQRLWDRPLCELARKNLLDTCPSVADRARLLAVSVWESGLWLQAMPSFNTGNLLDPTTFRLAISLRLGARCCVAHRCQCGTAVDQLGHHGLSCSKSAGRISRHASLNDIIRRAFTTANAAAILEPNGLMRDDGKRPDGMTLVPWKMGRPLVWDATCVDTMAPSHLPETHVRAGAAANSAEQLKRRKYSNLGSGYIFEPFGVETLGPWGPGAHRVFQSLSERLVDATRDQNAGTYLAQRISIAIQRGNAASMLGTLPTGSGLEHLDCL

SEQ ID NO: 19044 - protein, 973 aa, Ennomos quercinarius
MSTQNNVVSLENRIQCPDCPQVRLFKGQKGLKIHQSKCHRVIQIPLSAPVSGSVVASSSPTSAATPSKPFWEVLSSYKRFIPVLKRIPRGARISVAQSLSSSIRNVISKNTKHAWEHLLTFPYHVLYVKLDPTNKSSLTKRVKENCVRYKVLEEQCLDHEIIVPLNRRNNIINSKQNNDSATFKIVESKISDGDIKGAARVLFSSDTIAPYCSETIQSLQDKHPPAAANLHLPEPPLPNDVTVEVTPQEVAAAVTSFQSGSAGGLDGLTPQILKDLLSGISGEIGEALLRDLTALVNLMLSGQVNSDVIEILYGANLCALIKKDGGIRPIAVGTTYRRLAAKAGCRKKVAFLSNLFQPIQLGFGSRGGCEAAVHSLRTFLKLNCGEVLLKVDVKNAFNSVDRGALLTQVKDKIPELYKFLYQCYGNPTKLNYQNNAILSSVGCQQGDPLGPAIFSLAIHPIIQRLQSKLNVWYLDDGTLGGDVNTVFNDLGIIINEFHDVGLDLNFSKCELFVCDTCPDKDLVFEKFNSLAPNIKLVDKRSLRLLGSPILDESISPFVEEKIQKFNNASDRLLKINAHMAFTIIRFCLFVPKFTYILRCCQLWKHSELLMGLDNIVKNTLVSVLNVDMDDRTWSQASLPVRLGGLGIRKISSVALPAFLSSVHGTHKLIEKILAPSLGTFEVAHLSEAKNAWGLACPNSDFPVVLSSQRLWDRPLCELARKNLLDTCPSVADRARLLAVSVWESGLCLQAMPSFNTGNLLDPTTFRLAISLRLGARCCVAHHCQCGTAVDQLGHHGLSCSKSAGRISRHASLNDIIRRAFTTANVAAILEPNGLMRDDGKRPDGMTLVPWKMGRPLVWDATCVDTMAPSHLPETHVRAGAAANSAEQLKRRKYSNLGSGYIFEPFGAETLGPWGPGAHRVFQSLSERLVDATRDQNAGTYLAQRISIAIQRGNAASMLGTLPTGSGLEHLDCL

SEQ ID NO: 19045 - protein, 973 aa, Ennomos quercinarius
MSTQNNVVSLENRIQCPDCPQVRLFKGQKGLKIHQSKCHRVIQIPLSAPVSGSVVASSSPTSAATPSKPFWEVLSSYKRFIPVLKRIPRGARISVAQSLSSSIRNVISKNTKHAWEHLLTFPYHVLYVKLDPTNKSSLTKRVKENCVRYKVLEEQCLDHEIIVPLNRRNNIINSKQNNDSATFKIVESKISDGDIKGAARVLFSSDTIAPYCSETIQSLQDKHPPAAANLHLPEPPLPNDVTVEVTPQEVAAAVTSFQSGSAGGLDGLTPQILKDLLSGISGEIGEALLRDLTALVNLMLSGQVNSDVIEILYGANLCALIKKDGGIRPIAVGTTYRRLAAKVGCRKKVAFLSNLFQPIQLGFGSRGGCEAAVHSLRTFLKLNCGEVLLKVDVKNAFNSVDRGALLTQVKDKIPELYKFLYQCYGNPTKLNYQNNAILSSVGCQQGDPLGPAIFSLAIHPIIQRLQSKLNVWYLDDGTLGGDVNTVFNDLGIIINEFRDIGLDLNFSKCELFVCDTCPDKDLVFEKFNSLAPNIKLVDKRSLRLLGSPILDESISPFVEEKIQKFNNASDRLLKINAHMAFTIIRFCLFVPKFTYILRCCQLWKHSELLMGLDNIVKNTLVSVLNVDMDDRTWSQASLPVRLGGLGIRKISSVALPAFLSSVHGTHKLIEKILAPSLGTFEVAHLSKAKNAWGLACPNSDFPVVLSSQRLWDRPLCELARKNLLDTCPSVADRARLLAVSVWESGLWLQAMPSFNTGNLLDPTTFRLAISLRLGARCCVAHHCQCGTAVDQLGHHGLSCSKSAGRISRHASLNDIIRRAFTTANVAGILEPNGLMRDDGKRPDGMTLVPWKMGRPLVWDATCVDTMAPSHLPETHVRAGAAANSAEQLKRRKYSNLGSGYIFEPFGVETLGPWGPGAHRVFQSLSERLVDATRDQNAGTYLAQRISIAIQRGNAASMLGTLPTGSGLEHLDCL

SEQ ID NO: 19046 - protein, 973 aa, Ennomos quercinarius
MSTQNNVVSLENRIQCPDCPQVRLFKGQKGLKIHQSKCHRVIQIPLSAPVSGSLVASSSPTSAATPSKPFWEVLSSYKRFIPVLKRIPRGARISVAQSLSSSIRNVISKNTKHAWEHLLTFPYHVLYVKLDPTNKSSLTKRVKENCVRYKVLEEQCLDHEIIVPLNRRNNIINSKQNNDSATFKIVESKISDGDIKGAARVLFSSDTIAPYCSETIQSLQDKHPPAAANLHLPEPPLPNDVTVEVTPQEVAAAVTSFQSGSAGGLDGLTPQILKDLLSGISGEIGEALLRDLTALVNLMLSGQVNSDVIEILYGANLCALIKKDGGIRPIAVGTTYRRLAAKVGCRKKVAFLSNLFQPIQLGFGSRGGCEAAVHSLRTFLKLNCGEVLLKVDVKNAFNSVDRGALLTQVKDKIPELYKFLYQCYGNPTKLNYQNNAILSSVGCQQGDPLGPAIFSLAIHPIIQRLQSKLNVWYLDDGTLGGDVNTVFNDLGIIINEFRDIGLDLNFSKCELFICDTCPDKDLVFEKFYSLAPNIKLVDKRSLRLLGSPILDESISPFVEEKIQKFNNASDRLLKINAHMAFTIIRFCLFVPKFTYILRCCQLWKHSELLMGLDSIVKNTLVSVLNVDMDDRTWSQASLPVRLGGLGIRKISSVALPAFLSSVHGTHKLIEKILAPSLGTFEVAHLSEAKNAWGLASPNSDFPVVLSSQRLWDRPLCELARKNLLDTCPSVADRARLLAVSVWESGLWLQAMPSFTTGNLLDPTTFRLAISLRLGARCCVAHRCQCGTAVDQLGHHGLSCSKSAGRISRHASLNDIIRRAFTTANAAAILEPNGLMRDDGKRPDGMTLVPWKMGRPLVWDATCVDTMAPSHLPETHVRAGAAANSAEQLKRRKYSNLGSAYIFEPFGVETLGPWGPGAHRVFQSLSERLVDATRDQNAGTYLAQRISIAIQRGNAASMLGTLPTGSGLEHLDCL

SEQ ID NO: 19047 - protein, 973 aa, Ennomos quercinarius
MSTQNNVVSLENRIQCPDCPQVRLFKGQKGLKIHQSKCHRVIQIPLSAPVSGSVVASSSPTSAATPSKPFWEVLSSYKRFIPVLKRIPRGARISVAQSLSSSIRNVISKNTKHAWEHLLTFPYHVLYVKLDPTNKSSLTKRVKENCVRYKVLEEQCLDHEIIVPLNRRNNIINSKQNNDSATFKIVESKISDGDIKGAARVLFSSDTIAPYCSETIQSLQDKHPPAAANLHLPEPPLPNDVTVEVTPQEVAAAVTSFQSGSAGGLDGLTPQILKDLLSGISGEIGEALLRDLTALVNLMLSGQVNSDVIEILYGANLCALIKKDGGIRPIAVGTTYRRLAAKVGCRKKVAFLSNLFQPIQLGFGSRGGCEAAVHSLRTFLKLNCGEVLLKVDVKNAFNSVDRGALLTQVKDKIPELYKFLYQCYGNPTKLNYQNNAILSSVGCQQGDPLGPAIFSLAIHPIIQRLQSKLNVWYLDDGTLGGDVNTVFNDLGIIINEFRDIGLDLNFSKCELFVCDTCPDKDLVFEKFNSLAPNIKLVDKRSLRLLGSPILDESISPFVEEKIQKFNNASDRLLKINAHMAFTIIRFCLFVPKFTYILRCCQLWKHSELLMGLDNIVKNTLVSVLNVDMDDRTWSQASLPVRLGGLGIRKISSVALPAFLSSVHGTHKLIEKILAPSLGTFEVAHLSEAKNAWGLACPNSDFPVVLSSQRLWDRPLCELVRKNLLDTCPSVADRARLLAVSVWESGLWLQAMPSFNTGNLLDPTTFRLAISLRLGARCCVAHHCQCGTAVDQLGHHGLSCSKSAGRISRHASLNDIIRRAFTTANVAAILEPNGLMRDDGKRPDGMTLVPWKMGRPLVWDATCVDTMAPSHLPETHVRAGAAANSAEQLKRRKYSNLGSGYIFEPFGAETLGPWGPGAHRVFQSLSERLVDATRDQNAGTYLAQRISIAIQRGNAASMLGTLPTGSGLEHLDCL

SEQ ID NO: 19048 - protein, 973 aa, Ennomos quercinarius
MSTQNNVVSLENRIQCPDCPQVRLFKGQKGLKIHQSKCHRVIQIPLSAPVSGSLVASSSPTSAATPSKPFWEVLSSYKRFIPVLKRIPRGARISVAQSLSSSIRNVISKNTKHAWEHLLTFPYHVLYVKLDPTNKSSLTKRVKENCVRYKVLEEQCLDHEIIVPLNRRNNIINSKQNNDSATFKIVESKISDGDIKGAARVLFSSDTIAPYCSETIQSLQDKYPPAAANLHLPEPPLPNDVTVEVTPQEVAAAVTSFQSGSAGGLDGLTPQILKDLLSGISGEIGEALLRDLTALVNLMLSGQVNSDVIEILYGANLCALIKKDGGIRPIAVGTTYRRLAAKVGCRKKVAFLSNLFQPIQLGFGSRGGCEAAVHSLRTFLKLNCGEVLLKVDVKNAFNSVDRGALLTQVKDKIPELYKFLYQCYGNPTKLNYQNNAILSSVGCQQGDPLGPAIFSLAIHPIIQRLQSKLNVWYLDDGTLGGDVNTVFNDLGIIINEFRDIGLDLNFSKCELFVCDTCPDKDLVFEKFNSLAPNIKLVDKRSLRLLGSPILDESISPFVEEKIQKFNNASDRLLKINAHMAFTIIRFCLFVPKFTYILRCCQLWKHSELLMGLDSIVKNTLVSVLNVDMDDRTWSQASLPVRLGGLGIRKISSVALPAFLSSVHGTHKLIEKILAPSLGTFEVAHLSEAKNAWGLACPNSDFPVVLSSQRLWDRPLCELARKNLLDTCPSVADRARLLAVSVWESGLWLQAMPSFNTSNLLDPTTFRLAISLRLGARCCVAHRCQCGTAVDQLGHHGLSCSKSAGRISRHASLNDIIRRAFTTVNVAAILEPNGLMRDDGKRPDGMTLVPWKMGRPLVWDATCVDTMAPSHLPETHVRAGAAANSAEQLKRRKYSNLGSGYIFEPFGVETLGPWGPGAHRVFQSLSERLVDATRDQNAGTYLAQRISIAIQRGNAASMLGTLPTGSGLEHLDCL

SEQ ID NO: 19049 - protein, 998 aa, Hylaea fasciaria
MLCFIVVCLIILCYFYKYITSLFNTPNMPRCVQASESDTSNQQVVSLEDRVQCHECSQVRVFKGQRGLKIHQSKCHKNVDTPLSAPITNHSFASSAYQPFWKTLSQTKMSKPVLKRIPRGARFSVATVLSQAIRSVISQNTNRAWEHLLFLPYAVLYVSPDQNNKKSLTTRVKENCVQYSALVEPALLSGRDLVLNQSPNFTVKPVTESATIKLVESKLSDGDIKGAARILFSSDTIAPATPETLLELEGKHPTPAANLQIPEAPSDSDASIEITAQDISAAVASFQSGSAGGLDALTPQHLKDLLSGGSGETGEALLRDLTTLITLMLSGRVNRDITEILYGANLCALKKKDGGVRPIAVGMTYRRLAAKICCKKSAPELANLFQPVQLGFGSRGGCEAAVHSVRTFLDQNCGEVLLKVDVKNAFNSVDRGALLTEVKDKIPNLYKFIWQCYSSATKLTYLGHEILSAVGCQQGDPLGPAIFSLAIHPIIQRLQSKLNVWYLDDGTFGGDADTVYGDLLFLIQEFRDIGLELNFSKCELFVSDNCLTKDLVVQKFNTLAPNIKIIDKCSLRLLGSPILDESFPSFFDEKIQNFLQCSDRLSKLNTHMAFTILKYCLFVPKFTYILRCCQLWTHTELLQSLDNIVKNTLASILNLNFEERTWLQASLPVRLGGLGVRSISGVSLPAFLSSVHSTQNLITKILAASLDISVISHMNEARSAWVLACPNTDFPSSTSSQRLWDGPICELTRKKLLNTCSSSTDRARLLAVAEWESGLWLQALPSPNTGTLMDSTSFRISVSLRLGASCCAPHRCQCGTAVDRLGHHGLSCSRSAGRIPRHSSLNDIIRRGFATANCAAILEPSGLMRDDGKRPDGMTLIPWKMGRPLVWDATCVDTLAPSHLSRTETRAGAAAESAEDLKGRKYSALDSGYLFVPFGVETLGPWGPGAHKIFKDLSGRLVDATRDQNAGLYFGQRLSIAIQRGNAASILGTLPTGSGLLD

SEQ ID NO: 19050 - protein, 973 aa, Ennomos quercinarius
MSTQNNVVSLENRIQCPDCPQVRLFKGQKGLTIHQSKCHRVIQIPLSAPVSGSLVASSSPTSAATPSKPFWEVLSSYKRFIPVLKRIPRGARISVAQSLSSSIRNVISKNTKHAWEHLLTFPYHVLYVKLDPTNKSSLTKRVKENCVRYKVLEEQCLDHEIIVPLNRRNNIINSKQNNDSATFKIVESKISDGDIKGAARVLFSSDTIAPYCSETIQSLQDKHPPAAANLHLPEPPLPNDVTVEVTPQEVAAAVTSFQSGSAGGLDGLTPQILKDLLSGISGEIGEALLRDLTALVNLMLSGQVNSDVIEILYGANLCALIKKDGGIRPIAVGTTYRRLAAKVGCRKKVAFLSNLFQPIQLGFGSRGGCEAAVHSLRTFLKLNCGEVLLKVDVKNAFNSVDRGALLTQVKDKIPELYKFLYQCYGNPTKLNYQNNAILSSVGCQQGDPLGPAIFSLAIHPIIQRLQSKLNVWYLDDGTLGGDVNTVFNDLGIIINEFRDIGLDLNFSKCELFVCDTCPDKDLVFEKFNSLAPNIKLVDKRSLRLLGSPILDESISPFVEEKIQKFNNASDRLLKINAHMAFTIIRFCLFVPKFTYILRCCQLWKHSELLMGLDSIVKNTLVSVLNVDMDDRTWSQASLPVRLGGLGIRKISSVALPAFLSSVHGTHKLIEKILAPSLGTFEVAHLSEAKNAWGLACPNSDFPVVLSSQRLWDRPLCELARKNLLDTCPSVADRARLLAVSVWESGLWLQAMPSFNTGNLLDPTTFRLAISLRLGARCCVAHRCQCGTAVDQLGHHGLSCSKSAGRISRHASLNDIIRRAFTTANVAAILEPNGLMRDDGKRPDGMTLVPWKMGRPLVWDATCVDTMAPSHLPETHVRAGAAANSAEQLKRRKYSNLGSGYIFEPFGVETLGPWGPGAHRVFQSLSERLVDATRDQNAGTYLAQRISIAIQRGNAASMLGTLPTGSGLEHLDCL

SEQ ID NO: 19051 - protein, 971 aa, Ennomos quercinarius
MSTQNNVVSLENRIQCPDCPQVRLFKGQKGLKIHQSKCHRVIQIPLSAPVSGSLVASSSPTSAATPSKPFWEVLSSYKRFIPVLKRIPRGARISVAQSLSSSIRNVISKNTKHAWEHLLTFPYHVLYVKLDPTNKSSLTKRVKENCVRYKVLEEQCLDHEIIVPLNRRNNIINSKQNNDSATFKIVESKISDGDIKGAARVLFSSDTIAPYCSETIQSLQDKHPPAAANLHLPEPPLPNDVTVEVTPQEVAAAVTSFQSGSAGGLDGLTPQILKDLLSGISGEIGEALLRDLTALVNLMLSGQVNSDVIEILYGANLCALIKKDGGIRPIAVGTTYRRLAAKVGCRKKVAFLSNLFQPIQLGFGSRGGCEAAVHSLRTFLKLNCGEVLLKVDVKNAFNSVDRGALLTQVKDKIPELYKFLYQCYGNPTKLNYQNNAILSSVGCQQGDPLGPAIFSLAIHPIIQRLQSKLNVWYLDDGTLGGDVNTVFNDLGIIINEFRDIGLDLNFSKCELFVCDTCPDKDLVFEKFNSLAPNIKLVDKRSLRLLGSPILDESISPFVEEKIQKFNNASDRLLKINAHMAFTIIRFCLFVPKFTYILRCCQLWKHSELLMGLDSIVKNTLVSVLNVDMDDRTWSQASLPVRLGGLGIRKISSVALPAFLSSVHGTHKLIEKILAPSLGTFEVAHLSEAKNAWGLASPNSDFPVVLSSQRLWDRPLCELARKNLLDTCPSVADRARLLAVSVWESGLWLQAMPLHGNLLDPTTFRLAISLRLGARCCVAHRCQCGTAVDQLGHHGLSCSKSAGRISRHASLNDIIRRAFTTANAAAILEPNGLMRDDGKRPDGMTLVPWKMGRPLVWDATCVDTMAPSHLPETHVRAGAAANSAEQLKRRKYSNLGSGYIFEPFGVETLGPWGPGAHRVFQSLSERLVDATRDQNAGTYLAQRISIAIQRGNAASMLGTLPTGSGLEHLDCL

SEQ ID NO: 19052 - protein, 973 aa, Ennomos quercinarius
MSTQNNVVSLENRIQCPDCPQVRLFKGQKGLKIHQSKCHRVIQIPLSAPVSGSLVASSSPTSAATPSKPFWEVLSSYKRFIPVLKRIPRGARISVAQSLSSSIRNVISKNTKHAWEHLLTFPYHVLYVKLDPTNKSSLTKRVKENCVRYKVLEEQCLDHEIIVPLNRRNNIINSKQNNDSATFKIVESKISDGDIKGAARVLFSSDTIAPYCSETIQSLQDKHPPAAANLHLPEPPLPNDVTVEVTPQEVAAAVTSFQSGSAGGLDGLTPQILKDLLSGISGEIGEALLRDLTALVNLMLSGQVNSDVIEILYGANLCALIKKDGGIRPIAVGTTYRRLAAKVGCRKKVAFLSNLFQPIQLGFGSRGGCEAAVHSLRTFLKLNCGEVLLKVDVKNAFNSVDRGALLTQVKDKIPELYKFLYQCYGNPTKLNYQNNAILSSVGCQQGDPLGPAIFSLAIHPIIQRLQSKLNVWYLDDGTLGGDVNTVFNDLGIIINEFRDIGLDLNFSKCELFVCDTCPDKDLVFEKFNSLAPNIKLVDKRSLRLLGSPILDESISPFVEEKIQKFNNASDRLLKINAHMAFTIIRFCLFVPKFTYILRCCQLWKHSELLMGLDSIVKNTLVSVLNVDMDDRTWSQASLPVRLGGLGIRKISSVALPAFLSSVHGTHKLIEKILAPSLGTFEVAHLSEAKNAWGLACPNSDFPVVLSSQRLWDRPLCELARKNLLDTCPSVADRARLLAVSVWESGLWLQAMPSFNTGNLLDPTTFRLAISLRLGARCCVAHRCQCGTAVDQLGHHGLSCSKSAGRISRHASLNDIIRRAFTTANAAAILEPNGLMRDDGKRPDGMTLVPWKMGRPLVWDATCVDTMAPSHLPETHVKAGAAANSAKQLKRRKYSNLGSGYIFEPFGVETLGPWGPGAHRVFQSLSERLVDATRDQNAGTYLAQRISIAIQRGNAASMLGTLPTGSGLEHLDCL

SEQ ID NO: 19053 - protein, 973 aa, Ennomos quercinarius
MSTQNNVVSLENRIQCPDCPQVRLFKGQKGLKIHQSKCHRVIQIPLSAPVSGSVVASSSPTSAATPSKPFWEVLSSYKRFIPVLKRIPRGARISVAQSLSSSIRNVISKNTKHAWEHLLTFPYHVLYVKLDPTNKSSLTKRVKENCVRYKVLEEQCLDHEIIVPLNRRNNIINSKQNNDSATFKIVESKISDGDIKGAARVLFSSDTIAPYCSETIQSLQDKHPPAAANLHLPEPPLPNDVTVEVTPQEVAAAVTSFQSGSAGGLDGLTPQILKDLLSGISGEIGEALLRDLTALVNLMLSGQVNSDVIEILYGANLCALIKKDGGIRPIAVGTTYRRLAAKVGCRKKVAFLSNLFQPIQLGFGSRGGCEAAVHSLRTFLKLNCGEVLLKVDVKNAFNSVDRGALLTQVKDKIPELYKFLYQCYGNPTKLNYQNNAILSSVGCQQGDPLGPAIFSLAIHPIIQRLQSKLNVWYLDDGTLGGDVNTVFNDLGIIINEFRDIGLDLNFSKCELFVCDTCPDKDLVFEKFNSLAPNIKLVDKRSLRLLGSPILDESISPFVEEKIQKFNNASDRLLKINAHMAFTIIRFCLFVPKFTYILRCCQLWKHSELLMGLDNIVKNTLVSVLNVDMDDRTWSQASLPVRLGGLGIRKISSVALPAFLSSVHGTHKLIEKILAPSLGTFEVAHLSEAKNAWGLACPNSDFPVVLSSQRLWDRSLCELARKNLLDTCPSVADRARLLAVSVWESGLWLQTMPSFNTGNLLDPTTFRLAISLRLGARCCVAHHCQCGTAVDQLGHHGLSCSKSAGRISRHASLNDIIRRAFTTANVAAILEPNGLMRDDGKRPDGMTLVPWKMGRPLVWDATCVDTMAPSHLPETHVRAGAAANSAEQLKRRKYSNLGSGYIFEPFGVETLGPWGPGAHRVFQSLSERLVDATRDQNAGTYLAQRVSIAIQRGNAASMLGTLPTGSGLEHLDCL

SEQ ID NO: 19054 - protein, 816 aa, Ennomos quercinarius
MEEPFFPSDINSNQHQNSKKSKSCPESAPYRLVESKLSDGDIKGAARILFSSDTLAPATPETLSILEGKHPPPAANLQLPDAPLESDVAVEVSALDVSAAVTSFQSGSAGGLDALSPQHLKDLLCGGSGEVSEALLKNLTALINLMLSGQVNGDVIQLLYGANLCALKKKDGGIRPIAVGTTYRRLAAKICCKKSAPLLANLFQPVQLGFGSRGGCEAAVHSTRTFLSNSCGDVLLKVDVKNAFNSVDRGALLTQVKDKIPNLYNFIWQCYGGSTTLTYNGNEILSAVGCQQGDPLGPAIFSLAIHPIIQRLQSKFNVWYLDDGTLGGDVTTVYNDLLFLVDEFRAIGLELNFSKCELFISDDIPTKDLVLQKFNSLASNIKIIDKYSLRLLGSPILDEAFPQFIEEKIQNFLQCSERLTKINTHMAFTIIRYCLFVPKFTYTLRCSQLWKHTELLHRLDNIVKSTLATILNINLHEREWLQASLPVLMGGLGIRSISGVALPAFLSSVHSTQNLTEKILATSLGNVEVTFFGEARNAWLLACPNTEIPKSVSSQRLWDGPLCGQVRNQLIHTCSSSADRARLLAVSVWESGLWLQALPSQNTGTLLDSSSFRIAASLRLGASCSAPHHCQCGSAVDQLGHHGLSCVRSAGRIPRHASLNDIIRRAFTSANCAAILEPNGLVRDDGKRPDGMTLIPWKMGRPLVWDATCVDTLAPSHLPETQNKAGAAADSAEKLKRRKYSNLDSGFIFAPFGVETLGPWGPSAHKVFKELCKRLVEATRDQNAGLYLGQRLSIAIQRGNAASILGTLPTGSGLLD

SEQ ID NO: 19055 - protein, 975 aa, Ennomos quercinarius
MVVSSTNNVVSLENRIQCPDCPQVRLFKGQKGLKIHQSKCHRVIQIPLSAPVSGSLVASSSPTSAATPSKPFWEVLSSYKRFIPVLKRIPRGARISVAQSLSSSIRNVISKNTKHAWEHLLTFPYHVLYVKLDPTNKSSLTKRVKENCVRYKVPEEQCLDHEIIVPLNRRNNIINSKQNNDSATFKIVESKISDGDIKGAARVLFSSDTIAPYCSETIQSLQDKHPPAAANLHLPEPPLPNDVTVEVTPQEVAAAVTSFQSGSAGGLDGLTPQILKDLLSGISGEIGEALLRDLTALVNLMLSGQVNSDVIEILYGANLCALIKKDGGIRPIAVGTTYRRLAAKVGCRKKVAFLSNLFQPIQLGFGSRGGCEAAVHSLRTFLKLNCGEVLLKVDVKNAFNSVDRGALLTQVKDKIPELYKFLYQCYGNPTKLNYQNNAILSSVGCQQGDPLGPAIFSLAIHPIIQRLQSKLNVWYLDDGTLGGDVNTVFNDLGIIINEFRDIGLDLNFSKCELFVCDTCPDKDLVFEKFNSLAPNIKLVDKRSLRLLGSPILDESISPFVEEKIQKFNNASDRLLKINAHMAFTIIRFCLFVPKFTYILRCCQLWKHSELLMGLDSIVKNTLVSVLNVDMDDRTWSQASLPVRLGGLGIRKISSVALPAFLSSVHGTHKLIEKILAPSLGTFEVAHLSEAKNAWGLASPNSDFPVVLSSQRLWDRPLCELARKNLLDTCPSVADRARLLAVSVWESGLWLQAMPSFTTGNLLDPTTFRLAISLRLGARCCVAHRCQCGTAVDQLGHHGLSCSKSAGRISRHASLNDIIRRAFTTANAAAILEPNGLMRDDGKRPDGMTLVPWKMGRPLVWDATCVDTMAPSHLPETHVRAGAASNSAEQLKRRKYSNLGSGYIFEPFGVETLGPWGPGAHRVFQSLSERLVDATRDQNAGTYLAQRISIAIQRGNAASMLGTLPTGSGLEHLDCP

SEQ ID NO: 19056 - protein, 973 aa, Ennomos quercinarius
MSTQNNVVSLENRIQCPDCPQVRLFKGQKGLKIHQSKCHRVIQIPLSAPVSGSLVASSSPTSAATPSKPFWEVLSSYKRFIPVLKRIPRGARISVAQSLSSSIRNVISKNTKHAWEHLLTFPYHVLYVKLDPTNKSSLTKRVKENCVRYKVLEEQCLDHEIIVPLNRRNNIINSKQNNDSATFKIVESKISDGDIKGAARVLFSSDTIAPYCSETIQSLQDKHPPAAANLHLPEPPLPNDVTVEVTPQEVAAAVTSFQSGSAGGLDGLTPQILKDLLSGISGEIGEALLRDLTALVNLMLSGQVNSDVIEILYGANLCALIKKDGGIRPIAVGTTYRRLAAKVGCRKKVAFLSNLFQPIQLGFGSRGGCEAAVHSLRTFLKLNCGEVLLKVDVKNAFNSVDRGALLTQVKDKIPELYKFLYQCYGNPTKLNYQNNAILSSVGCQQGDPLGPAIFSLAIHPIIQRLQSKLNVWYLDDGTLGGDVNTVFNDLGIIINEFRDIGLDLNFSKCELFVCDTCPDKDLVFEKFNSLAPNIKLVDKRSLRLLGSPILDESISPFVEEKIQKFNNASDRLLKINAHMAFTIIRFCLFVPKFTYILRCCQLWKHSELLMGLDSIVKNTLVSVLNVDMDDRTWSQASLPVRLGGLGIRKISSVALPAFLSSVHGTHKLIEKILAPSLGTFEVAHLSEAKNAWGLASPNSDFPVVLSSQRLWDRPLCELARKNLLDTCPSVADRARLLAVSVWESGLWLQAMPSFTTGNLLDPTTFRLAISLRLGARCCVAHRCQCGTAVDQLGHHGLSCSKSAGRISRHASLNDIIRRAFTTANAAAILEPNGLMRDDGKRPDGMTLVPWKMGRPLVWDATCVDTMAPSHLPETHVRAGAAANSAEQLKRRKYSNLGSGYIFEPFGVETLGPWGPGAHRVFQSLSERLVDATRDLNAGTYLAQRISIAIQRGNAASMLGTLPTGSGLVHLDCL

SEQ ID NO: 19057 - protein, 675 aa, Ennomos quercinarius
MLSGQVNSDVIEILYGANLCALIKKDGGIRPIAVGTTYRRLAAKVGCRKKVAFLSNLFQPIQLGFGSRGGCEAAVHSLRTFLKLNCGEVLLKVDVKNAFNSVDRGALLTQVKDKIPELYKFLYQCYGNPTKLNYQNNAILSSVGCQQGDPLGPAIFSLAIHPIIQRLQSKLNVWYLDDGTLGGDVNTVFNDLGIIINEFRDIGLDLNFSKCELFVCDTCPDKDLVFEKFNSLAPNIKLVDKRSLRLLGSPILDESISPFVEEKIQKFNNASDRLLKINAHMAFTIIRFCLFVPKFTYILRCCQLWKHSELLMGLDSIVKNTLVSVLNVDMDDRTWSQASLPVRLGGLGIRKISSVALPAFLSSVHGTHKLIEKILAPSLGTFEVAHLSEAKNAWGLASPNSDFPVVLSSQRLWDRPLCELARKNLLDTCPSVADRARLLAVSVWESGLWLQAMPSFTTGNLLDPTTFRLAISLRLGARCCVAHRCQCGTAVDQLGHHGLSCSKSAGRISRHASLNDIIRRAFTTANAAAILEPNGLMRDDGKRPDGMTLVPWKMGRPLVWDATCVDTMAPSHLPETHVRAGAAANSAEQLKRRKYSNLGSGYIFEPFGVETLGPWGPGAHRVFQSLSERLVDATRDQNAGTYLAQRISIAIQRGNAASMLGTLPTGSGLEHLDCL

SEQ ID NO: 19058 - protein, 973 aa, Ennomos quercinarius
MSTQNNVVSLENRIQCPDCPQVRLFKGQKGLKIHQSKCHRVIQIPLSAPVSGSVVASSSPTSAATPSKPFWEVLSSYKRFIPVLKRIPRGARISVAQSLSSSIRNVISKNTKHAWEHLLTFPYHVLYVKLDPTNKSSLTKRVKENCVRYKVLEEQCLDHEIIVPLNRRNNIINSKQNNDSATFKIVESKISDGDIKGAARVLFSSDTIAPYCSETIQSLQDKHPPAAANLHLPEPPLPNDVTVEVTPQEVAAAVTSFQSGSAGGLDGLTPQILKDLLSGISGEIGEALLRDLMALVNLMLSGQVNSDVIEILYGANLCALIKKDGGIRPIAVGTTYRRLAAKVGCRKKVAFLSNLFQPIQLGFGSRGGCEAAVHSLRTFLKLNCGEVLLKVDVKNAFNSVDRGALLTQVKDKIPELYKFLYQCYGNPTKLNYQNNVILSSVGCQQGDPLGPAIFSLAIHPIIQRLQSKLNVWYLDDGTLGGDVNTVFNDLGIIINEFRDIGLDLNFSKCELFVCDTCPDKDLGFEKFNSLAPNIKLVDKRSLRLLGSPILDESISPFVEEKIQKFNNASDRLLKINAHMAFTIIRFCLFVPKFTYILRCCQLWKHSELLMGLDNIVKNTLVSVLNVDMDDRTWSQASLPVRLGGLGIRKISSVALPAFLSSVHGTHKLIEKILAPSLGTFEVAHLSEAKNAWGLACPNSDFPVVLSSQRLWDRPLCELARKNLLDTCPSVADRARLLAVSVWESGLWLQAMPSFNTGNLLDPTTFRLAISLRLGARCCVAHHCQCGTAVDQLGHHGLSCSKSAGRISRHASLNDIIRRAFTTANVAAILEPNGLMRDDGKRPDGMTLVPWKMGRPLVWDATCVDTMVPSHLPETHVRAGAAANSAEQLKRRKYSNLGSGYIFEPFGVETLGPWGPGAHRVFQSLSERLVDATRDQNAGTYLAQRISIAIQRGNAASMLGTLPTGSGLEHLDCL

SEQ ID NO: 19059 - protein, 1161 aa, Ennomos quercinarius
MPRTKTQGQEDEAAAPSITMGQDQFANLMQALQQSQAEIFARLINEVRTSTSLAEVTASTPAANFTKCTTRFNGTSAEVDGFIDAVEVYKSCLQISDENAVKGLSMLLTDSAALWWQGIKASATSWQDAIGKLRSAFGERRPPFRIYQELFSLKQGTDATDYFISRTRALLSKLPEEDLSEKVQIDMVYGLLDRRIRKRLDRNSVATFDQLLVRARAIEESLEDGASEKTAPAPTQAPPPAPAAAASCFVPVPAPADAASHPASNGDNKDTRDKRLSCSYCKRWGHTKVQCQKLVNKTVNNSVSDKVHSEIKCFGCGAPNVIRSKCVNCNPKSESAFYSVAIDSDKNGCSNFRGIRRCVNERERAPNAVITARPFTRAAAAATAPPPAAPSLSPPRLPGRPSSSPPRAQVRARRIAAKLKRDKDNPRSVDPTLDAGADSTKSPDVCVNSMLCDKGKQSCIPRFSSVQCSSRDTKFVKSDGQSHLLHFHNTNVNNDDMLCLDTKCSDERTNIKSCFVKRHSDYICNNNFIVNSACSKGALTSDPQFRNACRNCNNLCSGRELASEAKEQSGSLLENVPMCLDLSAFNSVDRGALLTQVKDKIPELYKFLYQCYGNPTKLNYQNNAILSSVGCQQGDPLGPAIFSLAIHPIIQRLQSKLNVWYLDDGTLGGDVNTVFNDLGIIINEFRDIGLDLNFSKCELFVCDTCPDKDLVFEKFNSLAPNIKLVDKRSLRLLGSPILDESISPFVEEKIQKFNNASDRLLKINAHMAFTIIRFCLFVPKFTYILRCCQLWKHSELLMGLDSIVKNTLVSVLNVDMDDRTWSQASLPVRLGGLGIRKISSVALPAFLSSVHGTHKLIEKILAPSLGTFEVAHLSEAKNAWGLACPNSDFPVVLSSQRLWDRPLCELARKNLLDTCPSVADRARLLAVSVWESGLWLQAMPSFNTGNLLDPTTFRLAISLRLGARCCVAHRCQCGTAVDQLGHHGLSCSKSAGRISRHASLNDIIRRAFTTANAAAILEPNGLMRDDGKRPDGMTLVPWKMGRPLVWDATCVDTMAPSHLPETHVRAGAAANSAEQLKRRKYSNLGSGYIFEPFGVETLGPWGPGAHRVFQSLSERLVDATRDQNAGTYLAQRISIAIQRGNAASMLGTLPTGSGLEHLDCL

SEQ ID NO: 19060 - protein, 973 aa, Ennomos quercinarius
MSTQNNVVSLENRIQCPDCPQVRLFKGQKGLKIHQSKCHRVIQIPLSAPVSGSLVASSSPTSAATPSKPFWEVLSSYKRFIPVLKRIPRGARISVAQSLSSSIRNVISKNTKHAWEHLLTFPYHVLYVKLDPTNKSSLTKRVKENCVRYKVLEEQCLDHEIIVPLNRRNNIINSKQNNDSATFKIVESKISDGDIKGAARVLFSSDTIAPYCSETIQSLQDKHPPAAANLHLPEPPLPNDVTVEVTPQEVAAAVTSFQSGSAGGLDGLTPQILKDLLSGISGEIGEALLRDLTALVNLMLSGQVNSDVIEILYGANLCALIKKDGGIRPIAVGTTYRRLAAKVGCRKKVAFLSNLFQPIQLGFGSRGGCEAAVHSLRTFLKLNCGEVLLKVDVKNAFNSVDRGALLTQVKDKIPELYKFLYQCYGNPTKLNYQNNAILSSVGCQQGDPLGPAIFSLAIHPIIQRLQSKLNVWYLDDGTLGGDVNTVFNDLGIIINEFRDIGLDLNFSKCELFVCDTCPDKDLVFEKFNSLAPNIKLVDKRSLRLLGSPILDESISPFVEEKIQKFNNASDRLLKINAHMAFTIIRFCLFVPKFTYILRCCQLWKHSELLMGLDSIVKNTLVSVLNVDMDDRTWSQATLPVRLGGLGIRKISSVALPAFLSSVHGTHKLIEKILAPSLGTFEVAHLSEAKNAWGLACPNSDFPVVLSSQRLWDRPLCELARKNLLDTCPSVADRARLLAVSVWESGLWLQAMPSFNTGNLLDPTTFRLAISLRLGARCCVAHRCQCGTAVDQLGHHGLSCSKSAGRISRHASLNDIIRRAFTTANVAAILEPNGLMRDDGKRPDGMTLVPWKMGRPLVWDATCVDTMAPSHLPETHVRAGAAANSAEQLKRRKYSNLGSGYIFEPFGVETLGPWGPGAHRVFQSLSERLVDATRDQNAGTYLAQRISIAIQRGNAASMLGTLPTGSGLEHLDCL

SEQ ID NO: 19061 - protein, 973 aa, Ennomos quercinarius
MSTQNNVVSLENRIQCPDCPQVRLFKGQKGLKIHQSKCHRVIQIPLSAPVSGSLVASSSPTSAATPSKPFWEVLSSYKRFIPVLKRIPRGARISVAQSLSSSIRNVISKNTKHAWEHLLTFPYHVLYVKLDPTNKSSLTKRVKENCVRYKVLEEQCLDHEIIVPLNRRNNIINSKQNNDSATFKIVESKISDGDIKGAARVLFSSDTIAPYCSETIQSLQDKHPPAAANLHLPEPPLPNDVTVEVTPQEVAAAVTSFQSGSAGGLDGLTPQILKDLLSGISGEIGEALLRDLTALVNLMLSGQVNSDVIEILYGANLCALIKKDGGIRPIAVGTTYRRLAAKVGCRKKVAFLSNLFQPIQLGFGSRGGCEAAVHSLRTFLKLNCGEVLLKVDVKNAFNSVDRGALLTQVKDKIPELYKFLYQCYGNPTKLNYQNNAILSSVGCQQGDPLGPAIFSLAIHPIIQRLQSKLNVWYLDDGTLGGDVNTVFNDLGIIINEFRDIGLDLNFSKCELFVCDTCPDKDLVFEKFNSLAPNIKLVDKSSLRLLGSPILDESISPFVEEKIQKFNNASDRLLKINAHMAFTIIRFCLFVPKFTYILRCCQLWKHSELLMGLDSIVKNTLVSVLNVDMDDRTWSQASLPVRLGGLGIRKISSVALPAFLSSVHGTHKLIEKILAPSLGTFEVAHLSEAKNAWGLACPNSDFPVVLSSQRLWDRPLCELARKNLLDTCPSVADRARLLAVSVWESGLWLQAMPSFNTGNLLDPTTFRLAISLRLGARCCVAHRCQCGTAVDQLGHHGLSCSKSAGRISRHASLNDIIRRAFTTANAAAILEPNGLMRDDGKRPDGMTLVPWKMGRPLVWDATCVDTMLPSHLPETHVRAGAAANSAEQLKRRKYSNLGSGYIFEPFGVETLGPWGPGAHRVFQSLSERLVDATRDQNAGTYLAQRISIAIQRGNAASMLGTLPTGSGLEHLDCL

SEQ ID NO: 19062 - protein, 973 aa, Ennomos quercinarius
MSTQNNVVSLENRIQCPDCPQVRFFKGQKGLKIHQSKCHRVIQIPLSAPVSGSLVASSSPTSAATPSKPFWEVLSSYKRFIPVLKRIPRGARISVAQSLSSSIRNVISKNTKHAWEHLLTFPYHVLYVKLDPTNKSSLTKRVKENCVRYKVLEEQCLDHEIIVPLNRRNNIINSKQNNDSATFKIVESKISDGDIKGAARVLFSSDTIAPYCSETIQSLQDKHPPAAANLHLPEPPLPNDVTVEVTPQEVAAAVTSFQSGSAGGLDGLTPQILKDLLSGISGEIGEALLRDLTALVNLMLSGQVNSDVIEILYGANLCALIKKDGGIRPIAVGTTYRRLAAKVGCRKKVAFLSNLFQPIQLGFGSRGGCEAAVHSLRTFLKLNCGEVLLKVDVKNAFNSVDRGALLTQVKDKIPELYKFLYQCYGNPTKLNYQNNAILSSVGCQQGDPLGPAIFSLAIHPIIQRLQSKLNVWYLDDGTLGGDVNTVFNDLGIIINEFRDIGLDLNFSKCELFVCDTCPDKDLVFEKFNSLAPNIKLVDKRSLRLLGSPILDESISPFVEEKIQKFNNASDRLLKINAHMAFTIIRFCLFVPKFTYILRCCQLWKHSELLMGLDSIVKNTLVSVLNVDMDDRTWSQASLPVRLGGLGIRKISSVALPAFLSSVHGTHKLIEKILAPSLGTFEVAHLSEAKNAWGLACPNSDFPVVLSSQSLWDRPLCELARKNLLDTCPSVADRARLLAVSVWESGLWLQAMPSFNTGNLLDPTTFRLAISLRLGARCCVAHRCQCGTAVDQLGHHGLSCSKSAGRISRHASLNDIIRRAFTTANVAAILEPNGLMRDDGKRPDGMTLVPWKMGRPLVWDATCVDTMAPSHLPETHVRAGAAANSAEQLKRRKYSNLGSGYIFEPFGVETLGPWGPGAHRVFQSLSERLVDATRDQNAGTYLAQRISIAIQRGNAASMLGTLPTGSGLEHLDCL

SEQ ID NO: 19063 - protein, 973 aa, Ennomos quercinarius
MSTQNNVVSLENRIQCPDCPQVRLFKGQKGLKIHQSKCHRVIQIPLSAPVSGSLVASSSPTSAATPSKPFWEVLSSYKRFIPVLKRIPRGARISVAQSLSSSIRNVISKNTKHAWEHLLTFPYHVLYVKLDPTNKSSLTKRVKENCVRYKVLEEQCLDHEIIVPLNRRNNIINSKQNNDSATFKIVESKISDGDIKGAARVLFSSDTIAPYCSETIQSLQDKHPPAAANLHLPEPPLPNDVTVEVTPQEVAAAVTSFQSGSAGGLDGLTPQILKDLLSGISGEIGEALLRDLTALVNLMLSGQVNSDVIEILYGANLCALIKKDGGIRPIAVGTTYRRLAAKVGCRKKVAFLSNLFQPIQLGFGSRGGCEAAVHSLRTFLKLNCGEVLLKVDVKNAFNSVDRGALLTQVKDKIPELYKFLYQCYGNPTKLNYQNNAILSSVGCQQGDPLGPAIFSLAIHPIIQRLQSKLNVWYLDDGTLGGDVNTVFNDLGIIINEFRDIGLDLNFSKCELFVCDTCPDKDLVFEKFNSLAPNIKLVDKRSLRLLGSPILDESISPFVEEKIQKFNNASDRLLKINAHMAFTIIRFCLFVPKFTYILRCCQLWKHIELLMGLDSIVKNTLVSVLNVDMDDRTWSQASLPVRLGGLGIRKISSVALPAFLSSVHGTHKLIEKILAPSLGTFEVAHLSEAKNAWGLACPNSDFPVVLSSQRLWDRPLCELARKNLLDTCPSVADRARLLAVSVWESGLWLQAMPSFNTGNLLDPTTFRLAISLRLGARCCVAHRCQCGTAVDQLGHHGLSCSKSAGRISRHASLNDIIRRAFTTANVAAILEPNGLMRDDGKRPDGMTLVPWKMGRPLVWDATCVDTMAPSHLPETHVRAGAAANSAEQLKRRKYSNLGSGYIFEPFGVETLGPWGPGAHRVFQSLSERLVDATRDQNAGTYLAQRISIAIQRGNAASMLGTLPTGSGLEHLDCL

SEQ ID NO: 19064 - protein, 973 aa, Ennomos quercinarius
MSTQNNVVSLENRIQCPDCPQVRLFKGQKGLKIHQSKCHRVIQIPLSAPVSGSLVASSSPTSAATPSKPFWEVLSSYKRFIPVLKRIPRGARISVAQSLSSSIRNVISKNTKHAWEHLLTFPYHVLYVKLDPTNKSSLTKRVKENCVRYKVLEEQCLDHEIIVPLNRRNNIINSKQNNDSATFKIVESKISDGDIKGAARVLFSSDTIAPYCSETIQSLQDKHPPAAANLHLPEPPLPNDVTVEVTPQEVAAAVTSFQSGSAGGLDGLTPQILKDLLSGISGEIGEALLRDLTALVNLMLSGQVNSDVIEILYGANLCALIKKDGGIRPIAVGTTYRRLAAKVGCRKKVAFLSNLFQPIQLGFGSRGGCEAAVHSLRTFLKLNCGEVLLKVDVKNAFNSVDRGALLTQVKDKIPELYKFLYQCYGNPTKLNYQNNAILSSVGCQQGDPLGPAIFSLAIHPIIQRLQSKLNVWYLDDGTLGGDVNTVFNDLGIIINEFRDIGLDLNFSKCELFVCDTCPDKDLVFEKFNSLAPNIKLVDKRSLRLLGSPILDESISPFVEEKIQKFNNASDRLLKINAHMAFTIIRFCLFVPKFTYILRCCQLWKHSELLMGLDSIVKNTLVSVLNADMDDRTWSQASLPVRLGGLGIRKISSVALPAFLSSVHGTHKLIEKILAPSLGTFEVAHLSEAKNAWGLASPNSDFPVVLSSQRLWDRPLCELARKNLLDTCPSVADRARLLAVSVWESGLWLQAMPSFTTGNLLDPTTFRLAISLRLGARCCVAHRCQCGTAVDQLGHHGLSCSKSAGRISRHASLNDIIRRAFTTANAAAILEPNGLMRDDGKRPDGMTLVPWKMGRPLVWDATCVDTMAPSHLPETHVRAGAAANSAEQLKRRKYSNLGSGYIFEPFGVETLGPWGPGAHRVFQSLSERLVDATRDQNAGTYLAQRISIAIQRGNAASMLGTLPTGSGLVHLDCL

SEQ ID NO: 19065 - protein, 998 aa, Hylaea fasciaria
MLCFIVVCLIILCYFYKYITSLFNTPNMPRCVQASESDTSNQQVVSLEDRVQCHECSQVRVFKGQRGLKIHQSKCHKNVDTPLSAPITNHSFASSAYQPFWKTLSQTKMSKPVLKRIPRGARFSVATVLSQAIRSVISQNTNRAWEHLLFLPYAVLYVSPDQNNKKSLTTRVKENCVQYSALVEPALLSGRDLVLNQSPNFTVKPVTESATIKLVESKLSDGDIKGAARILFSSDTIAPATPETLLELEGKHPTPAANLQLPEAPSDSDASIEITAQDISAAVASFQSGSAGGLDALTPQHLKDLLSGGSGETGEALLRDLTTLITLMLSGRVNRDITEILYGANLCALKKKDGGVRPIAVGMTYRRLAAKICCKKSAPELANLFQPVQLGFGSRGGCEAAVHSVRTFLDQNCGEVLLKVDVKNAFNSVDRGALLTEVKDKIPNLYKFIWQCYSSATKLTYLGHEILSAVGCQQGDPLGPAIFSLAIHPIIQRLQSKLNVWYLDDGTFGGDADTVYGDLLFLIQEFRDIGLELNFSKCELFVSDNCLTKDLVVQKFNTLAPNIKIIDKCSLRLLGSPILDESFPSFFDEKIQNFLQCSDRLSKLNTHMAFTILKYCLFVPKFTYILRCCQLWTHTELLQSLDNIVKNTLASILNLNFEERTWLQASLPVRLGGLGVRSISGVSLPAFLSSVHSTQNLITKILAASLDISVISHMNEARSAWVLACPNTDFPSSTSSQRLWDGPICELTRKKLLNTCSSSTDRARLLAVAEWESGLWLQALPSPNTGTLMDSTSFRISVSLRLGASCCAPHRCQCGTAVDRLGHHGLSCSRSAGRIPRHSSLNDIIRRGFATANCAAILEPSGLMRDDGKRPDGMTLIPWKMGRPLVWDATCVDTLAPSHLSRTETRAGAAAESAEDLKGRKYSALDSGYLFVPFGVETLGPWGPGAHKIFKDLSGRLVDATRDQNAGLYFGQSLSIAIQRGNAASILGTLPTGSGLLD

SEQ ID NO: 19066 - protein, 973 aa, Ennomos quercinarius
MSTQNNVVSLENRIQCPDCPQVRLFKGQKGLKIHQSKCHRVIQIPLSAPVSGSLVASSSPTSAATPSKPFWEVLSSYKRFIPVLKRIPRGARISVAQSLSSSIRNVISKNTKHAWEHLLTFPYHVLYVKLDPTNKSSLTKRVKENCVRYKVLEEQCLDHEIIVPLNRRNNIINSKQNNDSATFKIVESKISDGDIKGAARVLFSSDTIAPYCSETIQSLQDKHPPAAANLHLPEPPLPNDVTVEVTPQEVAAAVTSFQSGSAGGLDGLTPQILKDLLSGISGEIGEALLRDLTALVNLMLSGQVNSDVIEILYGANLCALIKKDGGIRPIAVGTTYRRLAAKVGCRKKVAFLSNLFQPIQLGFGSGGGCEAAVHSLRTFLKLNCGEVLLKVDVKNAFNSVDRGALLTQVKDKIPELYKFLYQCYGNPTKLNYQNNAILSSVGCQQGDPLGPAIFSLAIHPIIQRLQSKLNVWYLDDGTLGGDVNTVFNDLGIIINEFRDIGLDLNFSKCELFVCDTCPDKDLVFEKFNSLAPNIKLVDKRSLRLLGSPILDESISPFVEEKIQKFNNASDRLLKINAHMAFTIIRFCLFVPKFTYILRCCQLWKHSELLMGLDSIVKNTLVSVLNVDMDDRTWSQASLPVRLGGLGIRKISSVALPAFLSSVHGTHKLIEKILAPSLGTFEVAHLSEAKNAWGLASPNSDFPVVLSSQRLWDRPLCELARKNLLDTCPSVADRARLLAVSVWESGLWLQAMPSFTTGNLLDPTTFRLAISLRLGARCCVAHRCQCGTAVDQLGHHGLSCSKSAGRISRHASLNDIIRRAFTTANAAAILEPNGLMRDDGKRPDGMTLVPWKMGRPLVWDATCVDTMAPSHLPETHVRAGAAANSAEQLKRRKYSNLGSGYIFEPFGVETLGPWGPGAHRVFQSLSERLVDATRDQNAGTYLAQRISIAIQRGNAASMLGTLPTGSGLEHLDCL

SEQ ID NO: 19067 - protein, 933 aa, Ennomos quercinarius
MSTQNNVVSLENRIQCPDCPQVRLFKGQKGLKIHQSKCHRVIQIPLSAPVSGSLVASSSPTSAATPSKPFWEVLSSYKRFIPVLKRIPRGARISVAQSLSSSIRNVISKNTKHAWEHLLTFPYHVLYVKLDPTNKSSLTKRVKENCVRYKVLEEQCLDHEIIVPLNRRNNIINSKQNNDSATFKIVESKISDGDIKGAARVLFSSDTIAPYCSETIQSLQDKHPPAAANLHLPEPPLPNDVTVEVTPQEVAAAVTSFQSGSAGGLDGLTPQILKDLLSGISGEIGEALLRDLTALVNLMLSGQVNSDVIEILYGANLCALIKKDGGIRPIAVGTTYRRLAAKVGCRKKVAFLSNLFQPIQLGFGSRGGCEAAVHSLRTFLKLNCGEVLLKVDVKNAFNSVDRGALLTQVKDKIPELYKFLYQCYGNPTKLNYQNNAILSSVGCQQGDPLGPAIFSLAIHPIIQRLQSKLNVWYLDDGTLGGDVNTVFNDLGIIINEFRDIGLDLNFSKCELFVCDTCPDKDLVFEKFNSLAPNIKLVDKRSLRLLGSPILDESISPFVEEKIQKFNNASDRLLKINAHMAFTIIRFCLFVPKFTYILRCCQLWKHSELLMGLDSIVKNTLVSVLNVDMDDRTWSQASLPVRLGGLGIRKISSVALPAFLSSVHGTHKLIEKILAPSLGTFEVAHLSEAKNAWGLASPNSDFPVVLSSQRLWDRPLCELARKNLLDTCPSVADRARLLAVSVWESGLWLQAMPSFTTGNLLDPTTFRLAISLRLGARCCVAHRCQCGTAVDQLGHHGLSCSKSAGRISRHASLNDIIRRAFTTANAAAILEPNGLMRDDGKRPDGMTLVPWKMGWPLVWDATCVDTMAPSHLPETHVRAGAAANSAEQLKRRKYSNLGSGYIFEPFGVETLGPWGPGAHRGFPKSIRAPGRCDA

SEQ ID NO: 19068 - protein, 973 aa, Ennomos quercinarius
MSTQNNVVSLENRIQCPDCPQVRLFKGQKGLKINQSKCHRVIQIPLSAPVSGLVVASSSPTSAATPSKPFWEVLSSYKRFIPVLKRIPRGARISVAQSLSSSIRNVISKNTKHAWEHLLTFPYHVLYVKLDPTNKSSLTKRVKENCVRYKVLEEQCLDHEIIVPLNRRNNIINSKQNNDSATFKIVESKISDGDIKGAARVLFSSDTIAPYCSETIQSLQDKHPPAAANLHLPEPPLPNDVTVEVTPQEVAAAVTSFQSGSAGGLDGLTPQILKDLLSGISGEIGEALLRDLTALVNLMLSGQVNSDVIEILYGANLCALIKKDGGIRPIAVGTTCRHLAAKVGCRKKVAFLSNLFQPIQLGFGSRGGCEAAVHSLRTFLKLNCGEVLLKVDVKNAFNSVDRGALLTQVKDKIPELYKFLYQCYGNPTKLNYQNNAILSSVGCQQGDPLGPAIFSLAIHPIIQRLQSKLNVWYLDDGTLGGDVNTVFNDLGIIINEFRDIGLDLNFSKCELFVCDTCPDKDLVFEKFNSLAPNIKLVDKRSLRLLGSPILDESISPFVEEKIQKFNNASDRLLKINAHMAFTIIRFCLFVPKFTYILRCCQLWKHSELLMGLDSIVKNTLVSVLNVDMDDRTWSQASLPVRLGGLGIRKISSVALPAFLSSVHGTHKLIEKILAPSLGTFEVAHLSEAKNAWGLACPNSDFPVVLSSQRLWDRPLCELARKNLLDTCPSVADRARLLAVSVWESGLWLQAMPSFNTGNLLDPTTFRLAISLRLGARCCVAHRCQCGTAVDQLGHHGLSCSKSAGRISRHASLNDIIRRAFTTANAAAILEPNGLMRDDGKRPDGMTLVPWKMGRPLVWDATCVDTMAPSHLPETHVRAGAAANSAEQLKRHKYSNLGSGYIFEPFGDETLGPWGPGAHRVFQSLSERLVDATRDQNAGTYLAQRISIAIQRGNAASMLGTLPTGSGLEHLDCL

SEQ ID NO: 19069 - protein, 973 aa, Ennomos quercinarius
MSTQNNVVSLENRIQCPDCPQVRLFKGQKGLKIHQSKCHRVIQIPLSAPVSGSLVASSSPTSAATPSKPFWEVLSSYKRFIPVLKRIPRGARISVAQSLSSSIRNVISKNTKHAWEHFLTFPYHVLYVKLDPTNKSSLTKRVKENCVRYKVLEEQCLDHEIIVPLNRRNNIINSKQNNDSATFKIVESKISDGDIKGAARVLFSSDTIAPYCSETIQSLQDKHPPAAANLHLPEPPLPNDVTVEVTPQEVAAAVTSFQSGSAGGLDGLTPQILKDLLSGISGEIGEALLRDLTALVNLMLSGQVNSDVIEILYGANLCALIKKDGGIRPIAVGTTYRRLAAKVGCRKKVAFLSNLFQPIQLGFGSRGGCEAAVHSLRTFLKLNCGEVLLKVDVKNAFNSVDRGALLTQVKDKIPELYKFLYQCYGNPTKLNYQNNAILSSVGCQQGDPLGPAIFSLAIHPIIQRLQSKLNVWYLDDGTLGGDVNTVFNDLGIIINEFRDIGLDLNFSKCELFVCDTCPDKDLVFEKFNRLAPNIKLVDKRSLRLLGSPILDESISPFVEEKIQKFNNASDRLLKINAHMAFTIIRFCLFVPKFTYILRCCQLWKHSELLMGLDSIVKNTLVSVLNVDMDDRTWSQASLPVRLGGLGIRKISSVALPAFLSSVHGTHKLIEKILAPSLGTFEVAHLSEAKNAWRLASPNSDFPVVLSSQRLWDRPLCELARKNLLDTCPSVADRARLLAVSVWESGLWLQAMPSFTTGNLLDPTTFRLAISLRLGARCCVAHRCQCGTAVDQLGHHGLSCSKSAGRISRHASLNDIIRRAFTTANAAAILEPNGLMRDDGKRPDGMTLVPWKMGRPLVWDATCVDTMAPSHLPETHVRAGAAANSAEQLKRRKYSNLGSGYIFEPFGVETLGPWGPGAHRVFQSLSERLVDATRDQNAGTYLAQRISIAIQRGNAASMLGTLPTGSGLEHLDCL

SEQ ID NO: 19070 - protein, 968 aa, Ennomos quercinarius
MSTQNNVVSLENRIQCPDCPQVRLFKGQKGLKIHQSKCHRVIQIPLSAPVSGSLVASSSPTSAATPSKPFWEVLSSYKRFIPVLKRIPRGARISVAQSLSSSIRNVISKNTKHAWEHLLTFPYHVLYVKLDPTNKSSLTKRVKENCVRYKVLEEQCLDHEIIVPLNRRNNIINSKQNNDSATFKIVESKISDGDIKGAARVLFSSDTIAPYCSETIQSLQDKHPPAAANLHLPEPPLPNDVTVEVTPQEVAAAVTSFQSGSAGGLDGLTPQILKDLLSGISGEIGEALLRDLTALVNLMLSGQVNSDVIEILYGANLCALIKKDGGIRPIAVGTTYRRLAAKVGCRKKVAFQPIQLGFGSRGGCEAAVHSLRTFLKLNCGEVLLKVDVKNAFNSVDRGALLTQVKDKIPELYKFLYQCYGNPTKLNYQNNAILSSVGCQQGDPLGPAIFSLAIHPIIQRLQSKLNVWYLDDGTLGGDVNTVFNDLGIIINEFRDIGLDLNFSKCELFVCDTCPDKDLVFEKFNSLAPNIKLVDKRSLRLLGSPILDESISPFVEEKIQKFNNASDRLLKINAHMAFTIIRFCLFVPKFTYILRCCQLWKHSELLMGLDSIVKNTLVSVLNVDMDDRTWSQASLPVRLGGLGIRKISSVALPAFLSSVHGTHKLIEKILAPSLGTFEVAHLSEAKNAWGLASPNSDFPVVLSSQRLWDRPLCELARKNLLDTCPSVADRARLLAVSVWESGLWLQAMPSFTTGNLLDPTTFRLAISLRLGARCCVAHRCQCGTAVDQLGHHGLSCSKSAGRISRHASLNDIIRRAFTTANAAAILEPNGLMRDDGKRPDGMTLVPWKMGRPLVWDATCVDTMAPSHLPETHVRAGAAANSAEQLKRRKYSNLGSGYIFEPFGVETLGPWGPGAHRVFQSLSERLVDATRDQNAGTYLAQRISIAIQRGNAASMLGTLPTGSGLEHLDCL

SEQ ID NO: 19071 - protein, 675 aa, Ennomos quercinarius
MLSGQVNSDVIEILYGANLCALIKKDGGIRPIAVGTTYRRLAAKVGCRKKVAFLSNLFQPIQLGFGSRGGCEAAVHSLRTFLKLNCGEVLLKVDVKNVFNSVDRGALLTQVKDKIPELYKFLYQCYGNPTKLNYQNNAILSSVGCQQGDPLGPAIFSLAIHPIIQRLQSKLNVWYLDDGTLGGDVNTVFNDLGIIINEFRDIGLDLNFSKCELFVCDTCPDKDLVFEKFNSLAPNIKLVDKRSLRLLGSPILDESISPFVEEKNQKFNNASDRLLKINAHMAFTIIRFCLFVPKFTYILRCCQLWKHSELLMGLDNIVKNTLVSVLNVDMDDRTWSQASLPVRLGGLGIRKISSVALPAFLSSVHGTHKLIEKILAPSLGTFEVAHLSEAKNAWGLACPNSDFPVVLSSQRLWDRPLCELARKNLLDTCPSVADRARLLAVSVWESGLWLQAMPSFNTGNLLDPTTFRLAISLRLGARCCVAHHCQCGTAVDQLGHHGLSCSKSAGRISRHASLNDIIRRAFTTANVAAILEPNGLMRDDGKRPDGMTLVPWKMGRPLVWDATCVDTMAPSHLPETHVRAGAAANSAEQLKRRKYSNLGSGYIFEPFGAETLGPWGPGAHRVFQSLSEHLVDATRDQNAGTYLAQRISIAIQRGNAASMLGTLPTGSGLEHLDCL

SEQ ID NO: 19072 - protein, 984 aa, Erannis defoliaria
MASSAPSGRNAVSKINVVSQQDMIQCTECPQAKFFKGQKGLKIHKTRCHKIHEIPLSAPISGSNVASSSSMSAATPAKPFWEVLSSLKNSIPILKRIPRGARISVAQSLSFAIRNAVTQNSKQAWEHLLSFPYNVLYVHSDPSNKKSLTTRVKENCVKYKVSEENLLGLANIIPPKRRNNQNSKKSDDSVTFKLVENKMSDGDIKGAARVLFSSDTIAPHTLETIQSLRDKHPPAAANLHLPEPPQPDDVAIDVQTQEIATAVASFQSGSAGGLDGLTPQHLKDLLSFSSGEVGETLLKDLTALVNLMLSGRVNSDVIEILYGANLCALIKKDGGIRPIAVGTTYRRLAAKAGCRQKVALLSSLFQPIQLGFGSRGGCEAAVHSLRTFLDQNCGEVLLKVDVKNAFNSVDRGALLTQIKDKIPDVFNFLWQCYGNPTKLTYQNNVLLSSVGCQQGDPFGPAIFSLAIHPIIQRLQSKLNVWYLDDGTLGGDVSTVLNDLQILIDEFRLIGLELNFSKCELYVCDSCPNKDLVIAKFNDLAPNIKSVDRCSLRLLGSPILDESFSPFVEEKIQNFMSASRRLLNINAHMAFTIIKYCLFVPKFIYTLRCSPLWKHGELLSSLDNVVKETLISVLNVDMNDRTWSQASLPVRLGGLGIRKISSVALPAFLSSVHSTHKLIEKILLPSLGHSGVVVAHLNEAKNVWREACPNTDFPRTLSSQRLWDGPICELARKSLLDTCTSVADRARILAVSVWESGLWLQAIPSFNTGSLLDPTAFRLAVSLRLGARCCEAHRCQCGTVVDQLGHHGLSCSRSAGRIGRHASLNDVIRRALSTANVAAVLEPSGLARDDSKRPDGMTLVPWKMGRPLVWDATCVDTLAPSHLPETQSRAGAAANSAERHKRRKYANLGRGYIFEPFGVETLGPWGPGAHHLFKNISERLVDATRDQNAGVYLAQRISIAIQRGNAASMLGTLPTGSGFEHLDCI

SEQ ID NO: 19073 - protein, 937 aa, Erannis defoliaria
MASSTPSGRNAVSKINVVSQQDMIQCTECPQAKFFKGQKGLKIHKTRCHKIHETPLSAPISGSNVASSSSMSAATPAKPFWEVLSSLKNSIPILKRIPRGARISVAQSLSFAIRNAVTQNSKQAWEHLLSFPYNVLYVHSDPSNKKSLTTRVKENCVKYKVSEENFLGLANIIPPKRRNNQHSKKSDDSVTFKLVENKMSDGDIKGAARVLFSSDTIAPHTLETIQSLRDKHPPAAANLHLPEPPQPDDVAIDVQTQEIATAVASFQSGSAGGLDGLTPQHLKDLLSFSSGEVGETLLKDLTALVSLMLSGRVNSDVIEILYGANLCALIKKDGGIRPIAVGTTYRRLAAKAGCRQKVALLSSLFQPIQLGFGSRGGCEAAVHSLRTFLDQNCGEVLLKVDVKNAFNSVDRGALLTQIKDKIPDVFNFLWQCYGNPTKLTYQNNVLLSSVGCQQGDPFGPAIFSLAIHPIIQRLQSKLNVWYLDDGTLGGDVSTVLNDLQILIDEFRLIGLELNFSKCELYVCDSCPNKDLVIAKFNDLAPNIKSVDRCSLRLLGSPILDESFSPFVEEKIQNFMSASRRLLNINAHMAFTIIKYCLFVPKFIYTLRCSPLWKHGELLSSLDNVVKETLISVLNVDMNDRTWSQASLPVRLGGLGIRKISSVALPAFLSSVHSTHKLIEKILLPSLGHSGVVVAHLNEAKNVWREACPNTDFPRTLSSQRLWDGPICELAWKSLLDTCTSVADRARILAVSVWESGLWLQAIPSFNTGSLLDPTAFRLAVSLRLGARCCEAHRCQCGTVVDQLGHHGLSCSRSAGRIGRHASLNDVIRRALSTANVAAVLEPSGLARDDGKRPDGMTLVPWKMGRPLVWDATCVDTLAPSHLPETQSRAGAAANSAERHKRRKYANLGRGYIFEPFDRRLVSTRRVIKMLAFIWLNA

SEQ ID NO: 19074 - protein, 984 aa, Erannis defoliaria
MASLTPSGRNAVSKINVVSQQDMIQCTECPQAKFFKGQKGLKIHKTRCHKIHEIPLSAPISGSNVASSSSMSAATPAKPFWEVLSSLKNSIPILKRIPRGARISVAQSLSFAIRNAVTQNSKQAWEHLLSFPYNVLYVHSDPSNKKSLTTRVKENCVKYKVSEENLLGLANIIPPKRRNNQNSKKSDDSVTFKLVENKMSDGDIKGAARVLFSSDTIAPHTLETVQSLRDKHPPAAANLHLPEPPQPDDVAIDVQTQEIATAVASFQSGSAGGLDGLTPQHLKDLLSFSSGEVGETLLKDLTALVSLMLSGRVNSDVIEILYGANLCALIKKDGGIRPIAVGTTYRRLAAKAGCRQKVALLSSLFQPIQLGFGSRGGCEAAVHSLRTFLDQNCGEVLLKVDVKNAFNSVDRGALLTQIKDKIPDVFSFLWQCYGNPTKLTYQNNVLLSSVGCQQGDPFGPAIFSLAIHPIIQRLQSKLNVWYLDDGTLGGDVSTVLNDLQILIDEFRLIGLELNFSKCELYVCDSCPNKDLVIAKFNDLAPNIKSVDRCSLRLLGSPILDESFSPYVEEKIQNFMSASRRLLNINAHMAFTIIKYCLFVPKFIYTLRCSPLWKHGELLSSLDNVVKETLISVLNVDMNDRTWSQASLPVRLGGLGIRKISSVALPAFLSSVHSTHKLIEKILLPSLGHSGVVVAHLNEAKNVWREACPNTDFPRTLSSQRLWDGPICELARKSLLDTCTSVADRARILAVSVWESGLWLQAIPSFNTGSLLDPTAFRLAVSLRLGARCCEAHRCQCGTAVDQLGHHGLSCSRSAGRIGRHASLNDVIRRALSTANVAAVLEPSGLARDDGKRPDGMTLVPWKMGRPLVWDATCVDTLAPSHLPETQSRAGAAANSAERHKRRKYANLGRGYIFEPFGVETLGPWGPGAHHLFKNISERLVDATRDQNAGVYLAQRISIAIQRGNAASMLGTLPTGSGFEHLDCL

SEQ ID NO: 19075 - protein, 984 aa, Erannis defoliaria
MASSTPSGRNAVSKINVVSQQDMIQCTECPQAKFFKGQKGLKIHKTRCHKIHEIPLSAPISGSNVASSSSMSAATPAKPFWEVLSSLKNSIPILKRIPRGARISVAQSLSFAIRNAVTQNSKQAWEHLLSFPYNVLYVHSDPSNKKSLTTRVKENCVKYKVSEENLLGLANIIPPKRRNNQNSKKSDDSVTFKLVENKMSDGDIKGAARVLFSSDTIAPHTLETIQSLRDKHPPAAANLHLPEPPQPDDVAIDVQTQEIATAVASFQSGSAGGLDGLTPQHLKDLLSFSSGEVGETLLKDLTALVSLMLSGRVNSDVIEILYGANLCALIKKDGGIRPIAVGTTYRRLAAKAGCRQKVALLSSLFQPIQLGFGSRGGCEAAVHSLRTFLDQNCGEVLLKVDVKNAFNSVDRGALLTQIKDKIPDVFNFLWQCYGNPTKLIYQNNVLLSSVGCQQGDPFGPAIFSLAIHPIIQRLQSKLNVWYLDDGTLGGDVSTVLNDLQILIDEFRLIGLELNFSKCELYVCDSCPNKDLVIAKFNDLAPNIKSVDRCSLRLLGSPILDESFSPFVEEKIQNFMSASRRLLNINAHMAFTIIKYCLFVPKFIYTLRCSPLWKHGELLSSLDNVVKETLISVLNVDMNDRTWSQASLPVRLGGLGIRKISSVALPAFLSSVHSTHKLIEKILLPSLGHSGVVVAHLNEAKNVWREACPNTDFPRTLSSQRLWDGPICELARKSLLDTCTSVADRARILAVSVWESGLWLQAIPSFNTGSLLDPTAFRLAVSLRLGARCCEAHRCQCGTVVDQLGHHGLSCSRSAGRIGRHASLNDVIRRALSTANVAAVLEPSGLARDDGKRPDGMTLVPWKMGRPLVWDATCVDTLAPSHLPETQSRAGAAANSAERHKRRKYANLGRGYIFEPFGVETLGPWGPGAHHLFKNISERLVDSTRDQNAGVYLAQRISIAIQRGNAASMLGTLPTGSGFEHLDCL

SEQ ID NO: 19076 - protein, 964 aa, Erannis defoliaria
MASLTPSGRNAVSKINVVSQQDMIQCTECPQAKFFKGQKGLKIHKTRCHKIHEIPLSAPISGSNVASSSSMSAATPAKPFWEVLSSLKNSIPILKRIPRGARISVAQSLSFAIRNAVTQNSKQAWEHLLSFPYNVRVKYKVSEENLLGLANIIPPKRRNNQNSKKSDDSVTFKLVENKMSDGDIKGAARVLFSSDTIAPHTLETVQSLRDKHPPAAANLHLPEPPQPDDVAIDVQTQEIATAVASFQSGSAGGLDGLTPQHLKDLLSFSSGEVGETLLKDLTALVSLMLSGRVNSDVIEILYGANLCALIKKDGGIRPIAVGTTYRRLAAKAGCRQKVALLSSLFQPIQLGFGSRGGCEAAVHSLRTFLDQNCGEVLLKVDVKNAFNSVDRGALLTQIKDKIPDVFNFLWQCYGNPTKLTYQNNVLLSSVGCQQGDPFGPAIFSLAIHPIIQRLQSKLNVWYLDDGTLGGDVSTVLNDLQILIDEFRLIGLELIFSKCELYVCDSCPNKDLVIAKFNDLAPNIKSVDRCSLRLLGSPILDESFSPYVEEKIQNFMRASRRLLNINAHMAFTIIKYCLFVPKFIYTLRCSPLWKHGELLSSLDNVVKETLISVLNVDMNDRTWSQASLPVRLGGLGIRKISSVALPAFLSSVHSTHKLIEKILLPSLGHSGVVVAHLNEAKNVWREACPNTDFPRTLSSQRLWDGPICELARKSLLDTCTSVADRARILAVSVWESGLWLQAIPSFNTGSLLDPTAFRLAVSLRLGARCCEAHRCQCGTAVDQLGHHGLSCSRSAGRIGRHASLNDVIRRALSTANVAAVLEPSGLARDDGKRPDGMTLVPWKMGRPLVWDATCVDTLAPSHLPETQSRAGAAANSAERHKRRKYANLGRGYIFEPFGVETLGPWGPGAHHLFKNISERLVDATRDQNAGVYLAQRISIAIQRGNAASMLGTLPTGSGFEHLDCL

SEQ ID NO: 19077 - protein, 984 aa, Erannis defoliaria
MASSTPSGRNAVSKINVVSQQDMIQCTECPQAKFFKGQKGLKIHKTRCHKIHEIPLSAPISGSNVASSSSMSAATPAKPFWEVLSSLKNSIPILKRIPRGARISVAQSLSFAIRNAVTQNSKQAWEHLLSFPYNVLYVHSDPSNKKSLTTRVKENCVKYKVLEENLLGLANIIPPKRRNNQNSKKSDDSVTFKLVENKMSDGDIKGAARVLFSSDTIAPHTLETIQSLRDKHPPAAANLHLPEPPQPDDVAIDVQTQEIATAVASFQSGSAGGLDGLTPQHLKDLLSFSSGEVGETLLKDLTALVNLMLSGRVNSDVIEILYGANLCALIKKDGGIRPIAVGTTYRRLAAKAGCRQKVALLSSLFQPIQLGFGSRGGCEAAVHSLRTFLDQNCGEVLLKVDVKNAFNSVDRGALLTQIKDKIPDVFNFLWQCYGNPTKLTYQNNVLLSSVGCQQGDPFGPAIFSLAIHPIIQRLQSKLNVWYLDDGTLGGDVSTVLNDLQILIDEFRLIGLERNFSKCELYVCDSCPNKDLVIAKFNDLAPNIKSVDRCSLRLLGSPILDESFSPFVEEKIQNFMSASRRLLNINAHMAFTIIKYCLFVPKFIYTLRCSPLWKHGELLSSLDNVVKETLISVLNVDMNDRTWSQASLPVRLGGLGIRKISSVALPAFLSSVHSTHKLIEKILLPSLGHSGVVVAHLNEAKNVWREACPNTDFPRTLSSQRLWDGPICELARKSLLDTCTSVADRARILAVSVWESGLWLQAIPSFNTGSLLDPTAFRLAVSLRLGARCCEAHRCQCGTVVDQLGHHGLSCSRSAGRIGRHASLNDVIRRALSTANVAAVLEPSGLARDDGKRPDGMTLVPWKMGRPLVWDATCVDTLAPSHLPETQSRAGAAANSAERHKRRKYANLGRGYIFEPFGVETLGPWGPGAHHLFKNISERLVDATRDQNAGVYLAQRISIAIQRGNAASMLGTLPTGSGFEHLDCL

SEQ ID NO: 19078 - protein, 984 aa, Erannis defoliaria
MASSTPSGRNAVSKINVVSQQDMIQCTECPQAKFFKGQKGLKIHKTRCHKIHEIPLSAPISGSNVASSSSMSTATPAKPFWEVLSSLKNSIPILKRIPRGARISVAQSLSFAIRNAVTQNSKQAWEHLLSFPYNVLYVHSDPSNKKSLTTRVKENCVKYKVSEENLLGLANIIPPKRRNNQNSKKSDDSVTFKLVENKMSDGDIKGAARVLFSSDTIAPHTLETVQSLRDKHPPAAANLHLPEPPQPDDVAIDVQTQEIATAVASFQSGSAGGLDGLTPQHLKDLLSFSSGEVGETLLKDLTALVSLMLSGRVNSDVIEILYGANLCALIKKDGGIRPIAVGTTYRRLAAKAGCRQKVALLSSLFQPIQLGFGSRGGCEAAVHSLRTFLDQNCGEVLLKVDVKNAFNSVDRGALLTQIKDKIPDVFNFLWQCYGNPTKLTYQNNVLLSSVGCQQGDPFGPAIFSLAIHPIIQRLQSKLNVWYLDDGTLGGDVSTVLNDLQILIDEFRLIGLELNFSKCELYVCDSCPNKDLVIAKFNDLAPNIKSVDRCSLRLLGSPILDESFSPFVEEKIQNFMSASRRLLNINAHMAFTIIKYCLFVPKFIYTLRCSPLWKHGELLSSLDNVVKETLISVLNVDMNDRTWSQASLPVRLGGLGIRKISSVALPAFLSSVHSTHKLIEKILLPSLGHSGVVVAHLNEAKNVWREACPNTDFPRTLSSQRLWDGPICELARKSLLDTCTSVTDRARILAVSVWESGLWLQAIPSFNTGSLLDPTAFRLAVSLRLGARCCEAHRCQCGTAVDQLGHHGLSCSRSAGRIGRHASLNDVIRRALSTANVAAVLEPSGLARDDGKRPDGMTLVPWKMGRPLVWDATCVDTLAPSHLPETQSRAGAAANSAERHKRRKYANLGRGYIFEPFGVETLGPWGPGAHHLFKNISERLVDATRDQNAGVYLAQRISIAIQRGNAASMLGTLPTGSGFEHLDCL

SEQ ID NO: 19079 - protein, 984 aa, Erannis defoliaria
MASSTPSGRNAVSKINVVSQQDMIQCTECPQAKFFKGQKGLKIHKTRCHKIHEIPLSAPISGSNVASSSSMSAATPAKPFWEVLSSLKNSIPILKRIPRGARISVAQSLSFAIRNAVTQNSKQAWEHLLSFPYNVLYVHSDPSNKKSLTTRVKENCVKYKVSEENLLGLANIIPPKRRNNQNSKKSDDSVTFKLVENKMSDGDIKGAARVLFSSDTIAPHTLETIQSLREKHPPAAANLHLPEPPQPDDVAIDVQTQEIATAVASFQSGSAGGLDGLTPQHLKDLLSFSSGEVGETLLKDLTALVSLMLSGRVNSDVIEILYGGNLCALIKKDGGIRPIAVGTTYRRLAAKAGCRQKVALLSSLFQPIQLGFGSRGGCEAAVHSLRTFLDQNCGEVLLKVDVKNAFNSVDRGALLTQIKDKIPDVFNFLWQCYGNPTKLTYQNNVLLSSVGCQQGDPFGPAIFSLAIHPIIQRLQSKLNVWYLDDGTLGGDVSTVLNDLQILIDEFRLIGLELNFSKCELYVCDSCPNKDLVIAKFNDLAPNIKSVDRCSLRLLGSPILDESFSPFVEEKIQNFMSASRRLLNINAHMAFTIIKYCLFVPKFIYTLRCSPLWKHGELLSSLDNVVKETLISVLNVDMNDRTWSQASLPVRLGGLGIRKISSVALPAFLSSVHSTHKLIEKILLPSLGHSGVVVAHLNEAKNVWREACPNTDFPRTLSSQRLWDGPICELARKSLLDTCTSVADRARILAVSVWESGLWLQAIPSFNTGSLLDPTAFRLAVSLRLGARCCEAHRCQCGTVVDQLGHHGLSCSRSAGRIGHHASLNDVIRRALSTANVAAVLEPSGLARDDGKRPDGMTLVPWKMGRPLVWDATCVDTLAPSHLPETQSRAGAAANSAERHKRRKYANLGRGYIFEPFGVETLGPWGPGAHHLFKNISERLVDSTRDQNAGVYLAQRISIAIQRGNAASMLGTLPTGSGFEHLDCL

SEQ ID NO: 19080 - protein, 984 aa, Erannis defoliaria
MASSTPSGRNAVSKINVVSQQDMIQCTECPQAKFFKGQKGLKIHKTRCHKIHEIPLSAPISGSNVASSSSMSTATPAKPFWEVLSSLKNSIPILKRIPRGARISVAQSLSFAIRNAVTQNSKQAWEHLLSFPYNVLYVHSDPSNKKSLTTRVKENCVKYKVSEENLLGLANIIPPKRRNNQNSKKSDDSVTFKLVENKMSDGDIKGAARVLFSSDTIAPHTLETVQSLRDKHPPAAANLHLPEPPQPDDVAIDVQTQEIATAVASFQSGSAGGLDGLTPQHLKDLLSFSSGEVCETLLKDLTALVSLMLSGRVNSDVIEILYGANLCALIKKDGGIRPIAVGTTYRRLAAKAGCRQKVALLSSLFQPIQLGFGSRGGCEAAVHSLRTFLDQNCGEVLLKVDVKNAFNSVDRGALLTQIKDKIPDVFNFLWQCYGNPTKLTYQNNVLLSSVGCQQGDPFGPAIFSLAIHPIIQRLQSKLNVWYLDDGTLGGDVSTVLNDLQILIDEFRLIGLELNFSKCELYVCDSCPNKDLVIAKFNDLAPNIKSVDRCSLRLLGSPILDESFSPFVEEKIQNFMSASRRLLNINAHMAFTIIKYCLFVPKFIYTLRCSPLWKHGELLSSLDNVVKETLISVLNVDMNDRTWSQASLPVRLGGLGIRKISSVALPAFLSSVHSTHKLIEKILLPSLGHSGVVVAHLNEAKNVWREACPNTDFPRTLSSQRLWDGPICELARKSLLDTCTSVADRARILAVSVWESGLWLQAIPSFNTGSLLDPTAFRLAVSLRLGARCCEAHRCQCGTAVDQLGHHGLSCSRSAGRISRHASLNDVIRRALSTANVAAVLEPSGLARDDGKRPDGMTLVPWKMGRPLVWDATCVDTLAPSHLPETQSTAGAAANLAERHKRRKYANLGRGYIFEPFGVETLGPWGPGAHHLFKNISERLVDATRDQNAGVYLAQRISIAIQRGNAASMLGTLPTGSGFEHLDCL

SEQ ID NO: 19081 - protein, 984 aa, Erannis defoliaria
MASSTPSGRNAVSKINVVSQQDMIQCTECPQAKFFKGQKGLKIHKTRCHKIHEIPLSAPISGSNVASSSSMSAATPAKPFWEVLSSLKNSIPILKRIPRGARISVAQSLSFAIRNAVTQNSKQAWEHLLSFPYNVLYVHSDPSNKKSLTTRVKENCVKYKVSEENFLGLANIIPPKRRNNQNSKKSDDSVTFKLVENKMSDGDIKGAARVLFSSDTIAPHTLETIQSLRDKHPPAAANLHLPEPPQPDDVAIDVQTQEIATAVASFQSGSAGGLDGLTPQHLKDLLSFSSGEVGETLLKDLTALVSLMLSGRVNSDVIEILYGANLCALIKKDGGIRPIAVGTTYRRLAAKAGCRQKVALLSSLFQPIQLGFGSRGGCEAAVHSLRTFLDQNCGEVLLKVDVKNAFNSVDRGALLTQIKDKIPDVFNFLWQCYGNPTKLTYQNNVLLSSVGCQQGDPFGPAIFSLAIHPIIQRLQSKLNVWYLDDGTLGGDVSTVLNDLQILIDEFRLIGLELNFSKCELYVCDSCPNKDLVIAKFNDLAPNIKSVDRCSLRLLGSPILDESFSPFVEEKIQNFMSASRRLLNINAYMAFTIIKYCLFVPKFIYTLRCSPLWKHGELLSSLDNVVKETLISVLNVDMNDRTWSQASLPVRLGGLGIRKISSVALPAFLSSVHSTHKLIEKILLPSLGHSGVVVAHLNEAKNVWREACPNTDFPRTLSSQRLWDGPICELARKSLLDTCTSVADRARILAVSVWESGLWLQAIPSFNTGSLLDPTAFRLAVSLRLGARCCEAHRCQCGTVVDQLGHHGLSCSRSAGRIGRHASLNDVIRRALSTANVAAVLEPSGLARDDGKRPDGMTLVPWKMGRPLVWDATCVDTLAPSHLPETQSRAGAAANSAERHKRRKYANLGRGYIFEPFGVETLGPWGPGAHHLFKNISERLVDATRDQNAGVYLAQRISIAIQRGNAASMLGTLPTGSGFEHLDCL

SEQ ID NO: 19082 - protein, 950 aa, Erannis defoliaria
MFHQKGLKIHKTRCHKIHEIPLSAPISGSNVASSSSMSTATPAKPFWEVLSSLKNSIPILKRIPRGARISVAQSLSFAIRNAVTQNSKQAWEHLLSFPYNVLYVHSDPSNKKSLTTRVKENCVKYKVSEENLLGLANIIPPKRRNNQNSKKSDDSVTFKLVENKMSDGDIKGAARVLFSSDTIAPHTLETVQSLRDKHPPAAANLHLPEPPQPDDVAIDVQTQEIATAVASFQSGSAGGLDGLTPQHLKDLLSFSSGEVGETLLKDLTALVSLMLSGRVNSDVIEILYGANLCALIKKDGGIRPIAVGTTYRRLAAKAGCRQKVALLSSLFQPIQLGFGSRGGCEAAVHSLRTFLDQNCEEVLLKVDVKNAFNSVDRGALLTQIKDKIPDVFNFLWQCYGNPTKLTYQNNVLLSSVGCQQGDPFGPAIFSLAIHPIIQRLQSKLNVWYLDDGTLGGDVSTVLNDLQILIDEFRLIGLELNFSKCELYVCDSCPNKDLVIAKFNDLAPNIKSVDRCSLRLLGSPILDESFSPFVEEKIQNFMSASRRLLNINAHMAFTIIKYCLFVPKFIYTLRCSPLWKHGELLSSLDNVVKETLISVLNVDMNDRTWSQASLPVRLGGLGIRKISSVALPAFLSSVHSTHKLIEKILLPSLGHSGVVVAHLNEAKNVWREACPNTDFPRTLSSQRLWDGPICELARKSLLDTCTSVADRARILAVSVWESGLWLQAIPSFNTGSLLDPTAFRLAVSLRLGARCCEAHRCQCGTAVDQLGHHGLSCSRSAGRIGRHASLNDVIRRALSTANVAAVLEPSGLARDDGKRPDGMTLVPWKMGRPLVWDATCVDTLAPSHLPETQSRAGAAANSAGRHKRRKYANLGRGYIFEPFGVETLGPWGPGAHHLFKNISERLVDATRDQNAGVYLAQRISIAIQRGNAASMLGTLPTGSGFEHLDCL

SEQ ID NO: 19083 - protein, 984 aa, Erannis defoliaria
MASSTPSGRNAVSKINVVSQQDMIQCTECPQAKFFKGQKGLKIHKTRCHKIHEIPLSAPISGSNVASSSSMSAATPAKPFWEVLSSLKNSIPILKRIPRGARISVAQSLSFAIRNAVTQNSKQAWEHLLSFPYNVLYVHSDPSNKKSLTTRVKENCVKYKVSEENLLGLANIIPPKRRNNQNSKKSDDSVTFKLVENKMSDGDIKGAARVLFSSDTIAPHTLETIQSLRDKHPPAAANLHLPEPPQPDDVAIDVQTQEIATAVASFQSGSAGGLDGLTPQHLKDLLSFSSGEVGETLLKDLTALVNLMLSGRVNSDVIEILYGANLCALIKKDGGIRPIAVGTTYRRLAAKAGCRQKVALLSSLFQPIQLGFGSRGGCEAAVHSLRTFLDQNCGEVLLKVDVKNAFNSVDRGALLTQIKDKIPDVFNFLWQCYGNPTKLTYQNNVLLSSVGCQQGDPFGPAIFSLAIHPIIQRLQSKLNVWYLDDGTLGGDVSTVLNDLQILIDEFRLIGLELNFSKCELYVCDSCPNKDLVIAKFNDLAPNIKSVDRCSLRLLGSPILDESFSPFVEEKIQNFMSASRRLLNINAHMAFTIIKYCLFVPKFIYTLRCSPLWKHGELLSSLDNVVKETLISVLNVDMNDRTWSQASLPVRLGGLGIRKISSVALPAFLSSVHSTHKLIEKILLPSLGHSGVVVAHLNEAKNVWREACPNTDFPRTLSSQRLWDGPICELARKSLLDTCTSVADRARILAVSVWESGLWLQAIPSFNTGSLLDPTAFRLAVSLRLGARCCEAHRCQCGTVVDQLGHHGLSCSRSAGRIGRHASLNDVIRRALSTANVAAVLEPSGLARDDGKRPDGMTLVPWKMGRPLVWDATCVDTLAPSHLPETQSRAGAAANSAERHKRRKYANLGRGYIFEPFGVETLGPWGPGAHHLFKNISERLVDATRDQNAGVYLAQRISIAIQRGNAASMLGTLPTGSGFEHLDCL

SEQ ID NO: 19084 - protein, 786 aa, Erannis defoliaria
MSDGDIKGAARVLFSSDTIAPHTLETIQSLRDKHPLAAANLHLPEPPQPDDVAIDVQTQEIATAVASFQSGSAGGLDGLTPQHLKDLLSFSSGEVGETLLKDLTALVSLMLSGRVNSDVIEILYGANLCALIKKDGGIRPIAVGTTYRRLAAKAGCRQKVALLSSLFQPIQLGFGSRGGCEAAVHSLRTFLDQNCGEVLLKVDVKNAFNSVDRGALLTQIKDKIPDVFNFLWQCYGNPTKLTYQNNVLLSSVGCQQGDPFGPAIFSLAIHPIIQRLQSKLNVWYLDDGTLEGDVSTVLNDLQILIDEFRLIGLELNFSKCELYVCDSCPNKDLVIAKFNDLAPNIKSVDRCSLRLLGSPILDESFSPFVEEKIQNFMSASRRLLNINAHMAFTIIKYCLFVPKCIYTLRCSPLWKHGELLSSLDNVVKETLISVLNVDMSDRTWSQASLPVRLGGLGIRKISSVALPGFLSSVHSTHKLIEKILLPSLGHSGVVVAHLNEAKNVWREACPNTDFPRTLSSQRLWDGPICELARKSLLDTCTSVADRARILAVSVWESGLWLQAIPSFNTGSLLDPTAFRLAVSLRLGARCCEAHRCQCGTVVDQLGHHGLSCSRSAGRIGRHASLNDVIRRALSTANVAAVLEPSGLARDDGKRPDGMTLVPWKMGRPLVWDATCVDTLAPSHLPETQSRAGAAANSAERHKRRKYANLGRGYIFEPFGVETLGPWGPGAHHLFKNISERLVDATRDQNAGVYLAQRISIAIQRGNAASMLGTLPTGSGFEHLDCL

SEQ ID NO: 19085 - protein, 984 aa, Erannis defoliaria
MASSTPSGRNAVSKINVVSQQDMIQCTECPQAKFFKGQKGLKIHKTRCHKIHEIPLSAPISGSNVASSSSMSAATPAKPFWEVLSSLKNSIPILKRIPRGARISVAQILSFAIRNAVTQNSKQAWEHLLSFPYNVLYVHSDPSNKKSLTTRVKENCVKYKVSEENLLGLANIIPPKRRNNQNSKKSDDSVTFKLVENKMSDGDIKGAARVLFSSDTIAPHTLETIQSLRDKHPPAAANLHLPEPPQPDDVAIDVQTQEIATAVASFQSGSAGGLDGLTPQHLKDLLSFSSGEVGETLLKDLTALVSLMLSGRVNSDVIEILYGANLCALIKKDGGIRPIAVGTTYRRLAAKAGCRQKVALLSSLFQPIQLGFGSRGGCEAAVHSLRTFLDQNCGEVLLKVDVKNAFNSVDRGALLTQIKDKIPDVFNFLWQCYGNPTKLTYQNNVLLSSVGCQQGDPFGPAIFSLAIHPIIQRLQSKLNVWYLDDGTLGGDVSTVLNDLQILIDEFRLIGLELNFSKCELYVCDSCPNKDLVIAKFNDLAPNIKSVDRCSLRLLGSPILDESFSPFVEEKIQNFMSASRRLLNINAHMAFTIIKYCLFVPKFIYTLRCSPLWKHGELLSSLDNVVKETLISVLNVDMNDRTWSQASLPVRLGGLGIRKISSVALPAFLSSVHSTHKLIEKILLPSLGHSGVVVAHLNEAKNVWREACPNTDFPRTLSSQRLWDGPICELARKSLLDTCTSVADRARILAVSVWESGLWLQAIPSFNTGSLLDPTAFRLAVSLRLGARCCEAHRCQCGTVVDQLGHHGLSCSRSAGRIGRHASLNDVIRRALSTANVAAVLEPSGLARDDGKRPDGMTLVPWKMGRPLVWDATCVDTLAPSHLPETQSRAGAAANSAERHKRRKYANLGRGYIFEPFGVETLGPWGPGAHHLFKNISERLVDSTRDQNAGVYLAQRISIAIQRGNAASMLGTLPTGSGFEHLDCL

SEQ ID NO: 19086 - protein, 984 aa, Erannis defoliaria
MASSTPSGRNAVSKINVVSQQDMIQCTECPQAKFFKGQKGLKIHKTRCHKIHEIPLSAPISGSNVASSSSMSAATPAKPFWEVLSSLKNSIPILKRIPRGARISVAQSLSFAIRNAVTQNSKQAWEHLLSFPYNVLYVHSDPSNKKSLTTRVKENCVKYKVSEENFLGLANIIPPKRRNNQNSKKSDDSVTFKLVENKMSDGDIKGAARVLFSSDTIAPHTLETIQSLRDKHPPAAANLHLPEPPQPDDVAIDVQTQEIATAVASFQSGSAGGLDGLTPQHLKDLLSFSSGEVGETLLKDLTALVSLMLSGRVNSDVIEILYGANLCALIKKDGGIRPIAVGTTYRRLAAKAGCRQKVALLSSLFQPIQLGFGSRGGCEAAVHSLRTFLDQNCGEVLLKVDVKNAFNSVDRGALLTQIKDKIPDVFNFLWQCYGNPTKLTYQNNVLLSSVGCQQGDPFGPAIFSLAIHPIIQRLQSKLNVWYLDDGTLGGDVSTVLNDLQILIDEFRLIGLELNFSKCELYVCDSCPNKDLVIAKFNDLAPNIKSVDRCSLRLLGSPILDESFSPFVEEKIQIFMSASRRLLNINAHMAFTIIKYCLFVPKFIYTLRCSPLWKHGELLSSLDNVVKETLISVLNVDMNDRTWSQASLPVRLGGLGIRKISSVALPAFLSSVHSTHKLIEKILLPSLGHSGVVVAHLNEAKNVWREACPNTDFPRTLSSQRLWDGPICELARKSLLDTCTSVADRARILAVSVWESGLWLQAIPSFNTGSLLDPTAFRLAVSLRLGARCCEAHRCQCGTVVDQLGHHGLSCSRSAGRIGRHASLNDVIRRALSTANVAAVLEPSGLARDDGKRPDGMTLVPWKMGRPLVWDATCVDTLAPSHLPETQSRAGAAANSVERHKRRKYANLGRGYIFEPFGVETLGPWGPGAHHLFKNISERLVDATRDQNAGVYLAQRISIAIQRGNAASMLGTLPTGSGFEHLDCL

SEQ ID NO: 19087 - protein, 914 aa, Erannis defoliaria
MSAATPAKPFWEVLSSLKNSIPILKRIPRGARISVAQSLSFAIRNAVTQNSKQAWEHLLSFPYNVLYVHSDPSNKKSLTTRVKENCVKYKVSEENFLGLANIIPPKRRNNQNSKKSDDSVTFKLVENKMSDGDIKGAARVLFSSDTIAPHTLETIQSLRDKHPPAAANLHLPEPPQPDDVAIDVQTQEIATAVASFQSGSAGGLDGLTPQHLKDLLSFSSGEVGETLLKDLTALVSLMLSGRVNSDVIEILYGANLCALIKKDGGIRPIAVGTTYRRLAAKAGCRQKVALLSSLFQPIQLGFGSRGGCEAAVHSLRTFLDQNCGEVLLKVDVKNAFNSVDRGALLTQIKDKIPDVFNFLWQCYGNPTKLTYQNNVLLSSVGCQQGDPFGPAIFSLAIHPIIQRLQSKLNVWYLDDGTLEGDVSTVLNDLQILIDEFRLIGLELNFSKCELYVCDSCPNKDLVIAKFNDLAPNIKSVDRCSLRLLGSPILDESFSPFVEEKIQNFMSASRRLLNINAHMAFTIIKYCLFVPKFIYTLRCSPLWKHGELLSSLDNVVKETLISVLNVDMNDRTWSQASLPVRLGGLGIRKISSVALPAFLSSVYSTHKLIEKILLPSLGHSGVVVAHLNEAKNVWREACPNTDFPRTLSSQRLWDGPICELARKSLLDTCTSVADRARILAVSVWESGLWLQAIPSFNTGSLLDPTAFRLAVSLRLGARCCEAHRCQCGTVVDQLGHHGLSCSRSAGRIGRHASLNDVIRRALSTANVAAVLEPSGLARDDGKRPDGMTLVPWKMGRPLVWDATCVDTLAPSHLPETQSRAGAAANSAERHKRRKYANLGRGYIFEPFGVETLGPWGPGAHHLFKNISERLVDATRDQNAGVYLAQRISIAIQRGNAASMLGTLPTGSGFEHLDCL

SEQ ID NO: 19088 - protein, 984 aa, Erannis defoliaria
MASSTPSGRNAVSKINVVSQQDMIQCTECPQAKFFKGQKGLKIHKTRCHKIHEIPLSAPISGSNVASSSSMSAATPAKPFWEVLSSLKNSIPILKRIPRGARISVAQSLSFAIRNAVTQNSKQAWEHLLSFPYNVLYVHSDPSNKKSLTTRVKENCVKYKVSEENFLGLANIIPPKRRNNQNSKKSDDSVTFKLVENKMSDGDIKGAARVLFSSDTIAPHTLETIQSLRDKHPPAAANLHLPEPPQPDDVAIDVQTQEIATAVASFQSGSAGGLDGLTPQHLKDLLSFSSGEVGETLLKDLTALVSLMLSGRVNSDVIEILYGANLCALIKKDGGIRPIAVGTTYRRLAAKAGCRQKVALLSSLFQPIQLGFGSRGGCEAAVHSLRTFLDQNCGEVLLKVDVKNAFNSVDRGALLTQIKDKIPDVFNFLWQCYGNPTKLTYQNNVLLSSVGCQQGDPFGPAIFSLAIHPIIQRLQSKLNVWYLDDGTLGGDVSTVLNDLQILIDEFRLIGLELNFSKCELYVCDSCPNKDLVIAKFNDLAPNIKSVDRCSLRLLGSPILDESFSPFVEEKIQNFMSASRRLLNINAHMAFTIIKYCLFVPKFIYTLRCSPLWKHGELLSSLDNVVKETLISVLNVDMNDRTWSQASLPVRLGGLGIRKISSVALPAFLYSVHSTHKLIEKILLPSLGHSGVVVAHLNEAKNVWREACPNTDFPRTLSSQRLWDGPICELARKSLLDTCTSVADRARILAVSVWESGLWLQAIPSFNTGSLLDPTAFRLAVSLRLGARCCEAHRCQCGTAVDQLGHHGLSCSRSAGRIGRHASLNDVIRRALSTANVAAVLEPSGLARDDGKRPDGMTLVPWKMGRPLVWDATCVDTLAPSHLPETQSRAGAAANSAERHKRRKYANLGRGYIFEPFGVETLGPWGPGAHHLFKNISERLVDATRDQNAGVYLAQRISIAIQRGNAASMLGTLPTGSGFEHLDCL

SEQ ID NO: 19089 - protein, 903 aa, Erannis defoliaria
MRPVRASVIAPMKRKTFKAWSWSGHFCAPPGPAPGAWTPLAPPYLRQCWYIIIEVRQQRCKINPKSLTTRVKENCVKYKVSEENLLGLANIIPPKRRNNQNSKKSDDSVTFKLVENKMSDGDIKGAARVLFSSDTIAPHTLETIQSLRDKHPPAAANLHLPEPPQPDDVAIDVQTQEIATAVASFQSGSAGGLDGLTPQHLKDLLSFSSGEVGETLLKDLTALVNLMLSGRVNSDVIEILYGANLCALIKKDGGIRPIAVGTTYRRLAAKAGCRQKVALLSSLFQPIQLGFGSRGGCEAAVHSLRTFLDQNCGEVLLKVDVKNAFNSVDRGALLTQIKDKIPDVFNFLWQCYGNPTKLTYQNNVLLSSVGCQQGDPFGPAIFSLAIHPIIQRLQSKLNVWYLDDGTLGGDVSTVLNDLQILIDEFRLIGLELNFSKCELYVCDSCPNKDLVIAKFNDLAPNIKSVDRCSLRLLGSPILDESFSPFVEEKIQNFMSASRRLLNINAHMAFTIIKYCLFVPKFIYTLRCSPLWKHGELLSSLDNVVKETLISVLNVDMNDRTWSQASLPVRLGGLGIRKISSVALPAFLSSVHSTHKLIEKILLPSLGHSGVVVAHLNEAKNVWREACPNTDFPRTLSSQRLWDGPICELARKSLLDTCTSVADRARILAVSVWESGLWLQAIPSFNTGSLLDPTAFRLAVSLRLGARCCEAHRCQCGTVVDQLGHHGLSCSRSAGRIGRHASLNDVIRRALSTANVAAVLEPSGLARDDGKRPDGMTLVPWKMGRPLVWDATCVDTLAPSHLPETQSRAGAAANSAERHKRRKYANLGRGYIFEPFGVETLGPWGPGAHHLFKNISERLVDATRDQNAGVYLAQRISIAIQRGNAASMLGTLPTGSGFEHLDCL

SEQ ID NO: 19090 - protein, 984 aa, Erannis defoliaria
MASSTPSGRNAVSKINVVSQHDMIQCTECPQAKFFKGQKGLKIHKTRCHKIHEIPLSAPISGSNVASSSSMSTATPAKPFWEVLSSLKNSIPILKRIPRGARISVAQSLSFAIRNAVTQNSKQAWEHLLSFPYNVLYVHSDPSNKKSLTTRVKENCVKYKVSEENLLGLANIIPPKRRNNQNSKKSDDSVTFKLVENKMSDGDIKGAARVLFSSDTIAPHTLETVQSLRDKHPPAAANLHLPEPPQPDDVAIDVQTQEIATAVASFQSGSAGGLDGLTPQHLKDLLSFSSGEVGETLLKDLTALVSLMLSGRVNSDVIEILYGANLCALIKKDGGIRPIAVGTTYRRLAAKAGCRQKVALLSNLFQPIQLGFGSRGGCEAAVHSLRTFLDQNCGEVLLKVDVKNAFNSVDRGALLTQIKDKIPDVFNFLWQCYGNPTKLTYQNNVLLSSVGCQQGDPFGPAIFSLAIHPIIQRLQSKLNVWYLDDGTLGGDVSTVLNDLQILIDEFRLIGLELNFSKCELYDCDSCPNKDLVIAKFNDLAPNIKSVDRCSLRLLGSPILDESFSPFVEEKIQNFMSASRRLLNINAHMAFTIIKYCLFVPKFIYTLRCSPLWKHGELLSSLDNVVKETLISVLNVDMNDRTWSQASLPVRLGGLGIRKISSVALPAFLSSVHSTHKLIEKILLPSLGHSGVVVAHLNEAKNVWREACPNTDFPRTLSSQRLWDGPICELARKSLLDTCTSVADRARILAVSVWESGLWLQAIPSFNTGSLLDPTAFRLAVSLRLGARCCEAHRCQCGTTVDQLGHHGLSCSRSAGRIGRHASLNDVIRRALSTANVAAVLEPSGLARDDGKRPDGMTLVPWKMGRPLVWDATCVDTLAPSHLPETQSRAGAAANSAERHKRRKYANLGRGYIFEPFGVETLGPWGPGAHHLFKNISERLVNATRDQNAGVYLAQRISIAIQRGNAASMLGTLPTGSGFEHLDCL

SEQ ID NO: 19091 - protein, 984 aa, Erannis defoliaria
MASSTPSGRNAVSKINVVSQQDMVQCTECPQAKFFKGQKGLKIHKTRCHKIHEIPLSAPISGSNVASSSSMSAATPAKPFWEVLSSLKNSIPILKRIPRGARISVAQSLSFAIRNAVTQNSKQAWEHLLSFPYNVLYVHSDPSNKKSLTTRVKENCVKYKVSEENLLGLANIIPPKRRNNQNSKKSDDSVTFKLVENKMSDGDIKGAARVLFSSDTIAPHTLETIQSLRDKHPPAAANLHLPEPPQPDDVAIDVQTQEIATAVASFQSGSAGGLDGLTPQHLKDLLSFSSGEVGETLLKDLTALVSLMLSGRVNSDVIEILYGANLCALIKKDGGIRPIAVGTTYRRLAAKAGCRQKVALLSSLFQPIQLGFGSRGGCEAAVHSLRTFLDQNCGEVLLKVDVKNAFNSVDRGALLTQIKDKIPDVFNFLWQCYGNPTKLTYQNNVLLSSVGCQQGDPFGPAIFSLAIHPIIQRLQSKLNVWYLDDGTLGGDVSTVLNDLQILIDEFRLIGLELNFSKCELYVCDSCPNKDLVIAKFNDLAPNIKSVDRCSLRLLGSPILDESFSPFVEEKIQNFMSASRRLLNINAHMAFTIIKYCLFVPKFIYTLRCSPLWKHGELLSSLDNVVKETLISVLNVDMNDRTWSQASLPVRLGGLGIRKISSVALPAFLSSVHSTHKLIEKILLPSLGHSGVVVAHLNEAKNVWREACPNTDFPRTLSSQRLWDGPICELARKSLLDTCTSVADRARILAVSVWESGLWLQAIPSFNTGSLLDPTAFRLAVSLRLGARCCEAHRCQCGTVVDQLGHHGLSCSRSAGRIGRHASLNDVIRRALSTANVAAVLEPSGLARDDGKRPDGMTLVPWKMGRPLVWDATCVDTLAPSHLPETQSRAGAAANSAERHKRRKYANLGRGYIFEPFGVETLGPWGPGAHHLFKNISERLVDSTRDQNAGVYLAQRISIAIQRGNAASMLGTLPTGSGFEHLDCL

SEQ ID NO: 19092 - protein, 977 aa, Erannis defoliaria
MASLTPSGRNAVSKINVVSQQDMIQCTECPQAKFFKGQKGLKIHKTRCHKIHEIPLSAPISGSNVASTPAKPFWEVLSLLKNSIPILKRIPRGARISVAQSLSFAIRNAVTQNSKQAWEHLLSFPYNVLYVHSDPSNKKSLTTRVKENCVKYKVSEENLLGLANIIPPKRRNNQNSKKSDDSVTFKLVENKMSDGDIKGAARVLFSSDTIAPHTLETVQSLRDKHPPAAANLHLPEPPQPDDVAIDVQTQEIATAVASFQSGSAGGLDGLTPQHLKDLLSFSSGEVGETLLKDLTALVSLMLSGRVNSDVIEILYGANLCALIKKDGGIRPIAVGTTYRRLAAKAGCRQKVALLSSLFQPIQLGFGSRGGCEAAVHSLRTFLDQNCGEVLLKVDVKNAFNSVDRGALLTQIKDKIPDVFNFLWQCYGNPTKLTYQNNVLLSSVGCQQGDPFGPAIFSLAIHPIIQRLQSKLNVWYLDDGTLGGNVSTVLNDLQILIDEFRLIGLELNFSKCELYVCDSCPNKDLVIAKFNDLAPNIKSVDRCSLRLLGSPILDESFSPYVEEKIQNFMSASRRLLNINAHMAFTIIKYCLFVPKFIYTLRCSPLWKHGELLSSLDNVVKETLISVLNVDMNDRTWSQASLPVRLGGLGIRKISSVALPAFLSSVHSTHKLIEKILLPSLGHSGVVVAHLNEAKNVWREACPNTDFPRTLSSQRLWDGPICELARKSLLDTCTSVADRARILAVSVWESGLWLQAIPSFNTGSLLDPTAFRLAVSLRLGARCCEAHRCQCGTAVDQLGHHGLSCSRSAGRIGRHASLNDVIRRALSTANVAAVLEPSGLARDDGKRPDGMTLVPWKMGRPLVWDATCVDTLAPSHLPETQSRAGAAANSAERHKRRKYANLGRGYIFEPFGVETLGPWGPGAHHLFKNISERLVDATRDQNAGVYLAQRISIAIQRGNAASMLGTLPTGSGFEHLDCL

SEQ ID NO: 19093 - protein, 962 aa, Erannis defoliaria
MIQCTECPQAKFFKGQKGLKIHKTRCHKIHEIPLSAPISGSNVASSSSMSAATPAKPFWEVLSSLKNSIPILKRIPRGARISVAQSLSFAIRNAVTQNSKQAWEHLLSFPYNVLYVHSDPSNKKSLTTRVKENCVKYKVSEENLLGLANIIPPKRRNNQNSKKSDDSVTFKLVENKMSDGDIKGAARVLFSSDTIAPHTLETIQSLRDKHPPAAANLHLPEPPQPDDVAIDVQTQEIATAVASFQSGSAGGLDGLTPQHLKDLLSFSSGEVGETLLKDLTALVSLMLSGRVNSDVIEILYGANLCALIKKDGGIRPIAVGTTYRRLAAKVGCRQKVALLSSLFQPIQLGFGSRGGCEAAVHSLRTFLDQNCGEVLLKVDVKNAFNSVDRGALLTQIKDKIPDVFNFLWQCYGNPTKLTYQNNVLLSSVGCQQGDPFGPAIFSLAIHPIIQRLQSKLNVWYLDDGTLGGDVSTVLNDLQILIDEFRLIGLELNFSKCELYVCDSCPNKDLVIAKFNDLAPNIKSVDRCSLRLLGSPILDKSFSPFVEEKIQNFMSASRRLLNINAHMAFTIIKYCLFVPKFIYTLRCSPLWKHGELLSSLDNVVKETLISVLNVDMNDRTWSQASLPVRLGGLGIRKISSVALPAFLSSVHSTHKLIEKILLPSLGHSGVVVAHLNEAKNVWREACPNTDFPRTLSSQRLWDGPICELARKSLLDTCTSVADRARILAVSVWESGLWLQAIPSFNTGSLLDPTAFRLAVSLRLGARCCEAHRCQCGTVVDQLGHHGLSCSRSAGRIGRHASLNDVIRRALSTANVAAVLEPSGLARDDGKRPDGMTLVPWKMGRLLVWDATCVDTLAPSHLPETQSRAGAAANSAERHKRRKYANLGRGYIFEPFGVETLGPWGPGAHHLFKNISERLVDATRDQNAGVYLAQRISIAIQRGNAASMLGTLPTGSGFEHLDCL

SEQ ID NO: 19094 - protein, 984 aa, Erannis defoliaria
MASSTPSGRNAVSKINVVSQQDMIQCTECPQAKFFKGQKGLKIHKTRCHKIHEIPLSAPISGSNVASSSSMSAATPAKPFWEVLSSLKNSIPILKRIPRGARISVAQSLSFAIRNAVTQNSKQAWEHLLSFPYNVLYVHSDPSNKKSLTTRVKENCVKYKVSEENFLGLANIIPPKRRNNQNSKKSDDSVTFKLVENKMSDGDIKGAARVLFSSDTIAPHTLETIQSLRDKHPPAAANLHLPEPPQPDDVAIDVQTQEIATAVASFQSGSAGGLDGLTPQHLKDLLSFSSGEVGETLLKDLTALVSLMLSGRVNSDVIEILYGANLCALIKKDGGIRPIAVGTTYRRLAAKAGCRQKVALLSSLFQPIQLGFGSRGGCEAAVHSLRTFLDQNCGEVLLKVDVKNAFNSVDRGALLTQIKDKIPDVFNFLWQCYGNPTKLTYQNNVLLSSVGCQQGDPFGPAIFSLAIHPIIQRLQSKLNVWYLDDGTLGGDVSTVLNDLQILIDEFRLIGLELNFSKCELYVCDSCPNKDLVIAKFNDLAPNIKSVDRCSLRLLGSPILDESFSPFVEEKIQNFMSASRRLLNINAHMAFTIIKYCLFVPKFIYTLRCSPLWKHGELLSSLDNVVKETLISVLNVDMNDRTWSQASLPVRLGGLGIRKISSVALPAFLSSVHSTHKLIEKILLPSLGHSGVVVAHLNEAKNVWREACPNTDFPRTLSSQRLWDGPICELARKSLLDTCTSVADRARILAVSVWESGLWLQAIPSFNTGSLLDPTAFRLAVSLRLGARCCEAHRCQCGTVVDQLGHHGLSCSRSAGRIGRHASLNDVIRRALSTANVAAVLEPSGLARDDGKRPDGMTLVPWKMGRPLVWDATCVDTLAPSHLPETQSRAGAAANSAERHKRRKYANLGRGYIFEPFGVETLGPWGPGAHHLFKNISERLVDATRDQNAGVYLAQRISIAIQRGNAASMLGTLPTGSGFEHLDCL

SEQ ID NO: 19095 - protein, 984 aa, Erannis defoliaria
MASSTPSGRNAVSKINVVSQQDMIQCTECPQAKFFKGQKGLKIHKTRCHKIHEIPLSAPISGSNVASSSAMSAATPAKPFWEVLSSLKNSIPILKRIPRGARISVAQSLSFAIRNAVTQNSKQAWEHLLSFPYNVLYVHSDPSNKKSLTTRVKENCVKYKVSEENLLGLANIIPPKRRNNQNSKKSDDSVTFKLVENKMSDGDIKGAARVLFSSDTIAPHTLETIQSLRDKHPPAAANLHLPEPPQPDDVAIDVQTQEIATAVASFQSGSAGGLDGLTPQHLKDLLSFSSGEVGETLLKDLTALVSLMLSGRVNSDVIEILYGANLCALIKKDGGIRPIAVGTTYRRLAAKAGCRQKVALLSSLFQPIQLGFGSRGGCEAAVHSLRTFLDQNCGEVLLKVDVKNAFNSVDRGALLTQIKDKIPDVFNFLWQCYGNPTKLTYQNNVLLSSVGCQQGDPFGPAIFSLAIHPIIQRLQSKLNVWYLDDGTLGGDVSTVLNDLQILIDEFRLIGLELNFSKCELYVCDSCPNKDLVIAKFNDLAPNIKSVDRCSLRLLGSPILDESFSPFVEEKIQNFMSASRRLLNINAHMAFTIIKYCLFVPKFIYTLRCSPLWKHGELLSSLDNVVKETLISVLNVDMNDRTWSQASLPVRLGGLGIRKISSVALPAFLSSVHSTHKLIEKILLPSLGHSGVVVAHLNEAKNVWREACPNTDFPRTLSSQRLWDGPICELARKSLLDTCTSVADRARILAVSVWESGLWLQAIPSFNTGSLLDPTAFRLAVSLRLGARCCEAHRCQCGTVVDQLGHHGLSCSRSAGRIGRHASLNDVIRRALSTANVAAVLEPSGLARDDGKRPDGMTLVPWKMGRPLVWDATCVDTLAPSHLPETQSRAGAAANSAERHKRRKYANLGRGYIFEPFGVETLGPWGPGAHHLFKNISERLVDSTRDQNAGVYLAQRISIAIQRGNAASMLGTLPTGSGFEHLDCL

SEQ ID NO: 19096 - protein, 984 aa, Erannis defoliaria
MASSTPSGRNAVSKINVVSQQDMIQCTECPQAKFFKGQKGLKIHKTRCHKIHEIPLSAPISGSNVASSSSMSAATPAKPFWEVLSSLKNSIPILKRIPRGARISVAQSLSFAIRNAVTQNSKQAWEHLLSFPYNVLYVHSDPSNKKSLTTRVKENCVKYKVSEENFLGLANIIPPKRRNNQNSKKSDDSVTFKLVENKMSDGDIKGAARVLFSSDTIAPHTLETIQSLRDKHPPAAANLHLPEPPQPDDVAIDVQTQEIATAVASFQSGSAGGLDGLTPQHLKDLLSFSSGEVGETLLKDLTALVSLMLSGRVNSDVIEILYGANLCALIKKDGGIRPIAVGTTYRRLAAKAGCRQKVALLSSLFQPIQLGFGSRGGCEAAVHSLRTFLDQNCGEVLLKVDVKNAFNSVDRGALLTQIKDKIPDVFNFLWQCYGNPTKLTYQNNVLLSSVGCQQGDPFGPAIFSLAIHPIIQRLQSKLNVWYLDDGTLGGDVSTVLNDLQILIDEFRLIGLELNFSKCDLYVCDSCPNKDLVIAKFNDLAPNIKSVDRCSLRLLGSPILDESFSPFVEEKIQNFMSASRRLLNINAHMAFTIIKYCLFVPKFIYTLRCSPLWKHGELLSSLDNVVKETLISVLNVDMNDRTWSQASLPVRLGGLGIRKISSVALPAFLSSVHSTHKLIEKILLPSLGHSGVVVAHLNEAKNVWREACPNTDFPRTLSSQRLWDGPICELARKSLLDTCTSVADRARILAVSVWESGLWLQAIPSFNTGSLLDPTAFRLAVSLRLGARCCEAHRCQCGTVVDQLGHHGLSCSRSAGRIGRHASLNDVIRRALSTANVAAVLEPSGLARDDGKRPDGMTLVPWKMGRPLVWDATCVDTLAPSHLPETQSRAGAAANSAERHKRRKYANLGRGYIFEPFGVETLGPWGPGAHHLFKNISERLVDATRDQNAGVYLAQRISIAIQRGNAASMLGTLPTGSGFELLDCL

SEQ ID NO: 19097 - protein, 984 aa, Erannis defoliaria
MASSTPSGRNAVSKINVVSQQDMIQCTECPQAKFFKGQKGLKIHKTRCHKIHEIPLSAPISGSNVASSSSMSTATPAKPFWEVLSSLKNSIPILKRIPRGARISVAQSLSFAIRNAVTQNSKQAWEHLLSFPYNVLYVNSDPSNKKSLTTRVKENCVKYKVSEENLLGLANIIPPKRRNNQNSKKSDDSVTFKLVENKMSDGDIKGAARVLFSSDTIAPHTLETVQSLRDKHPPAAANLHLPEPPQPDDVAIDVQTQEIATAVASFQSGSAGGLDGLTPQHLKDLLSFSSGEVGETLLKDLTALVSLMLSGRVNSDVIEILYGANLCALIKKDGGIRPIAVGTTYRRLAAKAGCRQKVALLSSLFQPIQPGLGSRGGCEAAVHSLRTFLDQNCGEVLLKVDVKNAFNSVDRGALLTQIKDKIPDVFNFLWQCYGNPTKLTYQNNVLLSSVGCQQGDPFGPAIFSLAIHPIIQRLQSKLNVWYLDDGTLGGDVSTVLNDLQILIDEFRLIGLELNFSKCELYVCDSCPNKDLVIAKFNDLAPNIKSVDRCSLRLLGSPILDESFSPFVEEKIQNFMSASRRLLNINAHMAFTIIKYCLFVPKFIYTLRCSPLWKHGELLSSLDNVVKETLISVLNVDMNDRTWSQASLPVRLGGLGIRKISSVALPAFLSSVHSTHKLIEKILLPSLGHSGVVVAHLNEAKNVWREACPNTDFPRTLSSQRLWDGPICELARKSLLDTCTSVADRARILAVSVWESGLWLQAIPSFNTGSLLDPTAFRLAVSLRLGARCCEAHRCQCGTAVDQLGHHGLSCSRSAVRIGRHASLNDVIRRALSTANVAAVLEPSGLARDDGKRPDGMTLVPWKMGRPLVWDATCVDTLAPSHLPETQSRAGAAANSAERHKRRKYANLGRGYIFEPFGVETLGPWGPGAHHLFKNISERLVDATRDQNAGVYLAQRISIAIQRGNAASMLGTLPTGSGFEHLDCL

SEQ ID NO: 19098 - protein, 984 aa, Erannis defoliaria
MASSTPSGRNAVSKINVVSQQDMIQCTECPQAKFFKGQKGLKIHKTRCHKIHEIPLSAPISGSNVASSSSMSAATPAKPFWEVLSSLKNSIPILKRIPRGARISVAQSLSFAIRNAVTQNSKQAWEHLLSFPYNVLYVHSDPSNKKSLTTRVKENCVKYKVSEENLLGLANIIPPKRRNNQNSKKSDDSVTFKLVENKMSDGDIKGAARVLFSSDTIAPHTLETIQSLRDKHPPAAANLHLPEPPQPDDVAIDVQTQEIATAVASFQSGSAGGLDGLTPQHLKDLLSFSSGEVGETLLKDLTALVSLMLSGRVNSDVIEILYGANLCALIKKDGGIRPIAVGTTYRRLAAKAGCRQKVALLSSLFQPIQLGFGSRGGCEAAVHSLRTFLDQNCGEVLLKVDVKNAFNSVDRGALLTQIKDKIPDVFNFLWQFYGNPTKLTYQNNVLLSSVGCQQGDPFGPAIFSLAIHPIIQRLQSKLNVWYLDDGTLGGDVSTVLNDLQILIDEFRLIGLELNFSKCELYVCDSCPNKDLVIAKFNDLAPNIKSVDRCSLRLLGSPILDESFSPFVEEKIQNFMSASRRLLNINAHMAFTIIKYCLFVPKFIYTLRCSPLWKHGELLSSLDNVVKETLISVLNVDMNDRTWSQASLPVRLGGLGIRKISSVALPAFLSSVHSTHKLIEKILLPSLGHSGVVVAHLNEAKNVWREACPNTDFPRTLSSQRLWDGPICELARKSLLDTCTSVADRARILAVSVWESGLWLQAIPSFNTGSLLDPTAFRLAVSLRLGARCCEAHRCQCGTVVDQLGHHGLSCSRSAGRIGRHASLNDVIRRALSTANVAAVLEPSGLARDDGKRPDGMTLVPWKMGRPLVWDATCVDTLAPSHLPETQSRAGAAANSAERHKRRKYANLGRGYIFEPFGVETLGPWGPGAHHLFKNISERLVDSTRDQNAGVYLAQRISIAIQRGNAASMLGTLPTGSGFEHLDCL

SEQ ID NO: 19099 - protein, 914 aa, Erannis defoliaria
MSTATPAKPFWEVLSSLKNSIPILKRIPRGARISVAQSLSFAIRNAVTQNSKQAWEHLLSFPYNVLYVHSDPSNKKSLTTRVKENCVKYKVSEENLLGLANIIPPKRRNNQNSKKSDDSVTFKLVENKMSDGDIKGAARVLFSSDTIAPHTLETVQSLRDKHPPAAANLHLPEPPQPDDVAIDVQTQEIATAVASFQSGSAGGLDGLTPQHLKDLLSFSSGEVGETLLKDLTALVSLMLSGRVNSDVIEILYGANLCALIKKDGGIRPIAVGTTYRRLAAKAGCRQKVALLSSLFQPIQLGFGSRGGCEAAVHSLRTFLDQNCGEVLLKVDVKNAFNSVDRGALLTQIKDKIPDVFNFLWQCYGNPTKLTYQNNVLLSSVGCQQGDPFGPAIFSLAIHPIIQRLQSKLNVWYLDDGTLGGDVSTVLNDLQILIDEFRLIGLELNFSKCELYVCDSCPNKDLVIAKFNDLAPNIKSVDRCSLRLLGSPILDESFSPFVEEKIQNFMSASRRLLNINAHMAFTIIKYCLFVPKFIYTLRCSPLWKHGELLSSLDNVVKETLISVLNVDMNDRTWSQASLPVRLGGLGIRKISSVALPAFLSSVHSTHKLIEKILLPSLGHSGVVVAHLNEAKNVWREACPNTDFPRTLSSQRLWDGPICELARKSLLDTCTSVADRARILAVSVWESGLWLQAIPSFNTGSLLDPTAFRLAVSLRLGARCCEAHRCQCGTAVDQLGHHGLSCSRSAGRIGRHASLNDVIRRALSTANVAAVLEPSGLARDDGKRPDGMTLVPWKMGRPLVWDATCVDTLAPSHLPETQSRAGAAANSAERHKRRKYANLGRGYIFEPFGVETLGPWGPGAHHLFKNISERLVDATRDQNAGVYLAQRISIAIQRGNAASMLGTLPTGSGFEHLDCL

SEQ ID NO: 19100 - protein, 984 aa, Erannis defoliaria
MASSTPSGRNAVSKINVVSQQDMIQCTECPQAKFFKGQKGLKIHKTRCHKINEIPLSAPISGSNVASSSSMSAATPAKPFWEVLSSLKNYIPILKRIPRGARISVAQSLSFAIRNAVTQNSKQAWEHLLSFPYNVLYVHSDPSNKKSLTTRVKENCVKYKVSEENLLGLANIIPPKRRNNQNSKKSDDSVTFKLVENKMSDGDIKGAARVLFSSDTIAPHTLETIQSLRDKHPPAAANLHLPEPPQPDDVAIDVQTQEIATAVASFQSGSAGGLDGLTPQHLKDLLSFSSGEVGETLLKDLTALVNLMLSGRVNSDVIEILYGANLCALIKKDGGIRPIAVGTTYRRLAAKAGCRQKVALLSSLFQPIQLGFGSRGGCEAAVHSLRTFLDQNCGEVLLKVDVKNAFNSVDRGALLTQIKDKIPDVFNFLWQCYGNPTKLTYQNNVLLSSVGCQQGDPFGPAIFSLAIHPIIQRLQSKLNVWYLDDGTLGGDVSTVLNDLQILIDEFRLIGLELNFSKCELYVCDSCPNKDLVIAKFNYLAPNIKSVDRCSLRLLGSPILDESFSPFVEEKIQNFMSASRRLLNINAHMAFTIIKYCLFVPKFIYTLRCSPLWKHGELLSSLDNVVKETLISVLNVDMNDRTWSQASLPVRLGGLGIRKISSVALPAFLSSVHSTHKLIEKILLPSLGHSGVVVAHLNEAKNVWREACPNTDFPRTLSSQRLWDGPICELARKSLLDTCTSVADRARILAVSVWESGLWLQAIPSFNTGSLLDPTAFRLAVSLRLGARCCEAHRCQCGTVVDQLGHHGLSCSRSAGRIGRHASLNDVIRRALSTANVAAVLEPSGLARDDGKRPDGMTLVPWKMGRPLVWDATCVDTLAPSHLPETQSRAGAAANSAERHKRRKYANLGRGYIFEPFGVETLGPWGPGAHHLFKNISERLVDATRDQNAGVYLAQRISIAIQRGNAASMLGTLPTGSGFEHLDCL

SEQ ID NO: 19101 - protein, 786 aa, Erannis defoliaria
MSDGDIKGAARVLFSSDTIAPHTLETIQSLRDKHPPAAANLHLPEPPQPDDVAIDVQTQEIATAVASFQSGSAGGLDGLTPQHLKDLLSFSSGEVGETLLKDLTALVSLMLSGRVNSDVIEILYGANLCALIKKDGGIRPIAVGTTYRRLAAKAGCRQKVALLSSLFQPIQLGFGSRGGCEAAVHSLRTFLDQNCGEVLLKVDVKNAFNSVDRGALLTQIKDKIPDVFNFLWQCYGNPTKLTYQNNVLLSSVGCQQGDPFGPAIFSLAIHPIIQRLQSKLNVWYLDDGTLGGDVSTVLNDLQILIDEFRLIGLELNFSKCELYVCDSCPNKDLVIAKFNDLAPNIKSVDRCSLRLLGSPILDESFSPFVEEKIQNFMSASRRLLNINAHMAFTIIKYCLFVPKFIYTLRCSPLWKHGELLSSLDNVVKETLISVLNVDMNDRTWSQASLPVRLGGLGIRKISSVALPAFLSSVHSTHKLIEKILLPSLGHSGVVVAHLNEAKNVWREACPNTDFPRTLSSQRLWDGPICELARKSLLDTCTSVADRARILAVSVWESGLWLQAIPSFNTGSLLDPTAFRLAVSLRLGARCCEAHRCQCGTVVDQLGHHGLSCSRSAGRIGRHASLNDVIRRALSTANVAAVLEPSGLARDDGKRPDGMTLVPWKMGRPLVWDATCVDTLAPSHLPETQSRAGAAANSAERHKRRKYANLGRGYIFEPFGVETLGPWGPGAHHLFKNISERLVDATRDQNAGVYLAQRISIAIQRGNAASMLGTLPTGSGFEHLDCL

SEQ ID NO: 19102 - protein, 984 aa, Erannis defoliaria
MASSTPSGRNAVSKINVVSQQDMIQCTECPQAKFFKGQKGLKIHKTRCHKIHEIPLSAPISGSNVASSSSMNTATPAKPFWEVLSSLKNSIPILKRIPRGARISVAQSLSFAIRNAVTQNSKQAWEHLLSFPYNVLYVHSDPSNKKSLTTRVKENCVKYKVSEENLLGLANIIPPKRRNNQNSKKSDDSVTFKLVENKMSDGDIKGAARVLFSSDTIAPHTLETVQSLRDKHPPAAANLHLPEPPQPDDVAIDVQTQEIATAVASFQSGSAGGLDGLTPQHLKDLLSFSSGGVGETLLKDLTALVSLMLSGRVNSDVIEILYGANLCALIKKDGGIRPIAVGTTYRRLAAKAGCRQKVALLSSLFQPIQLGFGSRGGCEAAVHSLRTFLDQNCGEVLLKVDVKNAFNSVDRGALLTQIKDKIPDVFNFLWQCYGNPTKLTYQNNVLLSSVGCQQGDPFGPAIFSLAIHPIIQRLQSKLNVWYLDDGTLGGDVSTVLNDLQILIDEFRLIGLELNFSKCELYVCDSCPNKDLVIAKFNDLAPNIKSVDRCSLRLLGSPILDESFSPFVEEKIQNFMSASRRLLNINAHMAFTIIKYCLFVPKFIYTLRCSPLWKHGELLSSLDNVVKETLISVLNVDMNDRTWSQASLPVRLGGLGIRKISSVALPAFLSSVHSTHKLIEKILLPSLGHSGVVVAHLNEAKNVWREACPNTDFPRTLSSQRLWDGPICELARKSLLDTCTSVADRARILAVSVWESGLWLQAIPSFNTGSLLDPTAFRLAVSLRLGARCCEAHRCQCGTAVDQLGHHGLSCSRSAGRIGRHASLNDVIRRALSTANVAAVLEPSGLARDDGKRPDGMTLVPWKMGRPLVWDATCVDTLAPSHLPETQSRAGAAANSAERHKRRKYANLGRGYIFEPFGVETLGPWGPGAHHLFKNISERLVDATRDQNAGVYLAQRISIAIQRGNAASMLGTLPTGSGFEHLDCL

SEQ ID NO: 19103 - protein, 984 aa, Erannis defoliaria
MASSTPSGRNAVSKINVVSQQDMIQCTECPQAKFFKGQKGLKIHKTRCHKIHEIPLSAPISGSNVASSSSMSAATPAKPFWEVLSSLKNSIPILKRIPRGARISVAQSLSFAIRNAVTQNSKQAWEHLLSFPYNVLYVHSDPSNKKSLTTRVKENCVKYKVSEENFLGLANIIPPKRRNNQNSKKSDDSVTFKLVENKMSDGDIKGAARVLFSSDTIAPHTLETIQSLRDKHPPAAANLHLPEPPQPDDVAIDVQTQEIATAVASFQSGSAGGLDGLTPQHLKDLLSFSSGEVGETLLKDLTALVSLMLSGRVNSDVIEILYGANLCALIKKDGGIRPIAVGTTYRRVAAKAGCRQKVALLSSLFQPIQLGFGSRGGCEAAVHSLRTFLDQNCGEVLLKVDVKNAFNSVDRGALLTQIKDKIPDVFNFLWQCYGNPTKLTYQNNVLLSSVGCQQGDPFGPAIFSLAIHPIIQRLQSKLNVWYLDDGTLGGDVSTVLNDLQILIDEFRLIGLELNFSKCELYVCDSCPNKDLVIAKFNDLAPNIKSVDRCSLRLLGSPILDESFSPFVEEKIQNFMSASRRLLNINAHMAFTIIKYCLFVPKFIYTLRCSPLWKHGELLSSLDNVVKETLISVLNVDMNDRTWSQASLPVRLGGLGIRKISSVALPAFLSSVHSTHKLIEKILLPSLGHSGVVVAHLNEAKNVWREACPNTDFPRTLSSQRLWDGPICELARKSLLDTCTSVADRARILAVSVWESGLWLQAIPSFNTGSLLDPTAFRLAVSLRLGARCCEAHRCQCGTVVDQLGHHGLSCSRSAGRIGRHASLNDVIRRALSTANVAAVLEPSGLARDDGKRPDGMTLVPWKMGRPLVWDATCVDTLAPSHLPETQSRAGAAANSAERHKRRKYANLGRGYIFEPFGVETLGPWGPGAHHLFKNISERLVDATRDQNAGVYLAQRISIAIQRGNAASMLGTLPTGSGFEHLDCL

SEQ ID NO: 19104 - protein, 984 aa, Erannis defoliaria
MASSTPSGRNAVSKINVVSQQDMIQCTECPQAKYFKGQKGLKIHKTRCHKIHEIPLSAPISGSNVASSSSMSAATPAKPFWEVLSSLKNSIPILKRIPRGARISVAQSLSFAIRNAVTQNSKQAWEHLLSFPYNVLYVHSDPSNKKSLTTRVKENCVKYKVSEENLLGLANIIPPKRRNNQNSKKSDDSVTFKLVENKMSDGDIKGAARVLFSSDTIAPHTLETIQSLRDKHPPAAANLHLPEPPQPDDVAIDVQTQEIATAVASFQSGSAGGLDGLTPQHLKDLLSFSSGEVGETLLKDLTALVNLMLSGRVNSDVIEILYGANLCALIKKDGGIRPIAVGTTYRRLAAKAGCRQKVALLSSLFQPIQLGFGSRGGCEAAVHSLRTFLDQNCGEVLLKVDVKNAFNSVDRGALLTQIKDKIPDVFNFLWQCYGNPTKLTYQNNVLLSSVGCQQGDPFGPAIFSLAIHPIIQRLQSKLNVWYLDDGTLGGDVSTVLNDLQILIDEFRLIGLELNFSKCELYVCDSCPNKDLVIAKFNDLAPNIKSVDRCSLRLLGSPILDESFSPFVEEKIQNFMSASRRLLNINAHMAFTIIKYCLFVPKFIYTLRCSPLWKHGELLSSLDNVVKETLISVLNVDMNDRTWSQASLPVRLGGLGIRKISSVALPAFLSSVHSTHKLIEKILLPSLGHSGVVVAHLNEAKNVWREACPNTDFPRTLSSQRLWDGPICELARKSLLDTCTSVADRARILAVSVWESGLWLQAIPSFNTGSLLDPTAFRLAVSLRLGARCCEAHRCQCGTVVDQLGHHGLSCSRSAGRIGRHASLNDVIRRALSTANVAAVLEPSGLARDDGKRPDGMTLVPWKMGRPLVWDATCVDTLAPSHLPETQSRAGAAANSAERHKRRKYANLGRGYIFGPFGVETLGPWGPGAHHLFKNISERLVDATRDQNAGVYLAQRISIAIQRGNAASMLGTLPTGSGFEHLDCL

SEQ ID NO: 19105 - protein, 984 aa, Erannis defoliaria
MASSTPSGRNAVSKINLVSQQDMIQCTECPQAKFFKGQKGLKIHKTRCHKIHEIPLSAPISGSNVASSSSMSAATPAKPFWEVLSSLKNSIPILKRIPRGARISVAQSLSFAIRNAVTQNSKQAWEHLLSFPYNVLYVHSDPSNKKSLTTRVKENCVKYKVSEENFLGLANIIPPKRRNNQNSKKSDDSVTFKLVENKMSDGDIKGAARVLFSSDTIAPHTLETIQSLRDKHPPAAANLHLPEPPQPDDVAIDVQTQEIATAVASFQSGSAGGLDGLTPQHLKDLLSFSSGEVGETLLKDLTALVSLMLSGRVNSDVIEILYGANLCALIKKDGGIRPIAVGTTYRRLAAKAGCRQKVALLSSLFQPIQLGFGSRGGCEAAVHSLRTFLDQNCGEVLLKVDVKNAFNSVDRGALLTQIKDKIPDVFNFLWQCYGNPTKLTYQNNVLLSSVGCQQGDPFGPAIFSLAIHPIIQRLQSKLNVWYLDDGTLGGDVSTVLNDLQILIDEFRLIGLELNFSKCELYVCDSCPNKDLVIAKFNDLAPNNKSVDRCSLRLLGSPILDESFSPFVEEKIQNFMSASRRLLNINAHMAFTIIKYCLFVPKFIYTLRCSPLWKHGELLSSLDNVVKETLISVLNVDMNDRTWSQASLPVRLGGLGIRKIASVALPAFLSSVHSTHKLIEKILLPSLGHSGVVVAHLNEAKNVWREACPNTDFPRTLSSQRLWDGPICELARKSLLDTCTSVADRARILAVSVWESGLWLQAIPSFNTGSLLDPTAFRLAVSLRLGARCCEAHRCQCGTVVDQLGHHGLSCSRSAGRIGRHASLNDVIRRALSTANVAAVLEPSGLARDDGKRPDGMTLVPWKMGRPLVWDATCVDTLAPSHLPETQSRAGAAANSAERHKRRKYANLGRGYIFEPFGVETLGPWGPGAHHLFKNISERLVDATRDQNAGVYLAQRISIAIQRGNAASMLGTLPTGSGFEHLDCL

SEQ ID NO: 19106 - protein, 984 aa, Erannis defoliaria
MASSTPSGRNAVSKINVVSQQDMIQCTECPQAKFFKGQKGLKIHKTRCHKIHEIPLSAPISGSNVASSSSMSTATPAKPFWEVLSSLKNSIPILKRIPRGARISVAQSLSFAIRNAVTQNSKQAWEHLLSFPYNVLYVHSDPSNKKSLTTRVKENCVKYKVSEENLLGLANIIPPKRRNNQNSKKSDDSVTFKLVENKMSDGDIKGAARVLFSSDTIAPHTLETVQSLRDKHPPAAANLHLPEPPQPDDVAIDVQTQEIATAVASFQSGSAGGLDGLTPQHLKDLLSFSSGEVGETLLKDLTALVSLMLSGRVNSDVIEILYGANLCALIKKDGGIRPIAVGTTYRRLAAKAGCRQKFALLSSLFQPIQLGFGSRGGCEAAVHSLRTFLDQNCGEVLLKVDVKNAFNSVDRGALLTQIKDKIPDVFNFLWQCYGNPTKLTYQNNVLLSSVGCQQGDPFGPAIFSLAIHPIIQRLQSKLNVWYLDDGTLGGDVSTVLNDLQILIDEFRLIGLELNFSKCELYVCDSCPNKDLVIAKFNDLAPNIKSVDRCSLRLLGSPILDESFSPFVEEKIQNFMSASRRLLNINAHMAFTIIKYCLFVPKFIYTLRCSPLWKHGELLSSLDNVVKETLISVLNVDMNDRTWSQASLPVRLGGLGIRKISSVALPAFLSSVHSTHKLIEKILLPSLGHSGVVVAHLNEAKNVWREACPNTDFPRTLSSQRLWDGPICELARKSLLDTCTSVADRARILAVSVWESGLWLQAIPSFNTGSLLDPTAFRLAVSLRLGARCCEAHRCQCGTAVDQLGHHGLSCSRSAGRIGRHASLNDVIRRALSTANVAAVLEPSGLARDDGKRPDGMTLVPWKMGRPLVWDATCVDTLAPSHLPETQSRAGAAANSAERHKRRKYANLGRGYIFEPFGVETLGPWGPGAHHLFKNISERLVDATRDQNAGVYLAQRISIAIQRGNAASMLGTLPTGSGFEHLDCL

SEQ ID NO: 19107 - protein, 984 aa, Erannis defoliaria
MASSTPSGRNAVSKINVVSQQDMIQCTECPQAKFFKGQKGLKIHKTRCHKIHEIPLSAPISGSNVASSSSMSAATPAKPFWEVLSSLKNSIPILKRIPRGARISVAQSLSFAIWNAVTQNSKQAWEHLLSFPYNVLYVHSDPSNKKSLTTRVKENCVKYKVSEENLLGLANIIPPKRRNNQNSKKSDDSVTFKLVENKMSDGDIKGAARVLFSSDTIAPHTLETIQSLRDKHPPAAANLHLPEPPQPDDVAIDVQTQEIATAVASFQSGSAGGLDGLTPQHLKDLLSFSSGEVGETLLKDLTALVNLMLSGRVNSDVIEILYGANLCALIKKDGGIRPIAVGTTYRRLAAKAGCRQKVALLSSLFQPIQLGFGSRGGCEAAVHSLRTFLDQNCGEVLLKVDVKNAFNSVDRGALLTQIKDKIPDVFNFLWQCYGNPTKLTYQNNVLLSSVGCQQGDPFGPAIFSLAIHPIIQRLQSKLNVWYLDDGTLGGDVSTVLNDLQILIDEFRLIGLELNFSKCELYVCDSCPNKDLVIAKFNDLAPNIKSVDRCSLRLLGSPILDESFSPFVEEKIQNFMSASRRLLNINAHMAFTIIKYCLFVPKFIYTLRCSPLWKHGELLSSLDNVVKETLISVLNVDMNDRTWSQASLPVRLGGLGIRKISSVALPAFLSSVHSTHKLIEKILLPSLGHSGVVVAHLNEAKNVWREACPNTDFPRTLSSQRLWDGPICELARKSLLDTCTSVADRARILAVSVWESGLWLQAIPSFNTGSLLDPTAFRLAVSLRLGARCCEAHRCQCGTVVDQLGHHGLSCSRSAGRIGRHASLNDVIRRALSTANVAAVLEPSGLARDDGKRPDGMTLVPWKMGRPLVWDATCVDTLAPSHLPETQSRAGAAANSAERHKRRKYANLGRGYIFEPFGVETLGPWGPGAHHLFKNISERLVDATRDQNAGVYLAQRISIAIQRGNAASMLGTLPTGSGFEHLDCL

SEQ ID NO: 19108 - protein, 984 aa, Erannis defoliaria
MASSTPSGRNAVSKINVVSQQDMIQCTECPQAKFFKGQKGLKIHKTRCHKIHEIPLSDPISGSNVASSSSMSAATPAKPFWEVLSSLKNSIPILKRIPRGARISVAQSLSFAIRNAVTQNSKQAWEHLLSFPYNVLYVHSDPSNKKSFTTRVKENCVKYKVSEENLLGLANIIPPKRRNNQNSKKSDDSVTFKLVENKMSDGDIKGAARVLFSSDTIAPHTLETIQSLRDKHPPAAANLHLPEPPQPDDVAIDVQTQEIATAVASFQSGSAGGLDGLTPQHLKDLLSFSSGEVGETLLKDLTALVSLMLSGRVNSDVIEILYCANLCALIKKDGGIRPIAVGTTYRRLAAKAGCRQKVALLSSLFQPIQLGFGSRGGCEAAVHSLRTFLDQNCGEVLLKVDVKNAFNSVDRGALLTQIKDKIPDVFNFLWQCYGNPTKLTYQNNVLLSSVGCQQGDPFGPAIFSLAIHPIIQRLQSKLNVWYLDDGTLGGDVSTVLNDLQILIDEFRRIGLELNFSKCELYVCDSCPNKDLVIAKFNDLAPNIKSVDRCSLRLLGSPILDESFSPFVEEKIQNFMSASRRLLNINAHMAFTIIKYCLFVPKFIYTLRCSPLWKHGELLSSLDNVVKETLISVLNVDMNDRTWSQASLPVRLGGLGIRKISSVALPAFLSSVHSTHKLIEKILLPSLGHSGVVVAHLNEAKNVWREACPNTDFPRTLSSQRLWNGPICELARKSLLDTCTSVADRARILAVSVWESGLWLQAIPSFNTGSLLDPTAFRLAVSLRLGARCCEAHRCQCGTAVDQLGHHGLSCSRSAGRIGRHASLNDVIRRALSTANVAAVLEPSGLARDDGKRPDGMTLVPWKMGRPLVWDATCVDTLAPSHLPETQSRAGAAANSAERHKRRKYANLGRGYIFEPFGVETLGPWGPGAHHLFKNISERLVDATRDQNAGVYLAQRISIAIQRGNAASMLGTLPTGSGFEHLDCL

SEQ ID NO: 19109 - protein, 984 aa, Erannis defoliaria
MASSTPSGRNAVSKINVVSQQDMIQCTECPQAKFFKGQKGLKIHKTRCHKIHEIPLSAPISGSNVASSSSMSAATPAKPFWEVLSSLKNSIPILKRIPRGARISVAQSLSFAIRNAVTQNSKQAWEHLLSFPYNVLYVHSDPSNKKSLTTRVKENCVKYKVSEENLLGLANIIPPKRRNNQNSKKSDDSVTFKLVENKMSDGDIKGAARVLFSSDTIAPHTLETIQSLRDKHPPAAANLHLPEPPQPDDVAIDVQTQEIATAVASFQSGSAGGLDGLTPQHLKDLLSFSSGEVGETLLKDLTALVSLMLSGRVNSDVIEILYGANLCALIKKDGGIRPIAVGTTYRRLAAKAGCRQKVALLSSLFQPIQLGFGSRGGCEAAVHSLRTFLDQNCGEVLLKVDVKNAFNSVDRGALLTQIKDKIPDVFNFLWQCYGNPTKLTYQNNVLLSSVGCQQGDPFGPAIFSLAIHPIIQRLQSKLNVWYLDDGTLGGDVSTVLNDLQILIDEFRLIGLELNFSKCELYVCDSCPNKDLVIAKFNDLAPNIKSVDRCSLRLLGSPILDESFSPFVEEKIQNFMSASRRLLNINAHMAFTIIKYCLFVPKFIYTLRCSPLWKHGELLSSLDNVVKETLISVLNVDMNDRTWSQASLPVRLGGLGIRKISSVALPAFLSSVHSTHKLIEKILLPSLGHSGVVVAHLNEAKNVWREACPNTDFPRTLSSQRLWDGPICELARKSLLDTCTSVADRARILAVSVWESGLWLQAIPSFNTGSLLDPTAFRLAVSLRLGARCCEAHRCQCGTVVDQLGHHGLSCSRSAGRIGRHASLNDVIRRALSTANVAAVLEPSGLARDDGKRPDGMTLVPWKMGRPLVWDATCVDTLAPSHLPETQSRAGAAANSAERHKRRKYANLGRGYIFEPFGVETLGPWGPGAHHLFKNISERLVDSTRDQNAGVYLAQRISIAIQRGNAASMLGTLPTGSGFEHLDCL

SEQ ID NO: 19110 - protein, 962 aa, Erannis defoliaria
MIQCTECPQAKFFKGQKGLKIHKTRCHKIHEIPLSAPISGSNVASSSSMSAATPAKPFWEVLSSLKNSIPILKRIPRGARISVAQSLSFAIRNAVTQNSKQAWEHLLSFPYNVLYVHSDPSNKKSLTTRVKENCVKYKVSEENLLGLANIIPPKRRNNQNSKKSDDSVTFKLVENKMSDGDIKGAARVLFSSDTIAPYTLETIQSLRDKHPPAAANLHLPEPPQPDDVAIDVQTQEIATAVSSFQSGSAGGLDGLTPQHLKDLLSFSSGEVGETLLKDLTALVSLMLSGRVNSDVIEILYGANLCALIKKDGGIRPIAVGTTYRRLAAKAGCRQKVALLSSLFQPIQLGFGSRGGCEAAVHSLRTFLDQNCGEVLLKVDVKNAFNSVDRGALLTQIKDKIPDVFNFLWQCYGNPTKLTYQNNVLLSSVGCQQGDPFGPAIFSLAIHPIIQRLQSKLNVWYLDDGTLGGDVSTVLNDLQILIDEFRLIGLELNFSKCELYVCDSCPNKDLVIAKFNDLAPNIKSVDRCSLRLLGSPILDESFSPFVEEKILNFMSASRRLLNINAHMAFTIIKYCLFVPKFIYTLRCSPLWKHGELLSSLDNVVKETLISVLNVDMNDRTWSQASLPVRLGGLGIRKISSVALPAFLSSVHSTHKLIEKILLPSLGHSGVVVAHLNEAKNVWREACPNTDFPRTLSSQRLWDGPICELARKSLLDTCTSVADRARILAVSVWESGLWLQAIPSFNTGSLLDPTAFRLAVSLRLGARCCEAHRCQCGTVVDQLGHHGLSCSRSAGRIGRHASLNDVIRRALSTANVAAVLEPSGLARDDGKRPDGMTLVPWKMGRPLVWDATCVDTLAPSHLPETQSRAGAAANSAERHKRRKYANLGRGYIFEPFGVETLGPWGPGAHHLFKNISKRLVDATRDQNAGVYLAQRISIAIQRGNAASMLGTLPTGSGFEHLDCL

SEQ ID NO: 19111 - protein, 996 aa, Erannis defoliaria
MASSTPSGRNAVSKINVVSQQDMIQCTECPQAKFFKGHKGLKIHKTRCHKIHEIPLSALISGSNVASSSSMSTATPAKPFWEVLSSLKNSIPILKRIPRGARISVAQSLSFAIRNAVTQNSKQAWEHLLSFPYNVLYVHSDPSNKKSLTTRVKENCVKYKVSEENLLGLANIIPPKRRNNQNSKKSDDSVTFKLVENKMSDGDNDVICFTSMDGDIKGAARVLFSSDTIAPHTLETVQSLRDKHPPAAANLHLPEPPQPDDVAIDVQTQEIATAVASFQSGSAGGPDGLTPQHLKDLLSFSSGEVGETLLKDLTALVSLMLSGRVNSDVIEILYGANLCALIKKDGGIRPIAVGTTYRRLAAKAGCRQKVALLSSLFQPIQLGFGSRGGCEAAVHSLRTFLDQNCGEVLLKVDVKNAFNSVDRGALLTQIKDKIPDVFNFLWQCYGNPTKLTYQNNVLLSSIGCQQGDPFGPAIFSLAIHPIIQRLQSKLNVWYLDDGTLGGDVSTVLNDLQILIDEFRLIGLELNFSKCELYVCDSCPNKDLVIAKFNDLAPNIKSVDRCSLRLLGSPILDESFSPFVEEKIQNFMSASRRLLNINAHMAFTIIKYCLFVPKFIYTLRCSPLWKHGELLSSLDNVVKETLISVLNVDMNDRTWSQASLPVRLGGLGIRKISSVALPAFLSSVHSTHNLIEKILLPSLGHSGVVVAHLNEAKNVWREACPNTDFPRTLSSQRLWDGPICELARKSLLDTCTSVADRARILAVSVWESGLWLQAIPSFNIGSLLDPTAFRLAVSLRLGARCCEAHRCQCGTAVDQLGHHGLSCSRSAGRIGRHTSLNDVIRRALSTANVAAVLEPSGLARDDGKRPDGMTLVPWKMGRPLVWDATCVDTLAPSHLPGTQSRAGAAANSAERHKRRKYANLGRGYIFEPFGVETLGPWGPGAHHLFKNISERLVDATRDQNAGVYLAQRISIAIQRGNDASMLGTLPTGSGFEHLDCL

SEQ ID NO: 19112 - protein, 984 aa, Erannis defoliaria
MASSTPSGRNAVSKINVVSQQDMIQCTECPQAKFFKGQKGLKIHKTRCHKIHEIPLSAPISGSNVASSSSMSAATPAKPFWEVLSSLKNSIPILKRIPRGARISVAQSLSFAIRNAVTQNSKQAWEHLLSFPYNVLYVHSDPSNKKSLTTRVKENCVKYKVSEENLLGLANIIPPKRRNNQNSKKSDDSVTFKLVENKMSDGDIKGAARVLFSSDTIAPHTLETIQSLRDKHPPAAANLHLPEPPQPDDVVIDVQTQEIATAVASFQSGSAGGLDGLTPQHLKDLLSFSSGEVGETLLKDLTALVNLMLSGRVNSDVIEILYGANLCALIKKDGGIRPIAVGTTYRRLAAKAGCRQKVALLSSLFQPIQLGFGSRGGCEAAVHSLRTFLDQNCGEVLLKVDVKNAFNSVDRGALLTQIKDKIPDVFNFLWQCYGNPTKLTYQNNVLLSSVGCQQGDPFGPAIFSLAIHPIIQRLQSKLNVWYLDDGTLGGDVSTVLNDLQILIDEFRLIGLELNFSKCELYVCDSCPNKDLVIAKFNDLAPNIKSVDRCSLRLLGSPILDESFSPFVEEKIQNFMSASRRLLNINAHMAFTIIKYCLFVPKFIYTLRCSPLWKHGELLSSLDNVVKETLISVLNVDMNDRTWSQASLPVRLGGLGIRKISSVALPAFLSSVHSTHKLIEKILLPSLGHSGVVVAHLNEAKNVWREACPNTDFPRTLSSQRLWDGPICELARKSLLDTCTSVADRARILAVSVWESGLWLQAIPSFNTGSLLDPTAFRLAVSLRLGARCCEAHRCQCGTVVDQLGHHGLSCSRSAGRIGRHASLNDVIRRALSTANVAAVLEPSGLARDDGKRPDGMTLVPWKMGRPLVWDATCVDTLAPSHLPETQSRAGAAANSAERHKRRKYANLGRGYIFEPFGVETLGPWGPGAHHLFKNISERLVDATRDQNAGVYLAQRISIAIQRGNAASMLGTLPTGSGFEHLDCL

SEQ ID NO: 19113 - protein, 936 aa, Erannis defoliaria
MFSYFSHISAPISGSNVASSSSMSTATPAKPFWEVLSSLKNSIPILKRIPRGARISVAQSLSFAIRNAVTQNSKQAWEHLLSFPYNVLYVHSDPSNKKSLTTRVKKNCVKYKVSEENLLGLANIIPPKRRNNQNSKKSDDSVTFKLVENKMSDGDIKGAARVLFSSDTIAPHTLETVQSLRDKHPPAAANLHLPEPPQPDDVAIDVQTQEIATAVASFQSGSAGGLDGLTPQHLKDLLSFSSGEVGETLLKDLTALVSLMLSGRVNSDVIEILYGANLCALIKKDGGIRPIAVGTTYRRLAAKAGCRQKVALLSSLFQPIQLGFGSRGGCEAAVHSLRTFLDQNCGEVLLKVDVKNAFNSVDRGALLTQIKDKIPDVFNFLWQCYGNPTKLTYQNNVLLSSVGCQQGDPFGPAIFSLAIHPIIQRLQSKLNVWYLDDGTLGGDVSTVLNDLQILIDEFRLIGLELNFSKCELYVCDSCPNKDLVIAKFNDLAPNIKSVDRCSLRLLGSPILDESFSPFVEEKIQNFMSASRRLLNINAHMAFTIIKYCLFVPKFIYTLRCSPLWKHGELLSSLDNVVKETLISVLNVDMNDRTWSQASLPVRLGGLGIRKISSVALPAFLSSVHSTHKLIEKILLPSLGHSGVVVAHLNEAKNVWREACPNTDFPRTLSSQRLWDGPICELARKSLLDTCTSVADRARILAVSVWESGLWLQAIPSFNTGSLLDPTAFRLAVSLRLGARCCEAHRCQCGTAVDQLGHHGLSCSRSAGRIGRHASLNDVIRRALSTANVAAVLEPSGLARDDGKRPDGMTLVPWKMGRPLVWDATCVDTLAPSHLPETQSRAGAAANSAERHKRRKYANLGRGYIFEPFGVETLGPWGPGAHHLFKNISERLVDATRDQNAGVYLAQRISIAIQRGNAASMLGTLPTGSGFEHLDCL

SEQ ID NO: 19114 - protein, 984 aa, Erannis defoliaria
MASSTPSGRNAVSKINVVSQQDMIQCTECPQAKFFKGQKGLKIHKTRCHKIHEIPLSAPISGSNVASSSSMSAATPAKPFWEVLSSLKNSIPILKRIPRGARISVAQSLSFAIRNAVTQNSKQAWEHLLSFPYNVLYVHSDPSNKKSLTTRVKENCVKYKVSEENLLGLANIIPPKRRNNQNSKKSDDSVTFKLVENKMSDGDIKGAARVLFSSDTIAPHTLETIQSLRDKHPPAAANLHLPEPPQPDDVAIDVQTQEIATAVASFQSGSAGGLDGLTPQHLKDLLSFSSGEVGETLLKDLTALVSLMLSGRVNSDVIEILYGANLCALIKKDGGIRPIAVGTTYRRLAAKAGCRQKVALLSSLFQPIQLGFGSRGGCEAAVHSLRTFLDQNCGEVLLKVDVKNAFNSVDRGALLTQIKDKIPDVFNFLWQCYGNPTKLTYQNNVLLSSVGCQQGDPFGPAIFSLAIHPIIQRLQSKLNVWYLDDGTLGGDVSTVLNDLQILIDEFRLIGLELNFSKCELYVCDSCPNKDLVIAKFNDLAPNIKSVDRCSLRLLGSPILDESFSPFVEEKIQNFMSASRRLLNINAHMAFTIIKYCLFVPKFIYTLRCSPLWKHGELLSSLDNVVKETLISVLNVDMNDRTWSQASLPVRLGGLGIRKISSVALPAFLSSVHSTHKLIEKILLPSLGHSAVVVAHLNEAKNVWREACPNTDFPRTLSSQRLWDGPICELARKSLLDTCTSVADRARILAVSVWESGLWLQAIPSFNTGSLLDPTAFRLAVSLRLGARCCEAHRCQCGTVVDQLGHHGLSCSRSAGRIGRHASLNDVIRRALSTANVAAVLEPSGLARDDGKRPDGMTLVPWKMGRPLVWDATCVDTLAPSHLPETQSRAGAAANSAERHKRRKYANLGRGYIFEPFGVETLGPWGPGAHHLFKNISERLVDATRDQNAGVYLAQRISIAIQRGNAASMLGTLPTGSGFEHLDCV

SEQ ID NO: 19115 - protein, 996 aa, Peribatodes rhomboidaria
MFIWTLFLIVFFLYVTYKLKKSRAMPLCAQTANDFGGTSVSQETLVRCPDCSLDRFFKGPRGLKIHQGKCHKPIILSAPNSNQDIDLNIPSATQPFWKFLAFNKNNNPVVKRIPRGARLSVATALSHAIKAVVLQNSVESWEHLLSFPYAVLHVSTESKNAKKSLTSLIKENCVKYSTQGNLSNIFSSGFNSDSKFQNPKFSVRPSAAFANCKLVESKLGDGDIKGAARILFSTDTVAPPNSETLSILEGKHPHPDAALPLPDAPVESDITVEVTALDVGGAVISFQSGSAGGLDGLSPQHLKDLLSGACGEVGEALLRDLTALTNLMLSGRVNGDITELLYGANLCALKKKDGGIRPIAVGTTYRRLAAKICCKKVAPVLANLFQPLQLGFGSRGGCEAAVHSVRTFLSENCGDLLLKVDVKNAFNSVDRGTLLSQVKDKIPNLYGFLWQCYGSASKLTYHGNEIISAVGCQQGDPLGPAVFSLAIHPIIQSLQSKLNVWYLDDGTLGGDANTLYDDLNLLISRFRTIGLELNFSKCELFIPERHPAKDSVIQKFNILAPNIKIVSNSTLRLLGSPIFDESFPSFIEEKIQNFLQCSDRLSKINMHMAFTIIRFCLFVPKFTYLVRCCQLWKHPDLLQRLDNIIRNTLATVLNINLKDRDWSQASLPVRWGGLGIRSISGVALPAFLSSVHSNQKLISKILSKNVDVLFLAEAKNAWNLACPNTDFPSTPSSQRLWDGPICEQVRKQLLHTCLSSSDRARLLAVAEWESGLWLQALPSANTGTLLDSSSFRISASLRLGASCYAPHRCQCGAAVDQLGHHGLSCVRSAGRIPRHASLNDVIRRAFTTANCAAVLEPSGLVRDDGRRPDGMTLIPWKLGRPLVWDATCVDTLAPSHLPGTQNKAGAAAESAEGLKRRKYSTLDSGYIFEPFGVETLGPWGPGARTIYKDLSLRLVEATRDQNAGRYFAQRISIAIQRGNAASILGTLPTAGSDLLD

SEQ ID NO: 19116 - protein, 996 aa, Peribatodes rhomboidaria
MFIWTLFLIVFFLYVTYKLKKSRAMPLCAQTANDFGGTSVSQETLVRCPDCSLDRFFKGPRGLKIHQGKCHKPIILSAPNSNQDIDLNIPSATQPFWKFLAFNKNNNPVVKRIPRGARLSVATALSHAIKAVVLQNSVESWEHLLSFPYAVLHVSTESKNAKKSLTSLIKENCVKYSTQGNLSNIFSSGFNSDSKFQNPKFSVRPSAAFANCKLVESKLGDGDIKGAACILFSTDTVAPPNSETLSILEGKHPHPDAALPLPDAPVESDITVEVTALDVGGAVISFQSGSAGGLDGLSPQHLKDLLSGACGEVGEALLRDLTALTNLMLSGRVNGDITELLYGANLCALKKKDGGIRPIAVGTTYRRLAAKICCKKVAPVLANLFQPLQLGFGSRGGCEAAVHSVRTFLSENCGDLLLKVDVKNAFNSVDRGTLLSQVKDKIPNLYGFLWQCYGSASKLTYHGNEIISAVGCQQGDPLGPAVFSLAIHPIIQSLQSKLNVWYLDDGTLGGDANTLYDDLNLLISRFRTIGLELNFSKCELFIPERHPAKDSVIQKFNILAPNIKIVSNSTLRLLGSPIFDESFPSFIEEKIQNFLQCSDRLSKINMHMAFTIIRFCLFVPKFTYLVRCCQLWKHPDLLQRLDNIIRNTLATVLNINLKDRDWSQASLPVRWGGLGIRSISGVALPAFLSSVHSNQKLISKILSKNVDVLFLAEAKNAWNLACPNTDFPSTPSSQRLWDGPICEQVRKQLLHTCLSSSDRARLLAVAEWESGLWLQALPSANTGTLLDSSSFRISASLRLGASCYAPHRCQCGAAVDQLGHHGLSCVRSAGRIPRHASLNDVIRRAFTTANCAAVLEPSGLVRDDGRRPDGMTLIPWKLGRPLVWDATCVDTLAPSHLPGTQNKAGAAAESAEGLKRRKYSTLDSGYIFEPFGVETLGPWGPGARTIYKDLSLRLVEATRDQNAGRYFAQRISIAIQRGNAASILGTLPTAGSDLLD

SEQ ID NO: 19117 - protein, 996 aa, Peribatodes rhomboidaria
MFIWTLFLIVFFLYVTYKLKKSRAMPLCAQTANDFGGTSVSQETLVRCPDCSLDRFFKGPRGLKIHQGKCHKPIILSAPNSNQDIDLNIPSATQPFWKFLAFNKNNNPVVKRIPRGARLSVATALSHAIKAVVLQNSVESWEHLLSFPYAVLHVSTESKNAKKSLTSLIKENCVKYSTQGNLSNIFSSGFNSDSKFQNPKFSVRPSAAFANCKLVESKLGDGDIKGAACILFSTDTVAPPNSETLSILEGKHPHPDAALPLPDAPVESDITVEVTALDVGGAVISFQSGSAGGLDGLSPQHLKDLLSGACGEVGEALLRDLTALTNLMLSGRVNGDITELLYGANLCALKKKDGGIRPIAVGTTYRRLAAKICCKKVAPVLANLFQPLQLGFGSRGGCEAAVHSVRTFLSKNCGDLLLKVDVKNAFNSVDRGTLLSQVKDKIPNLYGFLWQCYGSASKLTYHGNEIISAVGCQQGDPLGPAVFSLAIHPIIQSLQSKLNVWYLDDGTLGGDANTLYDDLNLLISRFRTIGLELNFSKCELFIPERHPAKDSVIQKFNILAPNIKIVSNSTLRLLGSPIFDESFPSFIEEKIQNFLQCSDRLSKINMHMAFTIIRFCLFVPKFTYLVRCCQLWKHPDLLQRLDNIIRNTLATVLNINLKDRDWSQASLPVRWGGLGIRSISGVALPAFLSSVHSNQKLISKILSKNVDVLFLAEAKNAWNLACPNTDFPSTPSSQRLWDGPICEQVRKQLLHTCLSSSDRARLLAVAEWESGLWLQALPSANTGTLLDSSSFRISASLRLGASCYAPHRCQCGAAVDQLGHHGLSCVRSAGRIPRHASLNDVIRRAFTTANCAAVLEPSGLVRDDGRRPDGMTLIPWKLGRPLVWDATCVDTLAPSHLPGTQNKAGAAAESAEGLKRRKYSTLDSGYIFEPFGVETLGPWGPGARTIYKDLSLRLVEATRDQNAGRYFAQRISIAIQRGNAASILGTLPTAGSDLLD

SEQ ID NO: 19118 - protein, 996 aa, Peribatodes rhomboidaria
MFIWTLFLIVFFLYVTYKLKKSRAMPLCAQTANDFGGTSVSQETLVRCPDCSLDRFFKGPRGLKIHQGKCHKPIILSAPNSNQDIDLNIPSATQPFWKFLAFNKNNNPVVKRIPRGARLSVATALSHAIKAVVLQNSVESWEHLLSFPYAVLHVSTESKNAKKSLTSLIKENCVKYSTQGNLSNIFSSGFNSDSKFQNPKFSVRPSAAFANCKLVESKLGDGDIKGAARILFSTDTVAPPNSETLSILEGKHPHPDAALPLPDAPVESDITVEVTALDVGGAVISFQSGSAGGLDGLSPQHLKDLLSGACGEVGEALLRDLTALTNLMLSGRVNGDITELLYGANLCALKKKDGGIRPIAVGTTYRRLAAKICCKKVAPVLANLFQPLQLGFGSRGGCEAAVHSVRTFLSENCGDLLLKVDVKNAFNSVDRGTLLSQVKDKIPNLYGFLWQCYGSASKLTYHGNEIISAVGCQQGDPLGPAVFSLAIHPIIQSLQSKLNVWYLDDGTLGGDANTLYDDLNLLISRFRTIGLELNFSKCELFIPERHPAKDSVIQKFNILAPNIKIVSNSTLRLLGSPIFDESFPSFIEEKIQNFLQCSDRLSKINMHMAFTIIRFCLFVPKFTYLVRCCQLWKHPDLLQRLDNIIRNTLATVLNINLKDRDWSQASLPVRWGGLGIRSISGVALPAFLSSVHSNQKLISKILSKNVDVLFLAEAKNAWNLACPNTDFPSTPSSQRLWDGPICEQVRKQLLHTCLSSSDRARLLAVAEWESGLWLQALPSANTGTLLDSSSFRISASLRLGASCYAPHRCQCGAAVDQLGHHGLSCVRSAGRIPRHASLNDVIRRAFTTANCAAVLEPSGLVRDDGRRPDGMTLIPWKLGRPLVWDATCVDTLAPSHLPGTQNKAGAAAESAEGLKRRKYSTLDSGYIFEPFGVETLGPWGPGARTIYKDISLRLVEATRDQNAGRYFAQRISIAIQRGNAASILGTLPTAGSDLLD

SEQ ID NO: 19119 - protein, 984 aa, Erannis defoliaria
MASSTPSGRNAVSKINVVSQQDMIQCTECPQAKFFKGQKGLKIHKTRCHKIHEIPLSAPISGSNVASSSSMSAATPAKPFWEVLSSLKNSIPILKRIPRGARISVAQSLSFAIRNAFTQNSKQAWEHLLSFPYNVLYVHSDPSNKKSLTTRVKENCVKYKVSEENLLGLANIIPPKRRNNQNSKKSDDSVTFKLVENKMSDGDIKGAARVLFSSDTIAPHTLETIQSLRDKHPPAAANLHLPEPPQPDDVAIDVQTQEIATAVASFQSGSAGGLDGLTPQHLKDLLSFSSGEVGETLLKDLTALVSLMLSGRVNSDVIEILYGANLCALIKKDGGIRPIAVGTTYRRLAAKAGCRQKVALLSSLFQPIQLGFGSRGGCEAAVHSLRTFLDQNCGEVLLKVDVKNAFNSVDRGALLTQIKDKIPDVFNFLWQCYGNPTKLTYQNNVLLSSVGCQQGDPFGPAIFSLAIHPIIQRLQSKLNVWYLDDGTLGGDVSTVLNDLQILIDEFRLIGLEQNFSKCELYVCDSCPNKDLVIAKFNDLAPNIKSVDRCSLRLLGSPILDESFSPFVEEKIQNFMSASRRLLNINAHMAFTIIKYCLFVPKFIYTLRCSPLWKHGELLSSLDNVVKETLISVLNVEMNDRTWSQASLPVRLGGLGIRKISSVALPAFLSSVHSTHKLIEKILLPSLGHSGVVVAHLNEAKNVWREACPNTDFPKTLSSQRLWDGPICELARKSLLDTCTSVADRARILAVSVWESGLWLQAIPSFNTGSLLDPTAFRLAVSLRLGARCCEAHRCQCGTVVDQLGHHGLSCSRSAGRIGRHASLNDVIRRALSTANVAAVLEPSGLARDDGKRPDGMTLVPWKMGRPLVWDATCVDTLAPSHLPETQSRAGAAANSAERHKRRKYANLGRGYIFEPFGVETLGPWGPGAHHLFKNISERLVDATRDQNAGVYLAQRISIAIQRGNAASMLGTLPTGSGFEHLDCL

SEQ ID NO: 19120 - protein, 990 aa, Crocallis elinguaria
MLILIVYYMAPSTQIVNNADQCNFVSQGNMIPCPECPQVRYFKGQKGLKIHTSKCHKSIEIPLSVPVLASNLASSSSPSAATPSNPFWEVLSSYKNSIPILKRIPRGARISVALSLSSAIRNVLSKNSKQAWEHLLTFPYQVLYVHLDPLNKTSLTNRVKENCVRYKVQEEQCLGLSTIVPPNRWNNDKNSKQNNDSATFTIVETKISDGDIKGAARVLFSSDTIAPYIPETIQSLRGKHPPAAADLLLPDPPQQSDVVVEVTSQDVAAAVTSFRGGSAGGLDGLTPQHLKDVLCGSSGETLLGDLTGLVNLMLSGRVNSDVTEILYGANLCALIKKDGGIRPIAVGTTYRRLAAKVGCRKKVASLSNLFQPIQLGFGSRGGCEAAVHSVRTFLDQNCGEVLLKVDVKNAFNSVDRGALLTQVKDKIPELYSFLFQCYGNPSKLTYRNNVMLSSVGCQQGDPLGPAIFSLAIHPIIQRLQSKLNVWYLDDGTLGGDVNTVLNDLRILKDEFRLIGLELNFSKCELFVCDSCSDKDSVFEKFNSLAPNIKSVDRCSLRLLGSPILDEAFSSFVDEKIQNFMNTSDRLLKINAHMAFTIIRFCLFVPKFTYVLRCCQLWKHSELLTSLDNIVKQTLESVLNIDMDDRAWSQASLPVRFGGLGIRKISSVALPAFLSSVHGTYKLIEKILAPSLDSLGHFEVAHLTEAKNAWGMACPNTDFPMVLSSQKLWDRPICDLARKGLLDTCLSVADRARLLAVSVWESGLWLQAVPSFNTGNLLDPSAFRLAVCLRLGARCYVAHRCQCGTAVDQLGHHGLSCSRSAGRISRHASLNDIIRRAFTSANVAAILEPNGLMRDDGKRPDGMTLVPWKLGRPLVWDATCVDTLAPSHISETQIRAGAAASSAERLKRRKYANLGSGYIFEPFGVETLGPWGPGAHNIFKILSERLIDATRNQNAGNYLAQRISIAVQRGNAASMLGTLPTGSGLEHLDYL

SEQ ID NO: 19121 - protein, 678 aa, Crocallis elinguaria
MLSGRVNSDVTEILYGANLCALIKKDGGIRPIAVGTTYRRLAAKVGCGKKVASLSNLFQPIQLGFGSRGGCEAAVHSVRTFLDQNCGEVLLKVDVKNAFNSVDRGALLTQVKDKIPELYSFLFQCYGNPSKLTYRNNVMLSSVGCQQGDPLGPAIFSLAIHPIIQRLQSKLNVWYLDDGTLGGDVNTVLNDLRILIDEFRLIGLELNFSKCELFVCDSCSDKDSVFEKFNSLAPNIKSVDRCSLRLLGSPILDEAFSSFVDEKIQNFMNTSDRLLKINAHMAFTIIRFCLFVPKFTYVLRCCQLWKHSELLTSLDNIVKQTLESVLNIDMDDRAWSQASLPVRFGGLGIRKISSVALPAFLSSVHGTYKLIEKILAPSLVSLGHFEVAHLTEAKNAWGMACPNTDFPMVLSSQKLWDRPICDLARKGLLDTCLSVADRARLLAVSVWESGLWLQAVPSFNTGNLLDPSAFRLAVCLRLGARCYVAHRCQCGTAVDQLGHHGLSCSRSAGRISRHASLNDIIRRAFTSANVAAILEPNGLMRDDGKRPDGMTLVPWKLGRPLVWDATCVDTLAPSHISETQIRAGAAASSAERLKRRKYANLGSGYIFEPFGVETLGPWGPGAHNIFKILSERLIDATRNQNAGNYLAQRISIAVQRGNAASMLGTLPTGSGLEHLDYL

SEQ ID NO: 19122 - protein, 982 aa, Crocallis elinguaria
MAPSTQIVNNADQCNFVSQGNMIPCPECPQVRYFKGQKGLKIHTSKCHKSIEIPLSVPVLASNVASSSSPSAATPSNPFWEVLSSYKNSIPILKRIPRGARISVALSLSSAIRNVLSKNSKQAWEHLLTFPYQVLYVHLDPLNKTSLTNRVKENCVRYKVQEEQCLGLSTIVPPNRWNNDKNSKQNNDSATFKIVETKISDGDIKGAARVLFSSDTIAPYIPETIQSLRGKHPPAAADLLLPDPPQQSDVVVEVTSQDVAAAVTSFRGGSAGGLDGLTPQHLKDVLCGSSGETLLGDLTGLVNLMLSGRVNSDVTEILYGANLCALIKKDGGIRPIAVGTTYRRLAAKVGCRKKVASLSNLFQPIQLGFGSRGGCEAAVHSVRTFLDQNCGEVLLKVDVKNAFNSVDRGALLTQVKDKIPELYSFLFQCYGNPSKLTYRNNVMLSSVGCQQGDPLGPAIFSLAIHPIIQRLQSKLNVWYLDDGTLGGDVNTVLNDLRILIDEFRLIGLELNFSKCELFVCDSCSDKDSVFEKFNSLAPNIKSVDRCSLRLLGSPILDEAFSSFVDEKIQNFMNTSDRLLKINAHMAFTIIRFCLFVPKFTYVLRCCQLWKHSELLTSLDNIVKQTLESVLNIDMDDRAWSQASLPVRFGGLGIRKISSVALPAFLSSVHGTYKLIEKILAPSLDSLGHFEVAHLTEAKNAWGMACPNTDFPMVLSSQKLWDRPICDLARKGLLDTCLSVADRARLLAVSVWESGLWLQAVPSFNTGNLLDPSAFRLAVCLRLGARCYVAHRCQCGTAVDQLGHHGLSCSRSAGRISRHASLNDIIRRAFTSANVAAILEPNGLMRDDGKRPDGMTLVPWKLGRPLVWDATCVDTLAPSHISETQIRAGAAASSAERLKRRKYANLGSGYIFEPFGVETLGPWGPGAHNIFKILSERLIDATRNQNAGNYLAQRISIAVQRGNAASMLGTLPTGSGLEHLDYL

SEQ ID NO: 19123 - protein, 982 aa, Crocallis elinguaria
MAPSTQIVNNADQCNFVSQGNMIPCPECPQVRYFKGQKGLKIHTSKCHKSIEIPLSVPVLASNLASSSSPSAATPSNPFWEVLSSYKNSIPILKRIPRGARISVALSLSSAIRNVLSKNSKQAWEHLLTFPYQVLYVHLDPLNKTSLTNRVKENCVRYKVQEEQCLGLSTIVPPNRWNNDKNSKQNNDSATFKIVETKISDGDIKGAARVLFSSDTIAPYIPETIQSLRGKHPPAAADLLLPDPPQQSDVVVEVTSQDVAAAVTSFRGGSAGGLDGLTPQHLKDVLCGSSGETLLGDLTGLVNLMLSGRVNSDVTEILYGANLCALIKKDGGIRPIAVGTTYRRLAAKVGCRKKVASLSNLFQPIQLGFGSRGGCEAAVHSVRTFLDQNCGEVLLKVDVKNAFNSVDRGALLTQVKDKIPELYSFLFQCYGNPSKLTYRNNVMLSSVGCQQGDPLGPAIFSLAIHPIIQRLQSKLNVWYLDDGTLGGDVNTVLNDLRILKDEFRLIGLELNFSKCELFVCDSCSDKDSVFEKFNSLAPNIKSVDRCSLRLLGSPILDEAFSSFVDEKIQNFMNTSDRLLKINAHMAFTIIRFCLFVPKFTYVLRCCQLWKHSELLTSLDNIVKQTLESVLNIDMDDRAWSQASLPVRFGGLGIRKISSVALPAFLSSVHGTYKLIEKILAPSLDSLGHFEVAHLTEAKNAWGMACPNTDFPMVLSSQKLWDRPICDLARKGLLDTCLSVADRARLLAVSVWESGLWLQAVPSFNTGNLLDPSAFRLAVCLRLGARCYVAHRCQCGTAVDQLGHHGLSCSRSAGRISRHASLNDIIRRAFTSANVAAILEPNGLMRDDGKRPDGMTLVPWKLGRPLVWDATCVDTLAPSHISETQIRAGAAASSAERLKRRKYANLGSGYIFEPFGVETLGPWGPGAHNIFKILSERLIDATRNQNAGNYLAQRISIAVQRGNAASMLGTLPTGSGLEHLDYL

SEQ ID NO: 19124 - protein, 982 aa, Crocallis elinguaria
MAPSTQIVNNADQCNFVSQGNMIPCPECPQVRYFKGQKGLKIHTSKCHKSIEIPLSVPVLASNVASSSSPSTATPSNPFWEVLSSYKNSIPILKRIPRGARISVALSLSSAIRNVLSKNSKQAWEHLLTFPYQVLYVHLDPLNKTSLTNRVKENCVRYKVQEEQCLGLSTIVPPNRWNNDKNSKQNNDSATFKIVETKISDGDIKGAARVLFSSDTIAPYIPETIQSLRGKHPPAAADLLLPDPPQQSDVVVEVTSQDVAAAVTSFRGGSAGGLDGLTPQHLKDVLCGSSGETLLGDLTGLVNLMLSGRVNSDVTEILYGANLCALIKKDGGIRPIAVGTTYRRLAAKVGCRKKVASLSNLFQPIQLGFGSRGGCEAAVHSVRTFLDQNCGEVLLKVDVKNAFNSVDRGALLTQVKDKIPELYSFLFQCYGNPSKLTYRNNVMLSSVGCQQGDPLGPAIFSLAIHPIIQRLQSKLNVWYLDDGTLGGDVNTVLNDLRILIDEFRLIGLELNFSKCELFVCDSCSDKDSVFEKINSLAPNIKSVDKCSLRLLGSPILDEAFSSFVDEKIQNFMNTSDRLLKINAHMAFTIIRFCLFVPKFTYVLRCCQLWKHSELLTSLDNIVKQTLESVLNIDMDDRAWSQASLPVRFGGLGIRKISSVALPAFLSSVHGTYKLIEKILAPSLDSLGHFEVAHLTEAKNAWGMACPNTDFPMVLSSQKLWDRPICDLARKGLLDTCLSVADRARLLAVSVWESGLWLQAVPSFNTGNLLDPSAFRLAVCLRLGARCYVAHRCQCGTAVDQLGHHGLSCSRSAGRISRHASLNDIIRRAFTSANVAAILEPNGLMRDDGKRPDGMTLVPWKLGRPLVWDATCVDTLAPSHISETQIRAGAAASSAERLKRRKYANLGSGYIFEPFGVETLGPWGPGAHNIFKILSERLIDATRNQNAGNYLAQRISIAVQRGNAASMLGTLPTGSGLEHLDYL

SEQ ID NO: 19125 - protein, 982 aa, Crocallis elinguaria
MAPSTQIVNNADQCNFVSQGNMIPCSECPQVRYFKGQKGLKIHTSKCHKSIEIPLSVPVLASNVASSSSPSAATPSNPFWEVLSSYKNSIPILKRIPRGARISVALSLSSAIRNVLSKNSKQAWEHLLTFPYQVLYVHLDPLNKTSLTNRVKENCVRYKVQEEQCLGLSTIVPPNRWNNDKNSKQNNDSATFKIVETKISDGDIKGAARVLFSSDTIAPYIPETIQSLRGKHPPAAADLLLPDPPQQSDVVVEVTSQDVAAAVTSFRGGSAGGLDGLTPQHLKDVLCGSSGETLLGDLTGLVNLMLSGRVNSDVTEILYGANLCALIKKDGGIRPIAVGTTYRRLAAKVGCRKKVASLSNLFQPIQLGFGSRGGCEAAVHSVRTFLDQNCGEVLLKVDVKNAFNSVDRGALLTQVKDKIPELYSFLFQCYGNPSKLTYRNNVMLSSVGCQQGDPLGPAIFSLAIHPIIQRLQSKLNVWYLDDGTLGGDVNTVLNDLRILIDEFRLIGLELNFSKCELFVCDSCSDKDSVFEKFNSLAPNIKSVDKCSLRLLGSPILDEAFSSFVDEKIQNFMNTSDRLLKINAHMAFTIIRFCLFVPKFTYVLRCCQLWKHSELLTSLDNIVKQTLESVLNIDMDDRAWSQASLPVRFGGLGIRKISSVALPAFLSSVHGTYKLIEKILAPSLDSLGHFEVAHLTEAKNAWGMACPNTDFPMVLSSQKLWDRPICDLARKGLLDTCLSVADRARLLAVSVWESGLWLQAVPSFNTGNLLDPSAFRLAVCLRLGARCYVAHRCQCGTAVDQLGHHGLSCSRSAGRISRHASLNDIIRRAFTSANVAAILEPNGLMRDDGKRPDGMTLVPWKLGRPLVWDATCVDTLAPSHISETQIRAGAAASSAERLKRRKYANLGSGYIFEPFGVETLGPWGPGAHNIFKILSERLIDATRNQNAGNYLAQRISIAVQRGNAASMLGTLPTGSGLEHLDYL

SEQ ID NO: 19126 - protein, 678 aa, Crocallis elinguaria
MLSGRVNSDVTEILYGANLCALIKKDGGIRPIAVGTTYRRLAAKVGCRKKVASLSNLFQPIQLGFGSRGGCEAAVHSVRTFLDQNCGEVLLKVDVKNAFNSVDRGALLTQVKDKIPELYSFLFQCYGNPSKLTYRNNVMLSSVGCQQGDPLGPAIFSLAIHPIIQRLKSKLNVWYLDDGTLGGDVNTVLNDLRTLIDEFRLIGLELNFSKCELFVCDSCSDKDSVFEKFNSLAPNIKSVDKCSLRLLGSPILDEAFSSFVDEKIQNFMNTSDRLLKINAHMAFTIIRFCLFVPKFTYVLRCCHLWKHSELLTSLDNIVKQTLESVLNIDMDDRAWSQASLPVRFGGLGIRKISSVALPAFLSSVHGTYKLIEKILAPSLDSLGHFEVAHLTEAKNAWGMACPNTDFPMVLSSQKLWDRPICDLARKGLLDTCLSVADRARLLAVSVWESGLWLQAVPSFNTGNLLDPSAFRLAVCLRLGARCYVAHRCQCGTAVDQLGHHGLSCSRSAGRISRHASLNDIIRRAFTSANVAAILEPNGLMRDDGKRPDGMTLVPWKLGRPLVWDATCVDTLAPSHISETQIRAGAAASSAERLKRRKYANLGSGYIFEPFGVETLGPWGPGAHNIFKILSERLIDATRNQNAGNYLAQRISIAVQRGNATSMLGTLPTGSGLEHLDYL

SEQ ID NO: 19127 - protein, 982 aa, Crocallis elinguaria
MAPSTQIVNNADQCNFVSQGNMIPCPECPQVRYFKGQKGLKIHTSKCHKSIEIPLSVPVLASNVASSSSPSAATPSNPFWEVLSSYKNSIPILKRIPRGARISVALSLSSAIRNVLSKNSKQAWEHLLTFPYQVLYVHLDPLNKTSLTNRVKENCVRYKVQEEQCLGLSTIVPPNRWNNDKNSKQNNDSATFKIVETKISDGDIKGAARVLFSSDTIAPYIPETIQSLRGKHPPAAADLLLPDPPQQSDVVVEVTSQDVAAAVTSFRGGSAGGLDGLTPQHLKDVLCGSSGETLLGDLTGLVNLMLSGRVNSDVTEILYGANLCALIKKDGGIRPIAVGTTYRRLAAKVGCRKKVASLSNLFQPIQLGFGSRGGCEAAVHSVRTFLDQNCGEVLLKVDVKNAFNSVDRGALLTQVKDKIPELYSFLFQCYGNPSKLTYRNNVMLSSVGCQQGDPLGPAIFSLAIHPIIQRLQSKLNVWYLDDGTLGGDVNTVLNYLRILIDEFRLIGLELNFSKCELFVCDSCSDKDSVFEKFNSLAPNIKSVDRCSLRLLGSPILDEAFSSFVDEKIQNFMNTSDRLLKINAHMAFTIIRFCLFVPKFTYVLRCCQLWKHSELLTSLDNIVKQTLESVLNIDMDDRAWSQASLPVRFGGLGIRKISSVALPAFLSSVHGTYKLIEKILAPSLDSLGHFEVAHLTEAKNAWGMACPNTDFPMVLSSQKLWDRPICDLARKGLLDTCLSVADRARLLAVSMWESGLWLQAVPSFNTGNLLDPSAFRLAVCLRLGARCYVAHRCQCGTAVDQLGHHGLSCSKSAGRISRHASLNDIIRRAFTSANVAAILEPNGLMRDDGKRPDGMTLVPWKLGRPLVWDATCVDTLAPSHISETQIRAGAAASSAERLKRRKYANLGSGYIFEPFGVETLGPWGPGAHNIFKILSERLIDATRNQNAGNYLAQRISIAVQRGNAASMLGTLPTGSGLEHLDYL

SEQ ID NO: 19128 - protein, 982 aa, Crocallis elinguaria
MAPSTQIVNNADQCNFVSQGNMIPCPECPQVRYFKGQKGLKIHTSKCHKSIEIPLSVPVLASNVASSSSPSAATPSNPFWEVLSSYKNSIPILKRIPRGARISVALSLSSAIRNVLSKNSKQAWEHLLTFPYQVLYVHLDPLNKTSLTNRVKENCVRYKVQEEQCLGLSTIVPPNRWNNDKNSKQNNDSATFKIVETKISDGDIKGAARVLFSSDTIAPYIPETIQSLRGKHPPAAADLLLPDPPQQSDVVVEVTSQDVAAAVTSFRGGSAGGLDGLTPQHLKDVLCGSSGETLLGDLTGLVNLMLSGRVNSDVTEILYGANLCALIKKDGGIRPIAVGTTYRRLAAKVGCRKKVASLSNLFQPIQLGFGSRGGCEAAVHSVRTFLDQNCGEVLLKVDVKNAFNSVDRGALLTQVKDKIPELYSFLFQCYGNPSKLTYRNNVMLSSVGCQQGDPLGPAIFSLAIHPIIQRLQSKLNVWYLDDGTLGGDVNTVLNDLRILIDEFRLIGLELNFSKCELFVCDSCSDKDSVFEKFNSLAPNIKSVDRCSLRLLGSPILDEAFSSFVDEKIQNFMNTSDRLLKINTHMAFTIIRFCLFVPKFTYVLRCCQLWKHSELLTSLDNIVKQTLESVLNIDMDDRAWSQASLPVRFGGLGIRKISSVALPAFLSSVHGTYKLIEKILAPSLDSLGHFEVAHLTEAKNAWGMACPNTDFPMVLSSQKLWDRPICDLARKGLLDTCLSVADRARLLAVSVWESGLWLQAVPSFNTGNLLDPSAFRLAVCLRLGARCYVAHRCQCGTAVDQLGHHGLSCSRSAGRISRHASLNDIIRRAFTSANVAAILEPNGLMRDDGKRPDGMTLVPWKLGRPLVWDATCVDTLAPSHISETQIRAGAAASSAERLKRRKYANLGSGYIFEPFGVETLGPWGPGAHNIFKILSERLIDATRNQNAGNYLAQRISIAVQRGNAASMLGTLPTGSGLEHLDYL

SEQ ID NO: 19129 - protein, 982 aa, Crocallis elinguaria
MAPSTQIVNNADQCNFVSQGNMIPCPECPQVRYFKGQKGLKIHTSKCHKSIEIPLSVPVLASNVASSSSPSAATPSNPFWEVLSSYKNSIPILKRIPRGARISVALSLSSAIRNVLSKNSKQAWEHLLTFPYQVLYVHLDPLNKTSLTNRVKENCVRYKVQEEQCLGLSTIVPPNRWNNDKNSKQNNDSATFKIVETKISDGDIKGAARVLFSSDTIAPYIPETIQSLRGKHPPAAADLLLPDPPQQSDVVVEVTSQDVAAAVGSFRGGSAGGLDGLTPQHLKDVLCGSSGETLLGDLTGLVNLMLSGRVNSDVTEILYGANLCALIKKDGGIRPIAVGTTYRRLAAKVGCRKKVASLSNLFQPIQLGFGSRGGCEAAVHSVRTFLDQNCGEVLLKVDVKNAFNSVDRGALLTQVKDKIPELYSFLFQCYGNPSKLTYRNNVMLSSVGCQQGDPLGPAIFSLAIHPIIQRLQSKLNVWYLDDGTLGGDVNTVLNDLRILIDEFRLIGLELNFSKCELFVCDSCSDKDSVFEKFNSLAPNIKSVDRCSLRLLGSPILDEAFSSFVDEKIQNFMNTSDRLLKINAHMAFTIIRFCLFVPKFTYVLRCCQLWKHSELLTSLDNIVKQTLESVLNINMDDRAWSQASLPVRFGGLGIRKISSVALPAFLSSVHGTYKLIEKILAPSLDSLGLFEVAHLTEAKNAWGMACPNTDFPMVLSSQRLWDRPICDLARKGLLDTCLSVADRARLLAVSVWESGLWLQAVPSFNTGNLLDPSAFRLAVCLRLGARCYVAHRCQCGTAVDQLGHHGLSCSRSAGRISRHASLNDIIRRAFTSANVAAILEPNGLMRDDGKRPDGMTLVPWKLGRPLVWDATCVDTLAPSHISETQIRAGAAASSAERLKRRKYANLGSGYIFEPFGVETLGPWGPGAHNIFKILSERLIDATRNQNAGNYLAQRISIAVQRGNAASMLGTLPTGSGLEHLDYL

SEQ ID NO: 19130 - protein, 982 aa, Crocallis elinguaria
MAPSTQIVNNADQCNFVSQGNMIPCSECPQVRYFKGQKGLKIHTSKCHKIIEIPLSVPVLASNVASSSSPSAATPSNPFWEVLSSYKNSIPILKRIPRGARISVALSLSSAIRNVLSKNSKQAWEHLLTFPYQVLYVHLDPLNKTSLTNRVKENCVRYKVQEEQCLGLSTIVPPNRWNNDKNSKQNNDSATFKIVETKISDGDIKGAARVLFSSDTIAPYIPETIQSLRGKHPPAAADLLLPDSPQQSDVVVEVTSQDVAAAVTSFRGGSAGGLDGLTPQHLKDVLCGSSGETLLGDLTGLVNLMLSGRVNSDVTEILYGANLCALIKKDGGIRPIAVGTTYRRLAAKVGCRKKVASLSNLFQPIQLGFGSRGGCEAAVHSVRTFLDQNCGEVLLKVDVKNAFNSVDRGALLTQVKDKIPELYSFLFQCYGNPSKLTYRNNVMLSSVGCQQGDPLGPAIFSLAIHPIIQRLQSKLNVWYLDDGTLGGDVNTVLNDLRILIDEFRLIGLELNFSKCELFVCDSCSDKDSVFEKFNSLAPNIKSVDKCSLRLLGSPILDEAFSSFVDEKIQNFMNTSDRLLKINAHMAFTIIRFCLFVPKFTYVLRCCQLWKHSELLTSLDNIVKQTLESVLNIDMDDRAWSQASLPVRFGGLGIRKISSVALPAFLSSVHGTYKLIEKILAPSLDSLGHFEVAHLTEAKNAWGMACPNTDFPMVLSSQKLWDRPICDLARKGLLDTCLSVADRARLLAVSVWESGLWLQAVPSFNTGNLLDPSAFRLAVCLRLGARCYVAHRCQCGTAVDQLGHHGLSCSRSAGRISRHASLNDIIRRAFTSANVAAILEPNGLMRDDGKRPDGMTLVPWKLGRPLVWDATCVDTLAPSHISETQIRAGAAASSAERLKRRKYANLGSGYIFEPFGVETLGPWGPGAHNIFKILSERLIDATRNQNAGNYLAQRISIAVQRGNAASMLGTLPTGSGLEHLDYL

SEQ ID NO: 19131 - protein, 982 aa, Crocallis elinguaria
MAPSTQIVNNADQCNFVSQGNMIPCSECPQVRYFKGQKGLKIHTSKCHKSIEIPLSVPVLASNVASSSSPSAATPSNPFWEVLSSYKNSIPILKRIPRGARISVALSLSSAIRNVLSKNSKQAWEHLLTFPYQVLYVHLDPLNKTSLTNRVKENCVRYKVQEEQCLGLSTIVPPNRWNNDKNSKQNNDSATFKIVETKISDGDIKGAARVLFSSDTIAPYIPETIQSLRGKHPPAAADLLLPDPPQQSDVVVEVTSQDVAAAVTSFRGGSAGGLDGLTPQHLKDFLCGSSGETLLGDLTGLVNLMLSGRVNSDVTEILYGANLCALIKKDGGIRPIAVGTTYRRLAAKVGCRKKVASLSNLFQPIQLGFGSRGGCEAAVHSVRTFLDQNCGEVLLKVDVKNAFNSVDRGALLTQVKDKIPELYSFLFQCYGNPSKLTYRNNVMLSSVGCQQGDPLGPAIFSLAIHPIIQRLQSKLNVWYLDDGTLGGDVNTVLNDLRILIDEFRLIGLELNFSKCELFVCDSCSDKDSVFEKFNSLAPNIKSVDKCSLRLLGSPILDEAFSSFIDEKIQNFMNTSDRLLKINAHMAFTIIRFCLFVPKFTYVLRCCQLWKHSELLTSLDNIVKQTLESVLNIDMDDRAWSQASLPVRFGGLGIRKISSVALPAFLSSVHGTYKLIEKILAPSLDSLGHFEVAHLTEAKNAWGMACPNTDFPMVLSSQKLWDRPICDLARKGLLDTCLSVADRARLLAVSVWESGLWLQAVPSFNTGNLLDPSAFRLAVCLRLGARCYVAHRCQCGTAVDQLGHHGLSCSRSAGRISRHASLNDIIRRAFTSANVAAILEPNGLMRDDGKRPDGMTLVPWKLGRPLVWDATCVDTLAPSHISETQIRAGAAASSAERLKRRKYANLGSGYIFEPFGVETLGPWGPGAHNIFKILSERLIDATRNQNAGNYLAQRISIAVQRGNAASMLGTLPTGSGLEHLDYL

SEQ ID NO: 19132 - protein, 982 aa, Crocallis elinguaria
MAPSTQIVNNADQCNFVSQGNMIPCPECHQVRYFKGQKGLKIHTSKCHKSIEIPLSVPVLVSNVASSSSPSAATPSNPFWEVLSSYKNSIPILKRIPRGARISVALSLSSAIRNVLSKNSKQAWEHLLTFPYQVLYVHLDPLNKTSLTNRVKENCVRYKVQEEQCLGLSTIVPPNRWNNDKNSKQNNDSATFKIVETKISDGDIKGAARVLFSSDTIAPYIPETIHSLRGKHPPAAADLLLPDPPQQSDVVVEVTSQDVAAAVTSFRGGSAGGLDGLTPQHLKDVLCGSFGETLLGDLTGLVNLMLSGRVNSDVTEILYGANLCALIKKDGGIRPIAVGTTYRRLAAKVGCRKKVASLSNLFQPIQLGFGSRGGCEAAVHSVRTFLDQNCGEVLLKVDVKNAFNSVDRGALLTQGKDKIPELYSFLFQCYGNPSKLTYRNNVMLSSVGCQQGDPLGPAIFSLAIHPIIQRLKSKLNVWYLDDGTLGGDVNTVLNDLRTLIDEFRLIGLELNFSKCELFVCDSCSDKDSVFEKFNSLAPNIKSVDKCSLRLLGSPILDEAFSSFVDEKIQNFMNTSDRLLKINAHMAFTIIRFCLFVPKFTYVLRCCHLWKHSELLTSLDNIVKQTLESVLNIDMDDRAWSQASLPVRFGGLGIRKISSVALPAFLSSVHGTYKLIEKILAPSLDSLGHFEVAHLTEAKNAWGMACPNTDFPMVLSSQKLWDRPICDLARKGLLDTCLSVADRARLLAVSVWESGLWLKAVPSFNTGNLLDPSAFRLAVCLRLGARCYVAHRCQCGTAVDQLGHHGLSCSRSAGRISRHASLNDIIRRAFTSANVAAILEPNGLMRDDGKRPDGMTLVPWKLGRPLVWDATCVDTLAPSHISETQIRAGAAASSAERLKRRKYANLGSGYIFEPFGVETLGPWGPGAHNIFKILSERLIDATRNQNAGNYLAQRISIAVQRGNATSMLGTLPTGSGLEHLDYL

SEQ ID NO: 19133 - protein, 678 aa, Crocallis elinguaria
MLSGRVNSDVTEILYGANLCALIKKDGGIRPIAVGTTYRRLAAKVGCRKKVASLSNLFQPIQLGFGSRGGCEAAVHSVRTFLDQNCGEVLLKVDVKNAFNSVDRGALLTQVKDKIPELYSFLFQCYGNPSKLTYRNNVMLSSVGCQQGDPLGPAIFSLAIHPIIQRLQSKLNVWYLDDGTLGGDVNTVLNDLRILIDEFRLIGLELNFSKCELFVCDSCSDKDSVFEKFNSLAPNIKSVDRCSLRLLGSPILDEAFSSFVDEKIQNFMNTSDRLLKINAHMAFTIIRFCLFVPKFTYVLRCCQLWKHSELLTSLDNIVKQTLESVLNIDMDDRAWSQASLPVRFGGLGIRKISSVALPAFLSSVHGTYKLIEKILAPSLDSLGHFEVAHLTEAKNAWGMACPNTDFPMVLSSQKLWDRPICDLARKGLLDTCLSVADRARLLAVSVWESGLWLQAVPSFNTGNLLDPSAFRLAVCLRLGARCYVAHRCQCGTAVDQLGHHGLSCSRSAGRISRHASLNDIIRRAFTSANVAAILEPNGLMRDDGKRPDGMTLVPWKLGRPLVWDATCVDTLAPSHISETQIRAGAAASSAERLKRRKYANLGSGYIFEPFGVETLGPWGPGAHNILKILSERLIDATRNQNAGNYLAQRISIAVQRGNAASMLGTLPTGSGLEHLDYL

SEQ ID NO: 19134 - protein, 993 aa, Crocallis elinguaria
MAPSTQIVNNADQCNFVSQGNMIPCPECPQVRYFKGQKGLKIHTSKCHKSIEIPLSVPVLASNVASSSSPSAATPSNPFWEVLSSYKNSIPILKCIPRGARISVALSLSSAIRNVLSKNSKQAWEHLLTFPYQVLYVHLDPLNKTSLTNRVKENCVRYKVQEEQCLVLSTIVPPNRWNNDKNSKQNNDSATFKIVETKISDGDIKGAARVLFSSDTIAPYIPETIQSLRGKHPPAAADLILQQQQRHFVEVDQDPPQQSDVVVEVTSQDVAAAVTSFRGGSAGGLDGLTPQHLKDVLCGSSGETLLGDLTGLVNLMLSGRVNSDVTEILYGDNLCPLIKKYGGIRPIAVGTTYRRLAAKVGCRKKVASLSNLFQPIQLGFGSRGGCEAAVHSVRTFLDQNCGEVLLKVDVKNAFNSVDRGALLTQVKDKIPELYSFLFQCYGNPSKLTYRNNVMLSSVGCQQGDPLGPAIFSLAIHPIIQRLQSKLNVWYLDDGTLGGDVNTVLNDLRILIDEFRLIGLELNFSKCELFVCDSCSDKDSVFEKFNSLAPNIKSVDKCSLRLLGSPILDEAFSSFVDEKIQNFMNTSDRLLKINAHMAFTIIRFCLFVPKFTYVLRCCQLWKHSELLTSLDNIVKQTLESVLNIDMDDRAWSQASLPVRFGGLGIRKISSVALPAFLSSVHGTYKLIEKILAPSLDSLGHFEVAHLTEAKNAWGMACPNTDFPMVLSSQKLWDRPICDLARKGLLDTCLSVADRARLLAVSVWESGLWLQAVPSFNTGNLLDPSAFRLAVCLRLGARCYVAHRCQCGTAVDQLGHHGLSCSRSAGRISRHASLNDIIRRAFTSANVAAILEPNGLMRDDGKRPDGMTLVPWKLGRPLVWDATCVDTLAPSHISETQIRAGAAASSAERLKRRKYANLGSGYIFEPFGVETLGPWGPGAHNIFKILSERLIDATRNQNAGNYLAQRISIAVQRGNAASMLGTLPTGSGLEHLDYL

SEQ ID NO: 19135 - protein, 984 aa, Erannis defoliaria
MASSTPSGRNAVSKINVVSQQDMIQCTECPQAKFFKGQKGLKIHKTRCHKIHKIPFSAPISGSNVASSSSMSAATPAKPFWEVLSSLKNSIPILKRIPRGARISVAQSLSFAIRNAVTQNSKQAWEHLLSFPYNVLYVHSDPSNKKSLTTRVKENCVKYKVSEENLLGLANIIPPKRRNNQNSKKSDDSVTFKLVENKMSDGDIKGAARVLFSSDTIAPHTLETIQSLRDKHPPAAANLHLPEPPQPDDVAIDVQTQEIATAVASFQSGSAGGLDGLTPQHLKDLLSFSSGEVGETLLKDLTALVSLMLSGRVNSDVIEILYGANLCALIKKDGGIRPIAVGTTYRRLAAKAGCRQKVALLSSLFQPIQLGFGSRGGCEAAVHSLRTFLDQNCGEVLLKVDVKNAFNSVDRGALLTQIKDKIPDVFNFLWQCYGNPTKLTYQNNVLLSSVGCQQGDPFCPAIFSLAIHPIIQRLQSKLNVWYLDDGTLGGDVSTVLNDLQILIDEFRLIGLELNFSKCELYVCDSCPNKDLVIAKFNDLAPNIKSVDRCSLRLLGSPILDESFSPFVEEKIQNFMSASRRLLNINAHMAFTIIKYCLFVPKFIYTLRCSPLWKHGELLSSLDNVVKETLISVLNVDMNDRTWSQASLPVRLGGLGIRKISSVALPAFLSSVHSTHKLIEKILLPSLGHSGVVVAHLNEAKNVWREACPNTDFPRTLSSQRLWDGPICELARKSLLDTCTSVADRARILAVSVWESGLWLQAIPSFNTGSLLDPTAFRLAVSLRLGARCCEAHRCQCGTVVDQLGHHGLSCSRSAGRIGRHASLNDVIRRALSTANVAAVLEPSGLARDDGKRPDGMTLVPWKMGRPLVWDATCVDTLAPSHLPETQSRAGAAANSAERHKRRKYANLGRGYIFEPFGVETLGPWGPGAHNLFKNISERLVDATRDQNAGVYLAQRISIAIQRGNAASMLGTLPTGSGFEHLDCL

SEQ ID NO: 19136 - protein, 984 aa, Erannis defoliaria
MASSTPSGRNAVSKINVVSQQDMIQCTECPQAKFFKGQKGLKIHKTRCHKIHEIPLSAPISGSNVASSSSMSAATPAKPFWEVLSSLKNSIPILKRIPRGARISVAQSLSFAIRNAVTQNSKQAWEHLLSFPYNVLYVHSDPSNKKSLTTRVKENCVKYKVSEENLLGLANIIPPKKRNNQNSKKSDDSVIFKLVENKMSDGDIKGAARVLFSSDTIAPHTLETIQSLRDKHPPAAANLHLPEPPQPDDVAIDVQTQEIATAVASFQSGSAGGLDGLTPQHLKDLLSFSSGEVGETLLKDLTALVSLMLSGRVNSDVIEILYGANLCALIKKDGGIRPIAVGTTYRRLAAKAGCRQKVALLSSLFQPIQLGFGSRGGCEAAVHSLRTFLDQNCGEVLLKVDVKNAFNSVDRGALLTQIKDKIPDVFNFLWQCYGNPTKLTYQNNVLLSSVGCQQGDPFGPAIFSLAIHPIIQRLQSKLNVWYLDDGTLGGDVSTVLNDLQILIDEFRLIGLELNFSKCELYVCDSCPNKDLVITKFNDLAPNIKSVDRCSLRLLGSPILDESFSPFVEEKIQNFMSASRRLLNINAHMAFTIIKYCLFVPKFIYTLRCSPLWNHGELLSSLDNVVKETLISVLNVDMNDRTWSQASLPVRLGGLRNRKISSVALPAFLSSVHSTHKLIEKILLPSLGHSGVVVAHLNEAKNVWREACPNTDFPRTLSSQRLWDGPICELARKSLLDTCTSVADRARILAVSVWESGLWLQAIPSFNTGSLLDPTAFRLAVSLRLGARCCEAHRCQCGTVVDQLGHHGLSCSRSAGRIGRHASLNDVIRRALSTANVAAVLEPSGLARDDGKRPDGMTLVPWKMGRPLVWDATCVDTLAPSHLPETQSRAGAAANSAERHKRRKYANLGRGYIFEPFGVETLGPWGPGAHHLFKNISERLVDATRDQNAGVYLAQRISIAIQRGNAASMLGTLPTGSGFEHLDCL

SEQ ID NO: 19137 - protein, 984 aa, Erannis defoliaria
MASLTPSGRNAVSKSNVVSQQDMIQCTECPQAKFFKGQKGLKIHKTRCHKIHEIPLSAPISGSNVASSSSMSAATPAKPFWEVLSSLKNSIPILKRIPRGARISVAQSLSFAIRNAVTQNSKQAWEHLLSFPYNVLYVHSDPSNKKSLTTRVKENCVKYKVSEENLLGLANIIPPKRRNNQNSKKSDDSVTFKLVENKMSDGDIKGAARVLFSSDTIAPHTLETVQSLRDKHPPAAANLHLPEPPQPDDVAIDVQTQEIATAVASFQSGSAGGLDGLTPQHLKDLLSFSSGEVGETLLKDLTALVSLMLSGRVNSDVIEILYGANLCALIKKDGGIRPIAVGTTYRRLAAKAGCRQKVALLSSLFQPIQLGFGSRGGCEAAVHSLRTFLDQNCGEVLLKVDVKNAFNSVDRGALLTQIKDKIPDVFNFLWQCYGNPTKLTYQNNVLLSSVGCQQGDPFGPAIFSLAIHPIIQRLQSKLNVWYLDEGTLGGDVSTVLNDLQILIDEFRLIGLELNFSKCELYVCDSCPNKDLVIAKFNDLAPNIKSVDRCSLRLLGSPILDESFSPFVEEKIQNFMSASRRLLNINAHMAFTIIKYCLFVPKFIYTLRCSPLWKHAELLSSLDNVVKETLISVLNVDMNDRTWSQASLPVRLGGLGIRKISSVALPAFLSSVHSTHKLIEKILLPSLGHSGVVVAHLNEAKNVWREACPNTDFPRTLSSQRLWDGPICELARKSLLDTCTSVADRARILAVSVWESGLWLQAIPSFNTGSLLDPTAFRLAVSLRLGARCCEAHRCQCGTVVDQLGHHGLSCSRSAGRIGRHASLNDVIRRALSTANVAAVLEPSGLARDDGKRPDGMTLVPWKMGRPLVWDATCVDTLAPSHLPETQSRAGAAANSAERHKRRKYANLGRGYIFEPFGVETLGPWGPGAHHLFKNISERLVDATRDQNAGVYLAQRISIAIQRGNAASMLGTLPTGSGFEHLDCL

SEQ ID NO: 19138 - protein, 984 aa, Erannis defoliaria
MASSTPSGRNAVSKINVVSQQDMIQCTECPQAKFFKGQKGLKIHKTRCHKIHEIPLSAPISGSNVASSSSMSAATPAKPFWEVLSSLKNSIPILKRIPRGARISVAQSLSFAIRNAVTQNSKQAWEHLLSFPYNVLYVHSDPSNKKSLTTRVKENCVKYKVSEENLLGLANIIPPNRRNNQNSKKSDDSVTFKLVENKMSDGDIKGAARVLFSSDTIAPHTLETFQSLRDKHPPAAANLHLPEPPQPDDVAIDVQTQEIATAVASFRSGSAGGLDGLTPQHLKDLLSFSSGEVGETLLKDLTALVSLMLSGRVNSDVIEILYGANLCALIKKDGGIRPIAVGTTYRRLAAKAGCRQKVALLSSLFQPIQLGFGSRGGCEAAVHSLRTFLDQNCGEVLLKVDVKNAFNSVDRGALLTQIKDKIPDFFNFLWQCYGNPTKLTYQNNVLLSSVGCQQGDPFGPAIFSLAIHPIIQRLQSKLNVWYLDGGTLGGDVSTVLNDLQILIDEFRLIGLELNFSKCELYVCDSCPNKDLVIAKFNDLAPNIKSVDRCSLRLLGSPILDESFSPFVEEKIQNFMSASRRLLNINAHMAFTIIKYCLFVPKFIYTLRCSPLWKHGELLSSLDNVVKETLISVLNVDMNDRTWSQASLPVRLGGLGIRKISSVALPAFLSSVHSTHKLIKKILLPSLGHSGVVVAHLNEAKNVWREACPNTDFPRTLSSQRLWDGPICELARKSLLDTCTSVADRARILAVSVWESGLWLQAIPSFNTGSLLDPTAFCLAVSLRLGARCCEAHRCQCGTVVDQLGHHGLSCSRSAGRIGRHASLNDVIRRALSTANVAAVLEPSGLARDDGKRPDGMTLVPWKMGRPLVWDATCVDTLAPSHLPETQSRAGAAANSAERHKRRKYANLGRGYIFEPFGVETLGPWGPGAHHLFKNISKRLVDATRDQNAGVYLAQRISIAIQRGNAASMLGTLPTGSGFEHLDCL

SEQ ID NO: 19139 - protein, 984 aa, Erannis defoliaria
MASLTPSGRNAVSKINVVSQQDMIQCTECPQAKFFKGQKGLKIHKTRCHKIHEIPLSAPISGSNVASSSSMSAATPAKPFWEVLSSLKKSIPILKRIPRGARISVAQSLSFAIRNAVTQNSKQAWEHLLSFPYNVLYVHSDPSNKKSLTTRVKENCVKYKVSEENLLGLANIIPPKRRNSQNSKKSDDSVTFKLVENKMSDGDIKGAARVLFSSDTIAPHTLETVQSLRDKHPPAAANLHLPEPPQPDDVAIDVQTQEIATAVASFQSGSAGGLDGLTPQHLKDLLSFSSGEVGETLLKDLTALVSLMLSGRVNSDVIEILYGANLCALIKKDGGIRPIAVGTTYRRLAAKAGCRQKVALLSSLFQPIQLGFGSRGGCEAAVHSLRTFLDQNCGEVLLKVDVKNAFNSVDRGALLTQIKDKIPDVFNFLWQCYGNPTKLTYQNNVLLSSVGCQQGDPFGPAIFSLAIHPIIQRLQSKLNVWYLDDGTLGGDVSTVLNDLQILIDEFHLIGLELNFSKCELYVCDSCPNKDLVIAKFNDLAPNIKSVDRCSLRLLGSPILDESFSPYVEEKIQNFMSASRRLLNINAHMAFTIIKYCLFVPKCIYTLRCSPLWKHGELLSSLDNVVKETLISVLNVDMNDRTWSQASLPVRLGGLGIRKISSVALPAFLSSVHSTHKLIEKILLPSLGHSGVVVAHLNEAKNVWREACPNTDFPRTLSSQRLWDGPICELARKSLLDTCTGVADRARILAVSVWESGLWLQAIPSFNTGSLLDPTAFRLAVSLRLGARCCEAHRCQCGTAVDQLGHHGLSCSRSAGRIGRHASLNDVIRRALSTANVAAVLEPSGLARDDGKRPDGMTLVPWKMGRPLVWDATCVDTLAPSHLPETQSRAGAAANSAERHKRRKYANLGRGYIFEPFGVETLGPWGPGAHHLFKNISERLVDATRDQNAGVYLAQRISIAIQRGNAASMLGTLPTGSGFEHLDCL

SEQ ID NO: 19140 - protein, 997 aa, Lymantria dispar
MFLWTFILVSLVLVSIKVINKLVKKVVMSRCTQETMSGTQRPIASQENLVQCYQCSQVRFFKGQRGLKIHQTRCHSIPPLPLSNSISSPVFSNAYYSKPTEPFWQILANCKLYKPVLKRIPRGARLSVAAALSQSIKAVYTENSKRSWERLLLFPYAVLHVNDPKNKKSLTSRVKENCTGYSTRENPLIFDNLSAANLNSKNLRQFTVSTPYKLAENKLNDGDIKGAARILFSSDAIAPVTSETLSILKDKHPSSATDIQIPEALINSTNAIEVSCPDVYAVVMSFQTGSAGGLDGLTPQHLKDLTSNGCGESGEVLLRELTALINLMLSGQINSDIIDVLYGANLCALKKKDGGIRPIAVGMTYRRLAAKICCKKTAPQFGNIFQPIQLGFGSKGGCEAAVHSARTFLFNDCAKVLLKVDVKNAFNAVDRGTLLKEVKDKIPSLYNFLWQCYGSCTKLTYNGNEILSAVGCQQGDPLGPAIFSLAINPVIQKLQSKLNLWYLDDGTLGGDLNDVFNDLTVLIDEFHRIGLELNFSKYELFILDNLQKDQIIQKFNTLAPNIKIIDKRSLHLLGAPIYDKSFPHFFEEKIQNFLECSDRLFKINTHMAFTIFRHCLFMPKFMYTIRCCQLWKHKEILQSLDKIVRDTLESILNINLKEREWLQASLPVRFGGLGIRSISGVALPAFLSSVYSTQNLIYKILGPSLKNIEIPSFNEARNAWLTRNFNINLPTDPSSQRLWDGPLCKLVRKQLFNTCSSSADRARLLAVGEWESGLWLQALPSLRIGTLMDTSTFRIAACLRLGASCCAPHRCQCGFVVDRLGHHGLSCLKSAGRIPRHASLNDILRRAFTSANCAAVLEPSGLVRADGKRPDGMTLIPWKMGRPLVWDATCVDTLAPSHLPGTEIEAGAAAESAENFKRRKYCTLDSVYIFEPFGVETLGPWGPGAHNIFKDLSKRLNEATRDRNAGLYLAQRLSIAIQRGNVASILGTLPTGSGLFE

SEQ ID NO: 19141 - protein, 998 aa, Lymantria dispar
MFLWAFILVSLVLVNIKVINKLVKKVVMSRCTQETMSGTQRPIASQENLVQCYQCSQVRFFKGQRGLKIHQTRCHSILPLPLSNSISSPVFSNSYYSKPTEPFWKILANCKLYKPVLKRIPRGARLSVAAALSQSIKAVYTENSKRSWERLLLFPYAVLHVNNDPKNKKSLTARVKENCTGYSTRENPLIFDNLSAANLNSKNLRQFTVSAPYKLAENKLNDGDIKGAARILFSSDVIAPVTSETLSILKDKHPSSATDIQIPEAPINSTNAIEVSCPDVYAAVMSFQTGSAGGLDGLTPQHLKDLTSKGCGESGEVLLRELTALINFMLSGQVNSDIIDVLYGANLCALKKKGGGIRPIAVGMTYRRLAAKICCKKTAPQFGNIFQPIQLGFGSKGGCKAAVHSARTFLFNDCAKVLLKVDVKNAFNAVDRGTLLKEVKDKIPSLYNFLWQCYGSCTKLTYNGNEILSAVGCQQGDPLGPAIFSLAINPVIQTLQSKLNLWYLDDGTLGGDLNDVFNDLTVLIDEFHRIGLELNFSKCELFILDNLQKDQIIQKFNTLAPNIKIIDKRSLHLLGAPIYDKSFPHFFEEKIQNFLECSDRLFKINTHMAFTIFRHCLFMPKFMYTIRCCQLWKHKEILQSLDKIVRDTLESILNINLKEREWLQASLPVRFGGLGIRSISGVALPAFLSSVYSTQNLIYKILGPSLKNIEIPSFNEARNAWLTRNFNKNLPTDPSSQRLWDGPLCKLVRKQLFNTCSSSADRARLLAVGEWESGLWLQALPSLRIGTLMDTSTFRIAACLRLGASCYAPHRCQCGFVVDRLGHHGLSCLKSAGRIPRHASLNDILRRAFTSANCAAVLEPSGLVRADGKRPDGMTLIPWKMGRPLVWDATCVDTLASSHLPGTEIEAGAAAESAENLKRRKYCTLDSVYIFEPFRVETLGPWGPGAHNIFKDLSKRLNEATRDRNAGLYLAQWLSIAIQRGNAASILGTLPTGSGLFE

SEQ ID NO: 19142 - protein, 714 aa, Lymantria dispar
MSFQTGSAGGLDGLTPQHLKDLTSNGCGESGEVLLRELTALINLMLSGQVNSDIIDVLYGTNLCALKKKDGGIRPIAVGMTYRRLAAKICCKKTAPQFGNIFQPIQLGFGSKGGCEAAVHSARTFLFNDCSKVLLKVDVKNAFNAVDRGTLLKEVKDKIPSLYNFLWQCYGSCTKLTYNGNEILSAVGCQHGDPLGPAIFSLAINPVIQKLQSKLNLWYLDDETLGGDLNDVFNDLTVLIDELHRIGLELNFSKCELFILDNLQKDQIIQKFNTLAPNIKIIDKRSLHLLGAPIYDESFPHFFEEKIQIFLECSDSLFKINTHMTFTIFRHCLFMPKFMYTIRCCQLWKHKEILQSLDKIVRDTLESILNINLKEREWLQASLPVRFGGLGIRSISGVALPAFLSSVYSTQNLIYKILGPSLKNIEIPSFNEARNAWLTRNFNKYLPTDPSSQRLWDGPLCKLVRKQLFNTCSSSADRARLLAVGEWESGLWLQALPSLRIGTLMDTSTFRIAACLRLGASCCAPHRCQCGFVVDRLGHHGLSCLKSAGRIPRHASLNDILRRAFTSANCAAVLEPCGLVRADGKRPDGMTLIPWKMSRPLVWDATCVDTLAPSHLPGTEIEAGAAAESAENLKRRKYCTLDSVYIFEPFGVETLGPWGPGAHNIFKDLSKRLNEATRDRNAGLYLAQRISIAIQRGSAASILGTLPTGRGLFE

SEQ ID NO: 19143 - protein, 937 aa, Ennomos quercinarius
MSTQNNVVSLENRIQCPDCPQVRLFKGQKGLKIHQSKCHRVIQIPLSAPVSGSLVASSSPTSAATPSKPFWEVLSSYKRFIPVLKRIPRGARISVAQSLSSSIRNVISKNTKHAWEHLLTFAYHVLYVKLDPTNKSSLTKRVKENCVRYKVLEEQCLDHEIIVPLNRRNNIINSKQNNDSATFKIVESKISDGDIKGAARVLFSSDTIAPYCSETIQSLQDKHPPAAANLHLPEPPLPNDVTVEVTPQEVAAAVTSFQSGSAGGLDGLTPQILKDLLSGISGEIGEALLRDLTALVNLMLSGQVNSDVIEILYGANLCALIKKDGGIRPIAVGTTYRRLAAKVGCRKKVAFLSNLFQPIQLGFGSRGGCEAAVHSLRTFLKLNCGEVLLKVDVKNAFNSVDRGALLTQVKDKIPELYKFLYQCYGNPTKLNYQNNAILSSVGCQQGDPLGPAIFSLAIHPIIQRLQSKLNVWYLDFVCDTCPDKDLVFEKFNSLAPNIKLVDKRSFRLLGSPILDESISPFVEEKIQKFNNASDRLLKINAHMAFTIIRFCLFVPKFTYILRCCQLWKHSELLMGLDSIVKNTLVSVLNVDMDDRTWSQASLPVRLGGLGIRKISSVALPAFLSSVHGTHKLIEKILAPSLGTFEVAHLSEAKNAWGLACPNSDFPVVLSSQRLWDRPLCELARKNLLDTCPSVTDRARLLAVSVWESGLWLQAMPSFNTGNLLDPTTLRLAISLRLGARCCVAHRCQCGTAVDQLGHHGLSCSKSAGRISRHASLNDIIRRAFTTANVAAILEPNGLMRDDGKRPDGMTLVPWKMGRPLVWDATCVDTMAPSHLPETHVRAGAAANSAEQLKRRKYSNLGSGYIFEPFGVETLGPWGPGAHRVFQSLSERLVDATRDQNAGTYLAQRISIAIQRGNAASMLGTLPTGSGLEHLDCL

SEQ ID NO: 19144 - protein, 970 aa, Ennomos quercinarius
MSTQNNVVSLENRIQCPDCPQVRLFKGQKGLKIHQSKCHRVIQIPLSAPVSGSLVASSSPTSAATPSKPFWEVLSSYKRFIPVLKRIPRGARISVAQSLSSSIRNVISKNTKHAWEHLLTFPYHVLYVKLDPTNKSSLTKRVKENCVRYKVLEEQCLDHEIIVPLNRRNNIINSKQNNDSATFKIVESKISDGDIKGAARVLFSSDTIAPYCSETIQSLQDKHPPAAANLHLPEPPLPNDVTVEVTPQEVAAAVTSFQSGSAGGLDGLTPQILKDLLSGISGEIGEALLRDLTALVNLMLSGQVNSDVIEILYGANLCALIKKDGGIRPIAVGTTYRRLAAKVGCRKKVAFLSNLFQPIQLGFGSRGGCEAAVHSLRTFLKLNCGEVLLKVDVKNAFNSVDRGALLTQVKDKIPELYKFLYQCYGNPTKLNYQNNAILSSVGCQQGDPLGPAIFSLAIHPIIQRLQSKLNVWYLDDGTLGGDVNTVFNDLGIIINEFRDIGLDLNFSKCELFVCDTCPDKDLVFEKFNSLAPNIKLVDKRSLRLLGSPILDESISPFVEEKIQKFNNASDRLLKINAHMAFTIIRFCLFVPKFTYILTTWKHSELLMGLDSIVKNTLVSVLNVDMDDRTWSQASLPVRLGGLGIRKISSVALPAFLSSVHGTHKLIEKILAPSLGTFEVAHLSEAKNAWGLASPNSDFPVVLSSQRLWDRPLCELARKNLLDTCPSVADRARLLAVSVWESGLWLQAMPSFTTGNLLDPTTFRLAISLRLGARCCVAHRCQCGTAVDQLGHHGLSCSKSAGRISRHASLNDIIRRAFTTANAAAILEPNGLMRDDGKRPDGMTLVPWKMGRPLVWDATCVDTMAPSHLPETHVRAGAAANSAEQLKRRKYSNLGSGYIFEPFGVETLGPWGPGAHRVFQSLSERLVDATRDQNAGTYLAQRISIAIQRGNAASMLGTLPTGSGLVHLDCL

SEQ ID NO: 19145 - protein, 914 aa, Erannis defoliaria
MSAATPAKPFWEVLSSLKNSIPILKRIPRGARISVAQSLSFAIRNAVTQNSKQAWEHLLSFPYNVLYVHSDPSNKKSLTTRVKENCVKYKVSEENLLGLANIIPPKRRNNQNSKKSDDSVTFKLVENKMSDGDIKGAARVLFSSDTIAPHTLETIQSLRDKHPPAAANLHLPEPPQPDDVAIDVQTQEIATAVASFQSGSAGGLDGLTPQHLKDLLSFSSGEVGETLLKDLTALVSLMLSGRVNSDVIEILYGANLCALIKKDGGIRPIAVGTTYRRLAAKAGCRQKVALLSSLFQPIQLGFGSRGGCEAAVHSLRTFLDQNCGEVLLKVDVKNAFNSVDRGALLTQIKDKIPDVFNFLWQCYGNPTKLTYQNNVLLSSVGCQQGDPFGPAIFSLAIHPIIQRLQSKLNVWYLDDGTLGGDVSTVLNDLQILIDEFCLIGLELNFSKCELYVCDSCPNKDLVIAKFNDLAPNIKSVDRCSLRLLGSPILDESFSPFVEEKIQNFMSASRRLLNINAHMAFTIIKYCLFVPKFIYTLRCSPLWKHGELLSSLDNVVKETLISVLNVDMNDRTWSQASLPVRLGGLGIRKISSVALPAFLSSVHSTHKLIEKILLPSLGHSGVVVAHLNEAKNVWREACPNTDFPRTLSSQRLWDGPICELARKSLLDTCTSVADRARILAVSVWESGLWLQPIPSFNTGSLLDPTAFRLAVSLRLGARCCEAHRCQCGTVVDQLGHHGLSCSRSAGRIGRHASLNDVIRRALSTANVAAVLEPSGLARDDGKRPDGMTLVPWKMGRPLVWDATCVDTLAPSHLPKTQSRAGAAANSAERHKRRKYANLGRGYIFEPFGVETLGPWGPGAHHLFKNISERLVDSTRDQNAGVYLAQRISIAIQRGNAASMLGTLPTGSGFEHLDCL

SEQ ID NO: 19146 - protein, 984 aa, Erannis defoliaria
MASSTPSGRNAVSKINVVSQQDMIQCTECPQAKFFKGQKGLKIHKTRCHKIHEIPLSAPISGSNVASSSSMSAATPAKPFWEVLSSLKNSIPILKRIPRGARISVAQSLSFAIRNAVTQNSKQAWEHLLSFPYNVLYVHSDPSNKKSLTTRVKENCVKYKVSEENLLGLANIIPPKRRNNQNSKKSDDSVTFKLVENKMSDGDIKGAARVLFSSDTIAPHTLETIQSLRDKHPPAAANLHLPEPPQPDDVAIDVQTQEIATAVASFQSGSASGLDGLTPQHLKDLLSFSSGEVGETLLKDLTALVSLMLSGRVNSDVIEILYGANLCALIKKDGGIRPIAVGTTYRRLAAKAGCRQKVALLSSLFQPIQLGFGSRGGCEAAVHSLRTFLDQNCGEVLLKVDVKNAFNSVDRGALLTQIKDKIPDVFNFLWQCYGNPTKLTYQNNVLLSSVGCQQGDPFGPAIFSLAIHPIIQRLQSKLNVWYLDDGTLGGDVSTVLNDLQILIDEFRLIGLELNFSKCELYVCDSCPNKDLVIAKFNDLAPNIKSVDRCSLRLLGSPILDESFSPFVEEKIQNFMSASRRLLNINAHMAFTIIKYCLFVPKFIYTLRCSPLWKHGELLSSLDNVVKETLISVLNVDMNDRTWSQASLPVRSGGLGIRKISSVALPAFLSSVHSTHKLIEKILLPSLGHSVVVVAHLNEAKNVWREACPNTDFPRTLSSQRLWDGPICELARKSLLDTCTSVADRARILAVSVWESGLWLQAIPSFNTGSLLDPTAFRLAVSLRLGARCCEAHRCQCGTVVDQLGHHGLSCSRSAGRIGRHASLNDVIRRALSTANVAAVLEPSGLARDDGKRPDGMTLVPWKMGRPLVWDATCVDTLAPSHLPETQSRAGAAANSAERHKRRKYANLGRGYIFEPFGVETLGPWGPGAHHLFKNISERLVDATRDQNAGVYLAQRISIAIQRGNAASMLGTLPTGSGFEHLDCL

SEQ ID NO: 19147 - protein, 677 aa, Agriopis aurantiaria
MLSGRVSDDVIEILYGANLCALIKKDGGIRPIAVGTTYRRLAARAGCRKKVTLLSNLFQPIQLGFGSRGGCEAAVHSVRTFLDQNCGEVLLKVDVKNAFNSVDRGALLTQVKDKIPDLFNFLWQCYGSPTKLTYQNNVLLSSVGCQQGDPFGPAIFSLAIHPIIQHLQSKLNVWYLDDGTLGGDVDSVLSDLQFLIDEFRHIGLELNFSKCELFVCDSCPDKDEVIEKFNNLAPNIKLLDRRSLRLLGSPILDESFSPFVEEKIQNFMGASDRLLKINAHMAFTIIRYCLFVPKFMYTLRCSPLWKHGELLSSLDNVVKETLISVLNVDLSDRTWLQASLPVRLGGLGIRQISSVALPAFLSSFHSTHKLIEKILAPSLGPSDVVVSHSKEAMNAWRLACPNTDFPRKLSSQRLWDRPICELARKSLLDTCPSIADRARILAVSVWESGLWLQAMPSFNTGSLLDPTAFRLAVSLRLGARCCEAHRCQCGTAVDQLGHHGLSCSRSAGRIGRHASLNDIIRRALSTANVAAVLEPSGLARGDGKRPDGMTLVPWRLGRPLVWDATCVDTLAPSHLHETQGRAGAAANSAEQHKRRKYANLGSGYIFEAFGVEILGPWGPGAHLIFKNLSERLVNATRDQNAGVFLAQRISIAIQRGNAASMLGTLPTGSGLEHLDCL

SEQ ID NO: 19148 - protein, 981 aa, Agriopis aurantiaria
MSLSTPSGRNAASEINFVSQTNLIQCPECPQARYFKGQKGLKIHNTRCHKINLSAPISGSFVPSSSFTSAASPSKPFWEVLSSYKNSFPILKRIPRGARISVALCLSSAIRNVISINSKHAWEHLLTFPYSVLYVHFDPSNKKSLTTRVKENCVKYKVLEGNPLDLANIIPPKNRNNLNSKKTDVSTNFKLVESKISDGNIKGAARVLFSSDTIAPYTPVTVQSLREKHPPAAANLHLPDPPQPDDVVIEATCQEVAAAVASFQSGSAGGLDGLTPQHLKDLLSFSCGEASESLLKDLTALVNLMLSGRVSDDVIEILYGANLCALIKKDGGIRPIAVGTTYRRLAAKAGCRKKVTLLSNLFQPIQLGFGSRGGCEAAVHSVRTFLDQNCGEVLLKVDVKNAFNSVDRGALLTQVKDKIPDLFNFLWQCYGSPTKLTYQNNVLLSSVGCQQGDPFGPAIFSLAIHPIIQRLQSKLNVWYLDDGTLGGDVDTVLSDLQFLIDEFRHIGLELIFSKCELFVCDSCPDKDEVIEKFNNLAPNIKLLDRRSVRLLGSPILDESFSPFVEEKIQNFMGASDRLLKINAHMAFTIIRYCLFVPKFMYTLRCSPLWKHGELLSSLDNVVKETLISVLNVDLSDRTWLQASLPVRLGGLGIRQISSVALPAFLSSFHSTHKLIEKILAPSLGPSDVVVSHSKDAMNAWRLACPNTDFPRKLSSQRLWDRPICELARKSLLDTCPSIADRARILAVSVWESGLWLQAMPSFNTGSLLDPTAFRLAVSLRLGARCCEAHRCQCGTAVDQLGHHGLSCSRSAGRIGRHASLNDIIRRALSTANVAAVLEPSGLARDDEKRPDGMTLVPWRLGRPLVWDATCVDTLAPSHLPETQGRAGAAANSAEQHKRRKYANLGSGYIFEAFGVETLGPWGPGAHLIFKNLSERLVNATRDQNAGVFLAQRISIAIQRGNAASMLGTLPTGSGLEHLDWL

SEQ ID NO: 19149 - protein, 986 aa, Erannis defoliaria
MASSTPSGRNAVSKINVVSQQDMIQCTECPQAKFFKGQKGLKIHKTRCHKIHEIPLSAPISGSNVASSSSMSAATPAKPFWEVLSSLKNSIPILKRIPRGARISVAQSLSFAIRNAVTQNSKQAWEHLLSFPYNVLYVHSDPSNKKSLTTRVKENCVKYKVSEENLLGLANIIPPKRRNNQNSKKSDDSVTFKLVENKMSDGDIKGAARVLFSSDTIAPHTLETIQSLRDKHPPAAANLHLPEPPQPHDVAIDVQTQEIATAVASFQSGSAGGLDGLTPQHLKDLLSFSSGEVGETLLKDLTALVSLMLSGRVNSDVIEILYGANLCALIKKDGGIRPIAVGTTYRRLAAKAGCRQKVALLSSLFQPIQLGFGSRGGCEAAVHSLRTFLDQNCGEVLLKVDVKNAFNSVDRGALLTQIKDKIPDVFNFLWQCYGNPTKLTYQNNVLLSSVGCQQGDPFGPAIFSLAIHPIIQRLQSKLNVWYLDDGTLGGDVSTVLNDLQILIDEFRLIGLELNFSKCELYVCDSCPNKDLVIAKFNDLAPNIKSVDRCSLRLLGSPIFDESFSPFVEEKIQNFMSASRRLLNINAHMAFTIIKYCLFVPKFIYTLRCSPLWKHGELLSSLDNVVKETLISVLNVDMNDRTWSQASLPVRLGGLGIRKISSVLVALPAFLSSVHSTHKLIEKILLPSLGRSGVVVAHLNEAKNVWREACPNTDFPRTLSSQRLWDGPICELARKSLLDTCTSVADRARILAVSVWESGLWLQAIPSFNTGSLLDPTAFRLAVSLRLGARCCEAHRCQCGTVVDQLGHHGLSCSRSAGRIGRHASLNDVIRRALSTANVAAVLEPSGLARDDGKRPDGMTLVPWKMGRPLVWDATCVDTLAPSHLPETQSRAGAAANSAERHKRRKYANLGRGYIFEPFGVETLGPWGPGAHHLFKNISERLVDATRDQNAGVYLAQRISIAIQRGNAASMLGTLPTGSGFEHLDCL

SEQ ID NO: 19150 - protein, 997 aa, Hypena proboscidalis
MLLLVCILVFLVLFSVFYKFILSNECLLLMPRCAQEKEGESSAPINASLEEFVQCPECSRGRFRGQRGLKIHQGHCHKKNTSLPAPSSVPVNQLNHQHEVCFSTTLSIYKSSKPVIKRIPRGARLSVATALSQSIKAVIKHNSKRSWEHLLFFPYAVLHVSRESGNNKSLTARIKENCVKYSTLDSFSFIDTNCPAAFQNFYRSAPAESAIYKLVEGRLSDGDIKGAARILFSSDSMAPSNHETLSELQAKHPTPATHHHLPEAPRDSETFDVTAQDMAAAVESFPNGSAGGLDGLSPQHLKDLLGTGCGEADDSLLRDLTALASLMLSGRVHKDVAELLYGANLIALKKRDGGIRPIAVGTVYRRLAAKIGCKKVNLDLQNIFVPLQLGFGTRGGCEAAVHSVRTFTEKDCGEVLLKVDVKNAFNSVDRGALLTQVKEQIPNLFNFLWQCYGSASKLTYLGNEILSEVGCQQGDPLGPAIFSLAIHPIIQRLRSKLNVWYLDDGTIGGDFSTVHDDLLLLIDEFNKIGLQLNFKKCEIFISDNCTAKNSIIEKINKSAPGIKIIDRNALCLLGSPILDDAIPAFIDHKIQNFLHTSDRLSKINTHMAFTIIKFCLFGPKFTYTLRCCQLWKHTQLLLKLDNIVKNTLVSILNVNLDERTWLQASLPVRWGGLGIRAISDVALPAFLSSVHATNNLSQHILSASLNKFELSGMSEAMSAWRLACPNTDFPTNPTSQRLWDGPICKLLRKKLIDTCVSSADRARLLAVSEWESGLWLHAIPSHNTGTLLDTATFRTAVSLRLGAPCCAPHRCQCGAAVSRLGHHGLSCVKSAGRFTRHSSLNEIIRRALATANCPAILEPNGLSRDDGKRPDGMTLVPWRLGRPLVWDATCVDTLAPSHLPGTETRPGAAAESAEDLKRRKYSLLDSGYMFVPFGVETLGTWGPGAHFVYKEITSRIFEATRSRNAGLYFGQRISIAIQRGNAASILGTLPTGCGLLE

SEQ ID NO: 19151 - protein, 997 aa, Hypena proboscidalis
MLLLVCILVFLVLFSVFYKFILSNECLLLMPRCAQEKEGESSAPINASLEEFVQCPECSRGRFRGQRGLKIHQGHCHKKNTSLPAPSSVPVNQLNHQHEVCFSTTLSIYKSSKPVIKRIPRGARLSVATALSQSIKAVIKHNSKRSWEHLLFFPYAVLHVSRESGNNKSLTARIKENCVKYSTLDSFSFIDTNCPAAFQNFNRSAPAESAIYKLVEGRLSDGDIKGAARILFSSDSMAPSNHETLSELQAKHPTPATHHHLPEAPRDSETFDVTAQDMAAAVESFPNGSAGGLDGLSPQHLKDLLGTGCGEADDSLLRDLTALASLMLSGRVHKDVAELLYGANLIALKKRDGGIRPIAVSTVYRRLAAKIGCKKVNLDLQNIFVPLQLGFGTRGGCEAAVHSVRTFTEKDCGEVLLKVDVKNAFNSVDRGALLTQVKEQIPNLFNFLWQCYGSASKLTYLGNEILSEVGCQQGDPLGPAIFSLAIHPIIQRLRSKLNVWYLDDGTIGGDFSTVHDDLLLLIDEFNKIGLQLNFKKCEIFISDNCTAKNSIIEKINKSAPGIKIIDRNALCLLGSPILDDAIPAFIDHKIQNFLHTSDRLSKINTHMAFTIIKFCLFGPKFTYTLRCCQLWKHTQLLLKLDNIVKNTLVSILNVNLDERTWLQASLPVRWGGLGIRAISDVALPAFLSSVHATNNLSQHILSASLNKFELSGMSEAMSAWRLACPNTDFPTNPTSQRLWDGPICKLLRKKLIDTCVSSADRARLLAVSEWESGLWLHAIPSHNTGTLLDTATFRTAVSLRLGAPCCAPHRCQCGAAVSRLGHHGLSCVKSAGRFTRHSSLNEIIRRALATANCPAILEPNGLSRDDGKRPDGMTLVPWRLGRPLVWDATCVDTLAPSHLPGTETRPGAAAESAEDLKRRKYSLLDSGYMFVPFGVETLGTWGPGAHFVYKEITSRIFEATRSRNAGLYFGQRISIAIQRGNAASILGTLPTGCGLLE

SEQ ID NO: 19152 - protein, 997 aa, Hypena proboscidalis
MLLLVCILVLLVLFSVFYKFILSNECLLLMPRCAQEKEGESSAPINASLEEFVQCPECSRGRFRGQRGLKIHQGHCHKKNTSLPAPSSVPVNQLNHQHEVCFSTTLSIYKSSKPVIKRIPRGARLSVATVLSQSIKAVIKHNSKRSWEHLLFFPYAVLHVSRESGNNKSLTARIKENCVKYSTLDSYSFIDTNCPAAFQNFNRSAPAESAIYKLVEGRLSDGDIKGAARILFSSDSMAPSNHETLSELQAKHPTPATHHHLPEAPRDSETFDVTAQDMAAAVESFPNGSAGGLDGLSPQHLKDLLGTGCGEAGDSLLRDLTALASLMLSGRVHKDVTELLYGANLIALKKRDGGIRPIAVGTVYRRLAAKIGCKKVNLDLQNIFVPLQLGFGTRGGCEAAVHSVRTFTEKDCGEVLLKVDVKNAFNSVDRGALLTQVKEQIPNLFNFLWQCYGSASKLTYLGNEILSEVGCQQGDPLGPAIFSLAIHPIIQRLRSKLNVWYLDDGTIGGDFSTVHDDLLLLIDEFNKIGLQLNFKKCEIFISDNCTAKNSIIEKINKSAPGIKIIDRNALCLLGSPILDDAIPAFIDHKIQNFLHTSDRLSKINTHMAFTIIKFCLFGPKFTYTLRCCQLWKHTQLLLKLDNIVKNTLVSILNVNLDERTWLQASLPVRWGGLGIRAISDVALPAFLSSVHATNNLSQHILSASLNKFELSGMTEAMSAWRLACPNTDFPKNPTSQRLWDGPICKLLRKKLINTCVSSADRARLLAVSEWESGLWLHAIPSHNTGTLLDTATFRTAVSLRLGAPCCAPHRCQCGAAVSRLGHHGLSCVKSAGRFTRHSSLNEIIRRALATANCPAILEPNGLSRDDGKRPDGMTLVPWRLGRPLVWDATCVDTLAPSHLPGTETRPGAAAESAEDLKRRKYSLLDSGYMFVPFGVETLGTWGPGAHFVYKEITSRIFEATRSRNAGLYFGQRISIAIQRGNAASILGTLPTGCGLLE

SEQ ID NO: 19153 - protein, 997 aa, Hypena proboscidalis
MLLLVCILVFLVLFSVFYKFILSNECLLLMPRCAQEKEGESSAPINASLEEFVQCPECSRGRFRGQRGLKIHQGHCHKKNTSLPAPSSVPVNQLNHQHEVCFSTTLSIYKSSKPVIKRIPRGARLSVATALSQSIKAVIKHNSKRSWEHLLFFPYAVLHVSRESGNNKSLTARIKENCVKYSTLDSFSFIDTNCPAAFQNFNRSAPAESAIYKLVEGRLSDGDIKGAARILFSSDSMAPSNHETLSELQAKHPTPATHHHLPEAPRDSETFDVTAQDMAAAVESFPNGSAGGLDGLSPQHLKDLLGTGCGEAGDSLLRDLTALASLMLSGRVHKDVAELLYGANLIALKKRDGGIRPIAVGTVYRRLAAKIGCKKVNLDLQNIFVPLQLGFGTRGGCEAAVHSVRTFTEKDCGEVLLKVDVKNAFNSVDRGALLTQVKEQIPNLFNFLWQCYGSASKLTYLGNEILSEVGCQQGDPLGPAIFSLAIHPIIQRLRSKLNVWYLDDGTIGGDFSTVHDDLLLLIDEFNKIGLQLNFKKCEIFISDNCTAKNSIIEKINKSAPGIKIIDRNALCLLGSPILDDAIPAFIDHKIQNFLHTSDRLSKINTHMAFTIIKFCLFGPKFTYTLRCCQLWKHTQLLLKLDNIVKNTLVSILNVNLDERTWLQASLPVRWGGLGIRAISDVALPAFLSSVHATNNLSQHILSASLNKFELSGMSEAMSAWRLACPNTDFPTNPTSQRLWDGPICKLLRKKLIDTCVSSADRARLLAVSEWESGLWLHAIPSHNTGTLLDTATFRTAVSLRLGAPCCAPHRCQCGAAVSRLGHHGLSCVKSAGRFTRHSSLNEIIRRALATANCPAILEPNGLSRDDGKRPDGMTLVPWRLGRPLVWDATCVDTLAPSHLPGTETRPGAAAESAEDLKRRKYSLLDSGYMFVPFGVETLGTWGPGAHFVYKEITSRIFEATRSRNAGLYFGQRISIAIQRGNAASILGTLPTGCGLLE

SEQ ID NO: 19154 - protein, 997 aa, Hypena proboscidalis
MLLLVCILVFLVLFSVFYKFILSNECLLLMPRCAQEKEGESSAPINASLEEFVQCPECSRGRFRGQRGLKIHQGHCHKKNTSLPAPSSVPVNQLNHQHEVCFSTTLSIYKSSKPVIKRIPRGARLSVATALSQSIKAVIKHNSKRSWEHLLFFPYAVLHVSRESGNNKSLTARIKENCVKYSTLDSFSFIDTNCPAAFQNFNRSAPAESAIYKLVEGRLSDGDIKGAARILFSSDSMAPSNHETLSELQAKHPTPATHHHLPEAPRDSETFDVTAQDMAAAVESFPNGSAGGLDGLSPQHLKDLLGTGCGEAGDSLLRDLTALASLMLSGRVHKDVTELLYGANLIALKKRDGGIRPIAVGTVYRRLAAKIGCKKVNLDLQNIFVPLQLGFGTRGGCEAAVHSVRTFTEKDCGEVLLKVDVKNAFNSVDRGALLTQVKEQIPNLFNFLWQCYGSASKLTYLGNEILSEVGCQQGDPLGPAIFSLAIHPIIQRLRSKLNVWYLDDGTIGGDFSTVHDDLLLLIDEFNKIGLQLNFKKCEIFISDNCTAKNSIIEKINKSAPGIKIIDRNALCLLGSPILDDAIPAFIDHKIQNFLHTSDRLSKINTHMAFTIIKFCLFGPKFTYTLRCCQLWKHTQLLLKLDNIVKNTLVSILNVNLDERTWLQASLPVRWGGLGIRAISDVALPAFLSSVHATNNLSQHILSASLNKFELSGMTEAMSAWRLACPNTDFPTNPTSQRLWDGPICKLLRKKLIDTCVSSADRARLLAVSEWESGLWLHAIPSHNTGTLLDTATFRTAVSLRLGAPCCAPHRCQCGAAVSRLGHHGLSCVKSAGRFTRHSSLNEIIRRALATANCPAILEPNGLSRDDGRRPDGMTLVPWRLGRPLVWDATCVDTLAPSHLPGTETRPGAAAESAEDLKRRKYSLLDSGYMFVPFGVETLGTWGPGAHFVYKEITSRIFEATRSRNAGLYFGQRISIAIQRGNAASILGTLPTGCGLLE

SEQ ID NO: 19155 - protein, 997 aa, Hypena proboscidalis
MLLLVCILVFLVLFSVFYKFILSNECLLLMPRCAQEKEGESSAPINASLEEFVQCPECSRGRFRGQRGLKIHQGHCHKKNTSLPAPSSVPVNQLNHQHEVCFSTTLSIYKSSKPVIKRIPRGARLSVATALSQSIKAVIKHNSKRSWEHLLFFPYAVLHVSRESGNNKSLTARIKENCVKYSTLDSFSFIDTNCPAAFLNFNRSAPAESAIYKLVEGRLSDGDIKGAARILFSSDSMAPSNHETLSELQAKHPTPATHHHLPEAPRDSETFDVTAQDMAAAVESFPNGSAGGLDGLSPQHLKDLLGTGCGEAGDSLLRDLTALASLMLSGRVHKDVAELLYGANLIALKKRDGGIRPIAVGTVYRRLAAKIGCKKVNLDLQNIFVPLQLGFGTRGGCEAAVHSVRTFTEKDCGEVLLKVDVKNAFNSVDRGALLTQVKEQIPNLFNFLWQCYGSASKLTYLGNEILSEVGCQQGDPLGPAIFSLAIHPIIQRLRSKLNVWYLDDGTIGGDFSTVHDDLLLLIDEFNKIGLQLNFKKCEIFISDNCTAKNSIIEKINKSAPGIKIIDRNALCLLGSPILDDAIPAFIDHKIQNFLHTSDRLSKINTHMAFTIIKFCLFGPKFTYTLRCCQLWKHTQLLLKLDNIVKNTLVSILNVNLDERTWLQASLPVRWGGLGIRAISDVALPAFLSSVHATNNLSQHILSASLNKFELSGMSEAMSAWRLACPNTDFPTNPTSQRLWDGPICKLLRKKLIDTCVSSADRARLLAVSEWESGLWLHAIPSHNTGTLLDTATFRTAVSLRLGAPCCAPHRCQCGAAVSRLGHHGLSCVKSAGRFTRHSSLNEIIRRALATANCPAILEPNGLSRDDGKRPDGMTLVPWRLGRPLVWDATCVDTLAPSHLPGTETRPGAAAESAEDLKRRKYSLLDSGYMFVPFGVETLGTWGPGAHFVYKEITSRIFEATRSRNAGLYFGQRISIAIQRGNAASILGTLPTGCGLLE

SEQ ID NO: 19156 - protein, 997 aa, Hypena proboscidalis
MLLLVCILVFLVLFSVFYKFILSNECLLLMPRCAQEKEGESSAPINASLEEFVQCPECSRGRFRGQRGLKIHQGHCHKKNTSLPAPSSVPVNQLNHQHEVCFSTTLSIYKSSKPVIKRIPRGARLSVATALSQSIKAVIKHNSKRSWEHLLFFPYAVLHVSRESGNNKSLSARIKENCVKYSTLDSYSFIDTNCPAAFQNFNRSAPAESAIYKLVEGRLSDGDIKGAARILFSSDSMAPSNHETLSELQAKHPTPATHHHLPEAPRDSETFDVTAQDMAAAVESFPNGSAGGLDGLSPQHLKDLLGTGCGEAGDSLLRDLTALASLMLSGRVHKDVTELLYGANLIALKKRDGGIRPIAVGTVYRRLAAKIGCKKVNLDLQNIFVPLQLGFGTRGGCEAAVHSVRTFTEKDCGEVLLKVDVKNAFNSVDRGALLTQVKEQIPNLFNFLWQCYGSASKLTYLGNEILSEVGCQQGDPLGPAIFSLAIHPIIQRLRSKLNVWYLDDGTIGGDFSTVHDDLLLLIDEFNKIGLQLNFKKCEIFISDNCTAKNSIIEKINKSAPGIKIIDRNALCLLGSPILDDAIPAFIDHKIQNFLHTSDRLLKINTHMAFTIIKFCLFGPKFTYTLRCCQLWKHTQLLLKLDNIVKNTLVSILNVNLDERTWLQASLPVRWGGLGIRAISDVALPAFLSSVHATNNLSQHILSASLNKFELSGMTEAMSAWRLACPNTDFPTNPTSQRLWDGPICKLLRKKLIDTCVSSADRARLLAVSEWESGLWLHAIPSHNTGTLLDTATFRTAVSLRLGAPCCAPHRCQCGAAVSRLGHHGLSCVKSAGRFTRHSSLNEIIRRALATANCPAILEPNGLSRDDGKRPDGMTLVPWRLGRPLVWDATCVDTLAPSHLPGTETRPGAAAESAEDLKRRKYSLLDSGYMFVPFGVETLGTWGPGAHLVYKEITSRIFEATRSRNAGLYFGQRISIAIQRGNAASILGTLPTGCGLLE

SEQ ID NO: 19157 - protein, 997 aa, Hypena proboscidalis
MLLLVCILVFLVLFSVFYKFILSNECLLLMPRCAQEKEGESSAPINASLEEFVQCPECSRGRFRGQRGLKIHQGHCHKKNTSLPAPSSVPVNQLNYQHEVCFSTTLSIYKSSKPVIKRIPRGARLSVATALSQSIKAVIKHNSKRSWEHLLFFPYAVLHVSRESGNNKSLTARIKENCVKYSTLDSYSFIDTNCPAAFQNFNRSAPAESAIYKLVEGRLSDGDIKGAARILFSSDSMAPSNHETLSELQAKHPTPATHHHLPEAPRDSETFDVTAQDMAAAVESFPNGSAGGLDGLSPQHLKDLLGTGCGEAGDSLLRDLTALASLMLSGRVHKDVTELLYGANLIALKKRDGGIRPIAVGTVYRRLAAKIGCKKVNLDLQNIFVPLQLGFGTRGGCEAAVHSVRTFTEKDCGEVLLKVDVKNAFNSVDRGALLTQVKEQIPNLFNFLWQCYGSASKLTYLGNEILSEVGCQQGDPLGPAIFSLAIHPIIQRLRSKLNVWYLDDGTIGGDFSTVHDDLLLLIDEFNKIGLQLNFKKCEIFISDNCTAKNSIIEKINKSAPGIKIIDRNALCLLGSPILDDAIPAFIDHKIQNFLHTSDRLSKINTHMAFTIIKFCLFGPKFTYTLRCCQLWKHTQLLLKLDNIVKNTLVSILNVNLDERTWLQASLPVRWGGLGIRAISDVALPAFLSSVHATNNLSQHILSASLNKFELSGMTEAMSAWRLACPNTDFPTNPTSQRLWDGPICKLLRKKLIDTCVSSADRARLLAVSEWESGLWLHAIPSHNNGTLLDTATFRTAVSLRLGAPCCAPHRCQCGAAVSRLGHHGLSCVKSAGRFTRHSSLNEIIRRALATANCPAILEPNGLSRDDGKRPDGMTLVPWRLGRPLVWDATCVDTLAPSHLPGTETRPGAAAESAEDLKRRKYSLLDSGYMFVPFGVETLGTWGPGAHFVYKEITSRIFEATRSRNAGLYFGQRISIAIQRGNAASILGTLPTGCGLLE

SEQ ID NO: 19158 - protein, 990 aa, Biston betularia
MFIWTIFIAVFFYVVYKLMDTFVSQRCAQLDVDGLNRATVSQDNLMRCPDCTQDRYFKGLRGLKIHRGKCHRSVTPLSAPNSNQDPVSTAYTTQLFSKNLAYSKINSPVIKRIPRGARVPVAAALSHAVIKQNSKHSWEQLLSFPYAVLHVSYEVNNKKSLTLRIKENCVKYTTLEDTTLLSANSSDTNQNFKFLLKPLSESALYKRVESKLSDGDIKGAARILFSSDTFAPMNPETLSLLEGKHPPSAVDMILPPAPVEGDESVEATTSEVSAAVMSFQSGSAGGLDALTPQHLRDLISGACGETGEALLRDLTALMNLMLSGRVNDDITNILYGANLCALKKKDGGIRPIAVGMTYRRLAAKICCKKVAPLLSNLFQPLQLGFGSRGGCEAAVHSVRTFLTQNCGDLLLKVDVKNAFNSVDRGALLTQVRDKIPNLYAFLWQCYSAPSKLSYHGNEITSAVGCQQGDPLGPAVFSLAIHPIIQRLQSRLNVWYLDDGTLGGDANTLFDDLAFLTTEFRSIGLELNFSKCELFIPKAFPEKDLVIQKMCSLAPNIKIVDNSSLRLLGSPILEESFPLFIDEKIQNFLQVSDRLTKINTHMAFTIIRFCVFVPKFTYLVRCCQLWKHAELIQNLDNIIKKTLSMILNINLNNREWLQATLPVRLGGLGIRSVAGVALPAFLSSVHSNLPLINKILSTTSHIDVPYMNEARNAWVVACPNTDFPKTPSLQRQWDGPICEQVRKQLLNTCLSSADRARLLAVAEWESGLWLQALPSPNTGTLLDSSTFRIAASLRLGTPCGAPHRCQCGVAVDQLGHHGLSCTRSSGRIPRHASLNDIIRRALTTANCAAILEPSGLIRDDGKRPDGMTLIPWKMGRPLVWDATCVDTFAPSHLPRTQIRAGAAAEFAEDLKRRKYSTLDSGYIFEPFGVETMGPWGPGAKKIFKELSSRLVDATREQNAGLYFAQRLSIAIQRGNGASVLGTIPIDSGLLE

SEQ ID NO: 19159 - protein, 993 aa, Biston betularia
MFIWTIFIAVFFYVVYKLMDTFVSQRCAQLDVDGLNRATVSQDNLMRCPDCTQDRYFKGLRGLKIHRGKCHRSVTPLSAPNSNQDPVSTAYTTQLFSKNLAYSKINSPVIKRIPRGARVPVAAALSHAIKAVIKQNSKHSWEQLLSFPYAVLHVSYEVNNKKSLTLRIKENCVKYTTLEDTTLLSANSSDTNQNFKFLLKPLSESTLYKRVESKLSDGDIKGAARILFSSDTFAPMNPETLSLLEGKHPPSAVDMILPPAPVEGDESVEATTSEVSAAVMSFQSGSAGGLDALTPQHLRDLISGACGETGEALLRDLTALMNLMLSGRVNDDITNILYGANLCALKKKDGGIRPIAVGMTYRRLAAKICCKKVAPLLSNLFQPLQLGFGSRGGCEAAVHSVRTFLTQNCGGLLLKVDVKNAFNSVDRGALLTQVRDKIPNLYAFLWQCYSAPSKLSYHGNEITSAVGCQQGDPLGPAVFSLAIHPIIQRLQSRLNVWYLDDGTLGGDANTLFDDLAFLTTEFRSIGLELNFSKCELFIPKAFPEKDLVIQKMCSLAPNIKIVDNSSLRLLGSPILEESFPLFIDEKIQNFLQVSDRLTKINTHMAFTIIRFCVFVPKFTYLVRCCQLWKHAELIQNLDNIIKKTLSMILNINLNNREWLQATLPVRLGGLGIRSVAGVALPAFLSSVHSNLPLINKILSTTSHIDVPYMNEARNAWVVACPNTDFPKTPSLQRQWDGPICEQVRKQLLNTCLSSADRAHLLAVAEWESGLWLQALPSPNTGTLLDSSTFRIAASLRLGTPCGAPHRCQCGVAVDQLGHHGLSCTRSSGRIPRHASLNDIIRRALTTANCAAILEPSGLIRDDGKRPDGMTLIPWKMGRPLVWDATCVDTFAPSHLPRTQIRAGAAAEFAEDLKRRKHSTLDSGYIFEPFGVETMGPWGPGAKKIFKELSSRLVDATREQNAGLYFAQRLSIAIQRGNGASVLGTIPIDSGLLE

SEQ ID NO: 19160 - protein, 993 aa, Biston betularia
MFIWTIFIAVFFYVVYKLMDTFVSQRCAQLDVDGLNRATVSQDNLMRCPDCTQDRYFKGLRGLKIHRGKCHRSVTPLSAPNSNQDPVSTAYTTQLFSKNLAYSKINSPVIKRIPRGARVPVAAALSHAIKAVIKQNSKHSWEQLLSFPYAVLHVSYEVNNKKSLTLRIKENCVKYTTLEDTTLLSANSSDTNQNFKFLLKPLSESALYKRVESKLSDGDIKGAARILFSSDTFAPMNPETLSLLEGKHPPSAVDMILPPAPVEGDESVEATTSEVSAAVMSFQSGSAGGLDALTPQHLRDLISGACGETGEALLRDLTALMNLMLSGRVNDDITNILYGANLCALKKKDGGIRPIAVGMTYRRLAAKICCKKVAPLLSNLFQPLQLGFGSRGGCEAAVHSVRTFLTQNCGDLLLKVDVKNAFNSVDRGALLTQVRDKIPNLYAFLWQCYSAPSKLSYHGNEITSAVGCQQGDPLSPAVFSLAIHPIIQRLQSRLNVWYLDDGTLGGDANTLFDDLAFLTTEFRSIGLELNFSKCELFIPKAFPEKDLVIQKMCSLAPNIKIVDNNSLRLLGSPILEESFPLFIDEKIQNFLQVSDRLTKINTHMAFTIIRFCVFVPKFTYLVRCCQLWKHAELIQNLDNIIKKTLSMILNINLNNREWLQATLPVRLGGLGIRSVAGVALPAFLSSVHSNLPLINKILSTTSHIDVPYMNEARNAWVVACPNTDFPKTPSLQRQWDGPICEQVRKQLLNTCLSSADRARLLAVAEWESGLWLQALPSPNTGTLLDSSTFRIAASLRLGTPCGAPHRCQCGVAVDQLGHHGLSCTRSSGRIPRHASLNDIIRRALTTANCAAILEPSGLIRDDGKRPDGMTLIPWKMGRPLVWDATCVDTFAPSHLPRTQIRAGAAAEFAEDLKRRKYSTLDSGYIFEPFGVETMGPWGPGAKKIFKELSSRLVDATREQNAGLYFAQRLSIAIQRGNGASVLGTIPIDSGLLE

SEQ ID NO: 19161 - protein, 993 aa, Biston betularia
MFIWTIFIAVFFYVVYKLMDTFVSQRCAQLDVDGLNRATVSQDNLMRCPDCTQDRYFKGLRGLKIHRGKCHRSVTPLSAPNSNQDPVSTAYTTQLFSKNLAYSKINSPVIKRIPRGARVPVAAALSHAIKAVIKQNSKHSWEQLLSFPYAVLHVSYEVNNKKSLTLRIKENCVKYTTLEDTTLLSANSSDTNQNFKFLLKPLSESALYKRVESKLSDGDIKGAARILFSSDTFAPMNPETLSLLEGKHPPSAVDMILPPAPVEGDESVEATTSEVSAAVMSFQSGSAGGLDALTPQHLRDLISGACGETGEALLRDLTALMNLMLSGRVNDDITNILYGANLCALKKKDGGIRPIAVGMTYRRLAAKICCKKVAPLLSNLFQPLQLGFGSRGGCEAAVHSVRTFLTQNCGDLLLKVDVKNAFNSVDRGALLTQVRDKIPNLYAFLWQCYSAPSKLSYHGNEITSAVGCQQGDPLGPAVFSLAIHPIIQRLQSRLNVWYLDDGTLGGDANTLFDDLAFLTTEFRSIGLELNFSKCELFIPKAFPEKDLVIQKMCSLAPNIKIVDNSSLRLLGSPILEESFPLFIDEKIQNFLQVSDRLTKINTHMAFTIIRFCVFVPKFTYLVRCCQLWKHAELIQNLDNIIKKTLSMILNINLNNREWLQATLPVRLGGLGIRSVAGVALPAFLSSVHSNLPLINKILSTTSHIDVPYMNEARNAWVVACPNTDFPKTPSLQRQWDGPICEQVRKQLLNTCLSSADRARLLAVAEWESGLWLQALPSPNTGTLLDSSTFRIAASLRLGTPCGAPHRCQCGVAVDQLGHHGLSCTRSSGRIPRHASLNDIIRRALTTANCAAILEPSGLIRDDGKRPDGMTLIPWKMGRPLVWDATCVDTFAPSHLPRTQIRAGAAAEFAEDLKRRKYSTLDSGYIFEPFGVETMGPWGPGAKKIFKELSSRLVDATREQNAGLYFAQRLSIAIQRGNGASVLGTIPIDSGLLE

SEQ ID NO: 19162 - protein, 993 aa, Biston betularia
MFIWTIFIAVFFYVVYKLMDTFVSQRCAQLDVDGLNRATVSQDNLMRCPDCTQDRYFKGLRGLKIHRGKCHRSVTPLSAPNSNQDPVSTAYTTQLFSKNLAYSKINSPVIKRIPRGARVPVAVALSHAIKAVIKQNSKHSWEQLLSFPYAVLHVSYEVNNKKSLTLRIKENCVKYTTLEDTTLLSANSSDTNQNFKFLLKPLSESALYKRVESKLSDGDIKGAARILFSSDTFAPMNPETLSLLEGKHPPSAVDMILPPAPVEGDESVEATTSEVSAAVMSFQSGSAGGLDALTPQHLRDLISGACGETGEALLRDLTALMNLMLSGRVNDDITNILYGANLCALKKKDGGIRPIAVGMTYRRLAAKICCKKVAPLLSNLFQPLQLGFGSRGGCEAAVHSVRTFLTQNCGDLLLKVDVKNAFNSVDRGALLTQVRDKIPNLYAFLWQCYSAPSKLSYHGNEITSAVGCQQGDPLGPAVFSLAIHPIIQRLQSRLNVWYLDDGTLGGDANTLFDDLAFLTTEFRSIGLELNFSKCELFIPKAFPEKDLVIQKMCSLAPNIKIVDNSSLRLLGSPILEESFPLFIDEKIQNFLQVSDRLTKINTHMAFTIIRFCVFVPKFTYLVRCCQLWKHAELIQNLDNIIKKTLSMILNINLNNREWLQATLPVRLGGLGIRSVAGVALPAFLSSVHSNLPLINKILSTTSHIDVPYMNEARNAWVVACPNTDFPKTPSLQRQWDGPICEQVRKQLLNTCLSSADRARLLAVAEWESGLWLQALPSPNTGTLLDSSTFRIAASLRLGTPCGAPHRCQCGVAVDQLGHHGLSCTRSSGRIPRHASLNDIIRRALTTANCAAILEPSGLIRDDGKRPDGMTLIPWKMGRPLVWDATCVDTFAPSHLPRTQIRAGAAAEFAEDLKRRKYSTLDSGYIFEPFGVETMGPWGPGAKKIFKELSSRLVDATREQNAGLYFAQRLSIAIQRGNGASVLGTIPIDSGLLE

SEQ ID NO: 19163 - protein, 998 aa, Agriopis aurantiaria
MILWTIFVVVFFYCLFKFLIMNPIVVPPRCAQVDGNGFQQTNVTQENLVRCLECTQERFFKGNRGLKIHKSKCHKPANIPLSAPISHQNPFNVSSFPTQPFWKTLASNKINRPVLKRIPRGARISVATALSHAIKAVVSHNTKCSWEHLLSFPSAVLHVIPDKTNKKSLTTRVKENCVKYSNQGGTTLILVNDGDTNQNFKFSGRPETESATYKLVESKLSDGDIKGAARILFSSDTIAPSNSETLSILEGKHPPPEGNLLLPEAPVDGENTVEAMALEVSAAVTSFQNGSAGGLDNLTPQHLKDLICGASGEAGEALLRDLTALMNLMLSGQVNGDITDILYGANLCALKKKDGGIRPIAVGMTYRRLAAKICCKKVGPVLANLFQPRQLGFGSRGGCEAAVHSVRTFLAQNCGDLLLKVDLKNAFNSVNRGALLTQVKEKIPNLYSFLWQCYGSSSKLTYHGNEIISAVGCQQGDPLGPAVFSLAIHPIIQRLQSKLNVWYLDDGTLGGDANTLYDDLALLKSEFRTIGLELNFSKCELYIPDSYPEKDLIIQKFNILAPNINIVGNSTLRLLGSPIMDESFPFFIEEKIQNFMQCSDRLSKINTHMAFTIIRFCLFVPKFTYLVRCSQLWKHPDILQKLDKIIRNTLSTILNVNLQDREWLQASLPVRLGGLGIRSIAGVALPAFLSSVHSNQLLIEQILLNSYDVEVSCMNEAREAWKVVCPSTDLPLTPSSQRLWDGPICERVRKQLLDTCLSSTDRARLLAVGEWESGLWLQALPSPNTGTLLDSSTFRIATSLRLGASCCAPHRCQCGVPVDQLGHHGLSCTRSAGRIPRHASLNDIIRRAFTTANCAAVLEPTGLVRGDGRRPDGMTLIPWKMGRPLVWDATCVDTFAPSHLSGTQIRAGAAAESAEDLKRRKYGTLDSGYIFEPFGVETMGPWGSGAKKIFKDLSSRLIDATRDQNAGLYFAQRVSIAIQRGNGASILGTVPTGSGLIE

SEQ ID NO: 19164 - protein, 993 aa, Biston betularia
MFIWTIFIAVFFYVVYKLMDTFVSQRCAQLDVDGLNRATVSQDNLMRCPDCTQDRYFKGLRGLKIHRGKCHRSVTPLSAPNSNQDPISTAYTTQLFSKNLAYSKINSPVIKRIPRGARVPVAAALSHAIKAVIKQNSKHSWEQLLSFPYAVLHVSYEVNNKKSLTLRIKENCVKYTTLEDTTLLSANSSDTNQNFKFLLKPLSESTLYKRVESKLSDGDIKGAARILFSSDTFAPMNPETLSLLEGKHPPSAVDMILPPAPVEGDESVEATTSEVSAAVMSFQSGSAGGLDALTPQHLRDLISGACGETGEALLRDLTALMNLMLSGRVNDDITNILYGANLCALKKKDGGIRPIAVGMTYRRLAAKICCKKVAPLLSNLFQPLQLGFGSRGGCEAAVHSVRTFLTQNCGGLLLKVDVKNAFNSVDRSALLTQVRDKIPNLYAFLWQCYSAPSKLSYHGNEITSAVGCQQGDPLGPAVFSLAIHPIIQRLQSRLNVWYLDDGTLGGDANTLFDDLAFLTTEFRSIGLELNFSKCELFIPKAFPEKDLVIQKMCSLAPNIKIVDNSSLRLLGSPILEESFPLFIDEKIQNFLQVSDRLTKINTHMAFTIIRFCVFVPKFTYLVRCCQLWKHAELIQNLDNIIKKTLSMILNINLNNREWLQATLPVRLGGLGIRSVAGVALPAFLSSVHSNLPLINKILSTTSHIDVPYMNEARNAWVVACPNTDFPKTPSLQRQWDGPICEQVRKQLLNTCLSSADRARLLAVAEWESGLWLQALPSPNTGTLLDSSTFRIAASLRMGTPCGAPHRCQCGVAVDQLGHHGLSCTRSSGRIPRHASLNDIIRRALTTANCAAILEPSGLIRDDGKRPDGMTLIPWKMGRPLVWDATCVDTFAPSHLPRTQIRAGAAAEFAEDLKRRKYSTLDSGYIFEPFGVETMGPWGPGAKKIFKELSSRLVDATREQNAGLYFAQRLSIAIQRGNGASVLGTIPIDSGLLE

SEQ ID NO: 19165 - protein, 993 aa, Biston betularia
MFIWTIFIAVFFYVVYKLMDTFVSQRCAQLDVDGLNRATVSQDNLMRCPDCTQDRYFKGLRGLKIHRGKCHRSVTPLSAPNSNQDPVSTAYTTQLFSKNLAYSKINSPVIKRIPRGARVPVAAALSHAIKAVIKQNSKHSWEQLLSFPYAVLHVSYEVNNKKSLTLRIKENCVKYTTLEDTTLLSANSSDTNQNFKFLLKPLSESALYKRVESKLSDGDIKGAARILFSSDTFAPMNPETLSLLEGKHPPSAVDMILPPAPVEGDESVEATTSEVSAAVMSFQSGSAGGLDALTPQHLRDLISGACGETGEALLRDLTALMNLMLSGRVNDDITNILYGANLCALKKKDGGIRPIAVGMTYRRLAAKICCKKVAPLLSNLFQPLQLGFGSRGGCEAAVHSVRTFLTQNCGDLLLKVDVKNAFNSVDRGALLTQVRDNIPNLYAFLWQCYSAPSKLSYHGNEITSAVGCQQGDPLGPAVFSLAIHPIIQRLQSRLNVWYLDDGTLGGDANTLFDDLAFLTTEFRSIGLELNFSKCELFIPKAFPEKDLVIQKMCSLAPNIKIVDNSSLRLLGSPILEESFPLFIDEKIQNFLQVSDRLTKINTHMAFTIIRFCVFVPKFTYLVRCCQLWKHAELIQNLDNIIKKTLSMILNINLNNREWLQATLPVRLGGLGIRSVAGVALPAFLSSVHSNLPLINKILSTTSHIDVPYMNEARNAWVVACPNTDFPKTPSLQRQWDGPICEQVRKQLLNTCLSSADRARLLAVAEWESGLWLQALPSPNTGTLLDSSTFRIAASLRLGTPCGAPHRCQCGVAVDQLGHHGLSCTRSSGRIPRHASLNDIIRRALTTANCAAILEPSGLIRDDGKRPDGMTLIPWKMGRPLVWDATCVDTFAPSHLPRTQIRAGAAAEFAEDLKRRKYSTLDSGYIFEPFGVETMGPWGPGAKKIFKELSSRLVDATREQNAGLYFAQRLSIAIQRGNGASVLGTIPIDSGLLE

SEQ ID NO: 19166 - protein, 1015 aa, Biston betularia
MCSSSEYMTVQDQRVKILSFTFYVYLDNFYSRVFYVVYKLMDTFVSQRCAQLDVDGLNRATVSQDNLMRCPDCTQDRYFKGLRGLKIHRGKCHRSVTPLSAPNSNQDPVSTAYTTQLFSKNLAYSKINSPVIKRIPRGARVPVAAALSHAIKAVIKQNSKHSWEQLLSFPYAVLHVSYEVNNKKSLTLRIKENCVKYTTLEDTTLLSANSSDTNQNFKFLLKPLSESALYKRVESKLSDGDIKGAARILFSSDTFAPMNPETLSLLEGKHPPSAVDMILPPAPVEGDESVEATTSEVSAAVMSFQSGSAGGLDALTPQHLRDLISGACGETGEALLRDLTALMNLMLSGRVNDDITNILYGANLCALKKKDGGIRPIAVGMTYRRLAAKICCKKVVPLLSNLFQPLQLGFGSRGGCEAAVHSVRTFLTQNCGDLLLKVDVKNAFNSVDRGALLTQVRDKIPNLYAFLWQCYSAPSKLSYHGNEITSAVGCQQGDPLGPAVFSLAIHPIIQRLQSRLNVWYLVDGTLGGDANTLFDDLAFLTTEFRSIGLELNFSKCELFIPKAFPEKDLVIQKMCSLAPNIKIVDNSSLRLLGSPILEESFPLFIDEKIQNFLQVSDRLTKINTHMAFTIIRFCVFVPKFTYLVRCCQLWKHAELIQNLDNIIKKTLSMILNINLNNREWLQATLPVRLGGLGIRSVAGVALPAFLSSVHSNLPLINKILSTTSHIDVPYMNEARNAWVVACPNTDFPKTPSLQRQWDGPICEQVRKQLLNTCLSSADRARLLAVAEWESGLWLQALPSPNTGTLLDSSTFRIAASLRLGTPCGAPHRCQCGVAVDQLGHHGLSCTRSSGRIPRHASLNDIIRRALTTANCAAILEPSGLIRDDGKRPDGMTLIPWKMGRPLVWDATCVDTFAPSHLPRTQIRAGAAAEFAEDLKRRKYSTLDSGYIFEPFGVETMGPWEPGAKKIFKELSSRLVDATREQNAGLYFAQRLSIAIQRGNGASVLGTIPIDSGLLE

SEQ ID NO: 19167 - protein, 993 aa, Biston betularia
MFIWTIFIAVFFYVVYKLMDTFVSQRCAQLDVDGLNRATVSQDNLMRCPDCTQDRYFKGLRGLKIHRGKCHRSVTPLSAPNSNQDPVSTAYTTQLFSKNLAYSKINSPVIKRIPRGARVPVAAALSHAIKAVIKQNSKHSWEQLLSFPYAVLHVSYEVNNKKSLTLRIKENCVKYTTLEDTTLLSANSSDTNQNFKFLLKPLSESALYKRVESKLSDGDIKGAARILFSSDTFAPMNPETLSLLEGKHPPSAVDMILPPAPVEGDESVEATTSEVSAAVMSFQSGSAGGLDALTPQHLRDLISGACGETGEALLRDLTALMNLMLSGRVNDDITNILYGANLCALKKKDGGIRPIAVGMTYRRLAAKICCKKVAPLLSNLFQPLQLGFGSRGGCEAAVHSVRTFLTQNCGDLLLKVDVKNAFNSVDRGALLTQVRDKIPNLYAFLWQCYSAPSKLSYHGNEITSAVDCQQGDPLGPAVFSLAIHPIIQRLQSRLNVWYLDDGTLGGDANTLFDDLAFLTTEFRSIGLELNFSKCELFIPKAFPEKDLVIQKMCSLAPNIKIVDNSSLRLLGSPILEESFPLFIDEKIQNFLQVSDRLTKINTHMAFTIIRFCVFVPKFTYLVRCCQLWKHAELIQNLDNIIKKTLSMILNINLNNREWLQATLPVRLGGLGIRSVAGVALPAFLSSVHSNLPLINKILSTTSHIDVPYMNEARNAWVVACPNTDFPKTPSLQRQWDGPICEQVRKQLLNTCLSSADRARLLAVAEWESGLWLQALPSPNTGTLLDSSTFRIAASLRLGTPCGAPHRCQCGVAVDQLGHHGLSCTRSSGRIPRHASLNDIIRRALTTANCAAILEPSGLIRDDGKRPDGTTLIPWKMGRPLVWDATCVDTFAPSHLPRTQIRAGAAAEFTEDLNRRKYSTLDSGYIFEPFGVETMGPWGPGAKKIFKELSSRLVDATREQNAGLYFAQRLSIAIQRGNGASVLGTIPIDSGLLE

SEQ ID NO: 19168 - protein, 932 aa, Biston betularia
MPNGGSTEEKEVDARGGFWSVWMLSIIESDIPRQGLMTRNSIFRTSGEKKTRIPTYTPTHAHPHTHTYTYTLLQNSKHSWEQLLSFPYAVLHVSYEVNNKKSLTLRIKENCVKYTTLEDTTLLSANSSDTNQNFKFLLKPLSESALYKRVESKLSDGDIKGAARILFSSDTFAPMNPETLSLLEGKHPPSAVDMILPPAPVEGDESVEATTSEVSAAVMSFQSGSAGGLDALTPQHLRDLISGACGETGEALLRDLTALMNLMLSGRVNDDITNILYGANLCALKKKDGGIRPIAVGMTYRRLAAKICCKKVAPLLSNLFQPLQLGFGSRGGCEAAVHSVRTFLTQNCGDLLLKVDVKNAFNSVDRGALLTQVRDKIPNLYAFLWQCYSAPSKLSYHGNEITSAVGCQQGDPLGPAVFSLAIHPIIQRLQSRLNVWYLDDGTLGGDANTLFDDLAFLTTEFRSIGLELNFSKCELFIPKAFPEKDLVIQKMCSLAPNIKIVDNSSLRLLGSPILEESFPLFIDEKIQNFLQVSDRLTKINTHMAFTIIRFCVFVPKFTYLVRCCQLWKHAELIQNLDNIIKKTLSMILNINLNNREWLQATLPVRLGGLGIRSVAGVALPAFLSSVHSNLPLINKILSTTSHIDVPYMNEARNAWVVACPNTDFPKTPSLQRQWDGPICEQVRKQLLNTCLSSADRARLLAVAEWESGLWLQALPSPNTGTLLDSSTFRIAASLRLGTPCGAPHRCQCGVAVDQLGHHGLSCTRSSGRIPRHASLNDIIRRALTTANCAAILEPSGLIRDDGKRPDGMTLIPWKMGRPLVWDATCVDTFAPSHLPRTQIRAGAAAEFAEDLKRRKYSTLDSGYIFEPFGVETMGPWGPGAKKIFKELSSRLVDATREQNAGLYFAQRLSIAIQRGNGASVLGTIPIDSGLLE

SEQ ID NO: 19169 - protein, 993 aa, Biston betularia
MFIWTIFIAVFFYVVYKLMDTFVSQRCAQLDVDGLNRATVSQDNLMRCPDCTQDRYFKGLRGLKIHRGKCHRSVTPLSAPNSNQDPVSTAYTTQLFSKNLAYSKINSPVIKRIPRGARVPVAAALSHAIKAVIKQNSKHSWEQLLSFPYAVLHVSYEVNNKKSLTLRIKENCVKYTTLEDTTLLSAKSSDTNQNFKFLLKPLSESALYKRVESKLSDGDIKGAARILFSSDTFAPMNPETLSLLEGKHPPSAVDMILPPAPVEGDESVEATTSEVSAAVMSFQSGSAGGLDALTPQHLRDLISGACGETGEALLRDLTALMNLMLSGRVNDDITNILYGANLCALKKKDGGIRPIAVGMTYRRLAAKICCKKVAPLLSNLFQPLQLGFGSRGGCEAAVHSVRTFLTQNCGDLLLKVDVKNAFNSVDRGALLTQVRDKIPNLYAFLWQCYSAPSKLSYHGNEITSAVGCQQGDPLGPAVFSLAIHPIIQRLQSRLNVWYLDDGTLGGDANTLFDDLAFLTTEFRSIGLELNFSKCELFIPKAFPEKDLVIQKMCSLAPNIKIVDNSSLRLLGSPILEESFPLFIDEKIQNFLQVSDRLTKINTHMAFTIIRFCVFVPKFTYLVRCCQLWKHAELIQNLDNIIKKTLSMILNMNLNNREWLQATLPVRLGGLGIRSVAGVALPAFLSSVHSNLPLINKILSTTSHIDVPYMNEARNAWVVACPNTDFPKTPSLQRQWDGPICEQVRKQLLNTCLSSADRARLLAVAEWESGLWLQALPSPNTGTLLDSSTFRIAASLRLGTPCGAPHRCQCGVAVDQLGHHGLSCTRSSGRIPRHASLNDIIRRALTTANCAAILEPSGLIRDDGKRPDGMTLIPWKMGRPLVWDATCVDTFAPSHLPRTQIRAGAAAEFAEDLKRRKYSTLDSGYIFEPFGVETMGPWGPGAKKIFKELSSRLVDATREQNAGLYFAQRLSIAIQRGNGASVLGTIPIDSGLLE

SEQ ID NO: 19170 - protein, 989 aa, Blastobasis adustella
MLFLCVICIFVCYIFRYNSFFTKVQRNSRMDVAENERIVSLENLVQCSECSQTRFFKGQRGLKIHQTKCHKRLIPLSAPTTSTIHNSSVKPFWQTLSHHKITTPVVNRIPRGARITVAAALSQAIKTVISQNSKQAWEHLLLFPYAVFYVVPEAGNNKSLTARIKENCVKYSTLLDPTYPNNAYVAIKNSKFSVKHIAESSTYRLVEKKLSDGDVKGAARILFSCDTIAPTTPETLSALKLKHPSSAVGSKLPEAPQDFNDSIEASSQDVSAAVASFNSGSAGGLDALTPQHLKDLLCGTSGDSGESLLRDLTSLMNLMLSGRVNGDIIEILYGANLCALKKKDGGIRPIAVGMTYQRIAAKICCKKTAPKLCDLFQPIQLGFGSQGGCEAAVHSLRTYLKQDCGQALLKLDVRNAFNSVDRGALLTQVKDKIPNLYNFLWQCYGYSSKLTYSGNEITSAVGCQQGDPLGPAIFSLAIHPIIQRIQSKLNIWYLDDGTLGGDVDTLCKDLVFLIDEFRAIGLDLNLSKCELYISNTCPAKDLAIQKFNDLAPNITIVDKYSLRLLGSPVLDESLPLFFEEKYQNFLQCSDCLTKINIHMAFTIIRFCLFVPKFTYTIRCCQLWKHPDIFQRIDNILKNTLAVNLNINLEERGWLQASLPVRLGGLGIRSISGVALPAFLSSIHSTASLINKILRNSTWDKKISYLDDARNAWLSACPNSDLLITPSSQRQWDGPLCEQVRNNLLHTCVSSADRARLLAVAEWESGLWLQVLPSANTGALIDNSSFRIAASLRLGASCCAPHRCQCGVAVDRLGHHGLSCVKSAGRFSRHSSLNDIIRRAFASAKCAAVLEPGGRMRDDGKRPDGMTLVPWKLGRPLVWDATCVDTLAPSHLSRTQGRAGAAAESAEALKRLKYSNLDSGYLFEPFGVETLGPWGPGAHRIFKDVSARLVEASCDQNAGLYLAQRLSVAIQRGNAASILGTLPNGSGLLD

SEQ ID NO: 19171 - protein, 960 aa, Blastobasis adustella
MDVAENERIVSLENLVQCSECSQTRFFKGQRGLKIHQTKCHKRLIPLSAPTTSTSHNSSVQPFWQTLSHHKITTPVVKRIPRGARITVVAALSQAIKTVISQNSKQAWEHLLLFPYAVFYVVPEAGNNKSLTARIKENCVKYSTLLDPTYPNNASVAIKNSKFSVKHISESSTYRLVENKLSDGDVKGAARILFSCDTIAPTTPETLSALKLKHPSSAVGSKLPEAPQDFNDSIEASAQDVSAAVASFNSGSAGGLDALTPQHLKDLLCGTSGESGENLLRDLTSLMNLMLSGRVNGDIIEILYGANLCALKKKDGGIRPIAVGMTYRRIAAKICCKKTAPKLCDLFQPIQLGFGSRGVCEAAVHSLRTYLKQDCGQALLKLDVRNAFNSVDRGALLTQVKDKIPNLYNFLWQCYGYSSKLTYSGNEITSAVGCQQGDPLGPAIFSLAIHPIIQRLQSKLNIWYLDDGTLGGDVDTLCKDLVFLIDEFRAIGLDLNLSKCELYISNTCPAKDLAIQKFNDLAPNITIVDKYSLRLLGSPVLDESLPLFFEEKIQNFLQCSDRLTKINIHMAFTIIHFCLFVPKFTYTIRCCQLWKHPDIFQRIDNILKNTLAVNLNINLEERGWLQASLPVRLGGLGIRSISGVALPAFLSSIHGTASLINKILTNSTWDKKISYLDDARYAWLSACPNSDPPITPSSQRQWDGPLCEQVRNNLLHTCVSSADRARLLAVAEWESGLWLQVLPSANTGTLIDNSSFRIAASLRLGASCCAPHRCQCGVAVDRLGHHGLSCVKSAGRFSRHSSLNDIIRRAFASAKCAAVLEPGGLMRDDGKRPDGMTLVPWKLGRPLVWDATCVDTLAPSHLSRTQGRAGAAAESAEALKRLKYSNLDNGYLFEPFGVETLGPWGPGAHRIFKDVSARLVEASCDQNAGIYLAQRLSIAIQRGNAASILGTLPNGSGLLD

SEQ ID NO: 19172 - protein, 962 aa, Blastobasis adustella
MDVAENEGIVSLENLVQCNECSQIRFFKGQRGLKIHQTKCHKRLIPLSAPTTTTSTSHNSSVKPFWQTLSHYKITTPVVKRIPRGARITVAAALSQAIKTVILQNSKQAWEHLLLFPYAVFYVVPEAGNNKSLTARIKENCVKYSTLLDPTYPNNASVAIKNSKFSVKHIAESSTYRLVEKKLSDGDVKGAARILFSCDTIAPTTPETLSALKLKHPSSAVSSKLPEAPQDLNDSIEASAQDVSAAVASFNSGSAGGLDALTPQHLKDLLCGTGGESGESLLRDLTSLMNLMLSGRVNGDIIEILYGANLCALKKKDGGIRPIAVGMTFRRIAAKICCKKTAPKLCDLFQSIQLGFGSRGGCEAVVHSLRTYLKQDCGQALLKLDVRNAFNSVDRGALLTQVKDKIPNLYNFLWQCYGYSSKLTYSGNEITSAVGCQQGDPLRPAIFSLAIHPIIQRLQSKLNIWYLDDGTLGGDVDTLCKDLVFLIDEFRAIGLDLNLSKCELYISNTCPAKDLAIQKFNDLAPNITIVDKYSLRLLGSPVLDESLPLFFEEKILNFLQGWDRLTKINIHMAFTIIRFGLFVPKFTYTIRCCQLWKHPDIFQRIDNILKNTLAVNLNINLEERGWLQASLPVRLGDLGITSISGVALPAFLSSIHGTASLINKILSNSTWGKKIRYLDDARNAWLSACSNSDPPITPSSQRQWYGPLCEQVRNNLLHTSVSSADRARLLAVAEWESGLWLQVLPSANTGTLIDNSSFRIAVSLRLGASCCAPHRCQCGVAVDRLGHHGLSCVKSAGRFSRHSSLNDIIRRAFASAKCAAVLEPGGLMRDDGKRPDGMTLVPWKLGRPLVWDAICVDTLAPSHLSRTQGRAGAAAESAEALKRLKYSNLDSGYVFEPFGVETLGPWGPGAHRIFKDVSARLVEASCDQNAGLYLAQRLSIAIQRGNAASILGTLPNGSGLLV

SEQ ID NO: 19173 - protein, 816 aa, Hypena proboscidalis
MEEPFVSSPGTLPNSNLNLRPVAESAFYKTVESKLSDGDIKGAARVLFSSDTLAPLNTETLLELQARHPSPAACLQLPEAPSGSVDVAIDVAAHEVAAAVESFQSGSAGGLDGLTPQHLKDLLGAGSGEAGSALLRDLTALVSLMLSGRVNCGITELLYGANLIALKKKDGGIRPIAIGMVYRRLAAKIGCRLITPILETLFVPLQLGFGTRGGCEAAVHSVRAFVNGKCGDVLLKVDVKNAFNSVDRGALLRQVKDKIPNLYNFLWQCYGSTSKLTYFDNEIISAVGCQQGDPLGPAIFSLAIHPVIQRLQSKLNLWYLDDGTFGGNVNRALDDLSLIIEEFRLIGLELNFSKCELFIFDDCPTKHLVIQKFNDLAPGIKLNHKSSLCLLGSPILEEAFPSFIDNKIQNFLQTTNRLSKINTHMAFTIIKFCLFVPKFTYVLRCCQLWKHTQLLQNLDNFVKTTLALILNINLDERAWLQASLPVRWGGIGIRSISNVALPAFLSSVHATQNLSNKILAASLVNDFDLSSVGEARDAWRSACPNSDFPSNPSSQRLWDGPLCELVRKKLLDTCSSSADRARLIASAQWESGLWLHALPSPNTGTLMDNSSFRIAVSLRLGAPCCAPHRCQCGAAVSPLGHHGLSCVKSAGRFSRHFSLNDIVRRALTTVNCAAVLEPNGLSRDDGKRPDGMTLVPWRLGRPLVWDATCVDTLAPSHLPGTRDRAGAAAESAENLKRRKYSLLDSGYMFVPFGVETLGPWGPGAHALYKDVAKRLVESTRSRSAGIFFGQRISIAIQRGNAASISGTMPTGSGLLD

SEQ ID NO: 19174 - protein, 991 aa, Hypena proboscidalis
MLLFLVFSFIVCLYFYQVRIMRCARTNQGESSVHNAVSQQDLVQCSECSDGRLFKGQRGLKVHQGHCHKKTNLSLPASNNSSYLHSNINNVLNFSQTLSSYKNSKPLIKHIPRGARLSVASALSQSIKAVVLHNDKRTWEHLLFFPCAVLHVSRDKNNKKSLTSRIKENCVRYVAMEEPFVSSPGTLPNSNLNLRPVAESAFYKTVESKLSDGDIKGAARVLFSSDTLAPLNTETLLELQAKHPSPAACLQLPEAPSGSVDVAIDVAAHEVAAAVESFQSGSAGGLDGLTPQHLKDLLGAGSGEAGSALLRDLTALVSLMLSGRVNCGITELLYGANLIALKKKDGGIRPIAIGMVYRRLAAKIGCRLITPILETLFVPLQLGFGTRGGCEAAVHSVRAFVNGKCGDVLLKVDVKNAFNSVDRGALLRQVKDKIPNLYNFLWQCYGSTSKLTYFDNEIISAVGCQQGDPLGPAIFSLAIHPVIQRLQSKLNLWYLDDGTFGGNVNTALDDLSLIIEEFRLIGLELNFSKCELFIFDDCPTKHLVIQKFNDLAPGIKLIDNSSLCLLGSPILEEAFPSFIDNKIQNFLQTTNRLSKINTHMAFTIIKFCLFVPKFTYVLRCCQLWKHTQLLQNLDNIVKTTLALILNINLDERAWLQASLPVRWGGIGIRSISNVALPAFLSSVHATQNLSNKILAASLVNDFDLSGVGEARDAWRSACPNSDFPSNPSSQRLWDGPLCELVRKKLLDTCSSSADRARLIASAQWESGLWLHALPSPNTGTLMDNSSFRIAVSLRLGAPCCAPHRCQCGVAVSPLGHHGLSCVKSAGRFSRHFSLNDIVRRALTTVNCAAVLEPNGLSRDDGKRPDGMTLVPWRLGRPLVWDATCVDTLAPSHLPGTRDRAGAAAESAENLKRRKYSLLDSGYMFVPFGVETLGPWGPGAHALYKDVAKRLIESTRSRSAGIFFGQRISIAIQRGNAASISGTMPTGSGLLD

SEQ ID NO: 19175 - protein, 721 aa, Ennomos quercinarius
MEDVSDALQSFYRGSAAGMDGLRPEHLKELSSASAGDNEQRLLESLTRLCNFLLRGNLNPEICPFLYGGSLCALQKKDGGIRPIAVGSTFRRLVAKLCCQAVRHEITSYLQPHQLGFGTPLGCEAAIHATRSFVMREGSDDVLIKLDIRNAFNSIDRGPMLSEVMVLTPSIFPFLSQCYSAPSNLSYDGECVLSQVGAQQGDPLGPLIFSMAIHKAIKSLESPLNIWYLDDGSLGGTPDVVERDVMLLFPALKELGLEVNTAKCEFYPCSPAAAKSRDRFSSLIPGLRVMDREALSLLGAPIFPEGVRDSLQTKTQTLASLAYHFQHLPAHVSLTLLRTCFAMPKLTYVIRTAPAWLLPEEVFRFDDTLKRIVEETLNISLSETQWRQASLPIRFGGLGVRRLQEFGPIAFLASSFGVAGLVTSILPGFGTIRIPFAAEALNVWSRLYPDAELPKTPVSQRSWDNISGNRILAQLCNGATGVELARFNAASKPESGAWLHALPSPYLGTLLDNDSLRVAAGLRLGCAVCEPHVCVCGAWVESSGIHGLSCTRSAGRRPRHHALNEVIRRALMSAEIPCVLEPPGLSRLDGKRPDGLTLIPWRRGRCLIWDATCVCTYAACHLTGTQREAGAGAETAAGGKHLKYAVLESAYEFVPFAVETSGPWCSEAKKFVADLGRRLRERKRDPQVGHYLVQHISLAIQRGNAASLMGTFGRGGTDGGV

SEQ ID NO: 19176 - protein, 941 aa, Ennomos quercinarius
MSSPSRAPCPHCPGSTRLFSVPHGLRVHTGRKHKCTPVPNAVVPAPATPAATVVPGNSSSLSLDVLPSFKARVRVLRHVPKGARCLAAGKLSHLIDQCIHSNSTADWTELLFFAYTALRLPDQGDKKSLTSKVKANIEGAHLGLPTECSPRRSPSLYKTVQAKVYEGDLRGAARLLTSDCTFAPPGGETLATLKEKHPAPTRPPYVPPQCVGSTSCLVVKMEDVSDALQSFYRGSAAGMDGLRPEHLKELSSASAGDNGQRLLESLTRLCNFLLRGNLNPEICPFLYGGSLCALQKKDGGIRPIAVGSTFRRLVAKLCCQAVRHEITSYLQPHQLGFGTPLGCEAAIHATRSFVMREGSDDVLIKLDIRNAFNSIDRGLMLSEVMVLTPSIFPFLSQCYSAPSNLSYDGECVLSQVGAQQGDPLGPLIFSMAIHKAIKSLESPLNIWYLDDGSLGGTPDVVERDVMSLFPALKELGLEVNTAKCEFYPCSPAAAKSRDRFSSLILGLRVMDREALSLLGAPIFPEGVRDSLQTKTQTLASLANHFQHLPAHVSLTLLRTCFAMPKLTYVIRTAPTWLLSEEVFHFDDTLKRIVEETLNISLSEMQWRQASLPIRFGGLGVRRLQEFGPIAFLASSFGVAGLVTSILPGFGTIRIPFAAEALNVWSRLYPDAELPKTPVSQRSWDNISGNRILAQLCNGVTGVELARFNAASKPESGAWLHALPSPYLGTLLDNDSLRVAAGLRLGCAVCEPHVCVCGAWVESSGIHGLSCTRSAGRRPRHHALNEVIRRALMSAEIPCVLEPPGLSRLDGKRPDGLTLIPWRRGRCLIWDATCVCTYAACHLNGTQREAGAGAETAAGGKHLKYAVLESAYEFVPFAVETSGPWCSEAKKFVADLGRRLRERKRDPQVGHYLVQHISLAIQRGNAASLMGTFGRGGTDGGV

SEQ ID NO: 19177 - protein, 904 aa, Ennomos quercinarius
MVNKQSNRLPIFIVPVGYLLYSHNIFTKRVIFKARVRVLRHVPKGARCLAAGKLSHLIDQCIHSNSTADWTELLFFAYTALRLPDQGDKKSLTSKVKANIEGAHLGLPTECSPRRSPSLYKTVQAKVYEGDLRGAARLLTSDCTFAPPGGETLATLKEKHPAPTRPPYVPPQCVGSTSCLVVKMEDVSDALQSFYRGSAAGMDGLRPEHLKELSSASAGDNGQRLLESLTRLCNFLLRGNLNPEICPFLYGGSLCALQKKDGGIRPIAVGSTFRRLVAKLCCQAVRHEITSYLQPHQLGFGTPLGCEAAIHATRSFVMREGSDDVLIKLDIRNAFNSIDRGPMLSEVMVLTPSIFPFLSQCYSAPSNLSYDGECVLSQVGAQQGDPLGPLIFSMAIHKAIKSLESPLNIWYLDDGSLGGTPDVVERDVMSLFPALKELGLEVNTAKCEFYPCSPAAAKSRDRFSSLIPGLRVMDREALSLLGAPIFPEGVRDSLQTKTQTLASLANHFQHLPAHVSLTLLRTCFAMPKLTYVIRTAPTWLLSEEVFHFDDTLKRIVEETLNISLSETQWRQASLPIRFGGLGVRRLQEFGPIAFLASSFGVAGLVTSILPGFGTIRIPFAAEALNVWSRLYPDAELPKTPVSQRSWDNISGNRILAQLCNGATGVELARFNAASKPESGAWLHALPSPYLGTLLDNDSLRVAAGLRLGCAVCEPHVCVCGAWVESSGIHGLSCTRSAGRRPRHHALNEVIRRALMSAEIPCVLEPPGLSRLDGKRPDGLTLIPWRRGRCLIWDATCVCTYAACHLNGTQREAGAGAETAAGGKHLKYAVLESAYEFVPFAVETSGPWCSEAKKFVADLGRRLRERKRDPQVGHYLVQHISLAIQRGNAASLMGTFGRGGTDGGV

SEQ ID NO: 19178 - protein, 939 aa, Ennomos quercinarius
MSSPSRAPCPHCPGSTRLFSVPHGLRVHIGRKHKCTPVPNALVPAPATPAATVVPGNSSSLSLDVLPSFKARVRVLRHVPKGARCLAAGKLSHLIDQCIHSNSTADWTELLFFAYTALRLPDQGDKKSLTSKVKANIEGAHLGLPTECSPRRSPSLYKTVQAKVYEGDLRGAARLLTSDCTFAPPGGETLATLKEKHPAPTRPPYVPPQCVGSTSCLVVKMEDVSDALQSFYRGSAAGMDGLRPEHLKELSSASAGDNGQRLLESLTRLCNFLLRGNLNPEICPFLYGGSLCALQKKDGGIRPIAVGSTFRRLVAKLCCQAVRHEITSYLQPHQLGFGTPLGCEAAIHATRSFVMREGSDDVLIKLDIRNAFNSIDRGPMLSEVMVLTPSIFPFLSQCYSAPSNLSYDGECVLSQVGAQQGDPLGPLIFSMAIHKAIKSLESPLNIWYLDDGSLGGTPDVVERDVMSLFPALKELGLEVNTAKCEFYPCSPAAAKSRDRFSSLIPGLRVMDREALSLLGAPIFPEGVRDSLQTKTQTLASLANHFQHLHVSLTLLRTCFAMPKLTYVIRTAPTWLLSEEVFHFDDTLKRIVEETLNISLSETQWRQASLPIRFGGLGVRRLQEFGPIAFLASSFGVAGLVTSILPGFGTIRIPFAAEALNVWSRLYPDAELPKTPVSQRSWDNISGNRILAQLCNGATGVELARFNAASKPKSGAWLHALPSPYLGTLLDNDSLRVAAGLRLGCAVCEPHVCVCGAWVESSGIHGLSCTRSAGRRPRHHALNEVIRRALMSAEIPCVLEPPGLSRPDGKRPDGLTLIPWRRGRCLIWDATCVCTYAACHLNGTQREAGAGAETAAGGKHLKYAVLESAYEFVPFAVETSGPWCSEAKKFVADLGRRLRERKRDPQVGHYLVQHISLAIQRGNAASLMGTFGRGGTDGGV

SEQ ID NO: 19179 - protein, 947 aa, Lymantria dispar
MTTPTRAPCPHCPDSAKLYTVPHGLRVHIGRKHKDVLSLSSPDVGVSGPSGGSTVESHVDSGPSSFILNDLPVLKDKVRVLRHVPKGARCLAAGKLSSLIEQCLQSNCSEDWFALLTFAYTALRVPEQGDRKSLTAKVKANVEGCQRDLLEEDWVRKPLSIYKAVEAKVYDGDLKGAARLLTSECTFAPSDENTLSTLKEKHPAPSRPLYVPPASDLSPPCLAVRVTDVADALQSFQRGSASGLDGLRPDHLKELVSPASGDNGPRLLESVTRLCNFMLKGKLNPDICPFLYGASLCALQKKDGGIRPIAVGSTFRRLVAKLCCHAVKNPMANFLQPHQVGFGTQLGCEAAIHATRAFALREGSADVILKLDVRNAFNCIERDVIPSEVKTLIPAIFPFLYQCYSSPSNLSFNKTCILSQVGAQQGDPLGPLIFSLGIHKAISSLEAPLNIWYLDDGTIGGDIAAVERDVKLLFPALGEIGLEVNTSKCELYPCSPGAAADCDRFSLLIPGLKIVDRKSLQLLGAPVFPDGVQECLRTKTETLASLAGHFRHLPAHVSLTLLRNCFAMPKLTYMVRTAPSWQFPEEVDRFDCAIKCLLEETINVSLNESQWCQASLPIRHGGLGVRRLRETGPAAFLASSFGSAELVTQILSPNGDAICIPFQSEVLRGWSALYPGVNLPERPGCQRGWDEGTSRYLFSKMRGNSSGVELARLTAASRPESEAWLHALPSPNMGTLLDDDSLRVAVGLRLGCGVCEPHVCICGTHVDASGLHGLSCVRCAGRRPRHHAINEIIRRAFVSAEVPCVLEPPGLSRSDGKRPDGLTLIPWRKGRCLIWDATCVSTFAACHLSITQQCAGGGAEMAARVKHSKYACLESAYDFVPFAVETAGPWGSEARTLVQELGRRLRGKGRDPRSGWFIVQQVSLAIQRGNAASLMGTFGAGSVRGVI

SEQ ID NO: 19180 - protein, 947 aa, Lymantria dispar
MTTPTRAPCPHCPNSAKLYTVPHGLRVHIGRKHKDVLSLSPPDVGVSGPSGGSTVESHVDSGPSSFNLNDLPVLKDKVRVLRHVPKGARCLAAGKLSSLIEQCLQSNCSKDWFALLTFAYTALRVPEQGDGKSLTAKVKANVEGCQWDLLEEDWVRKPLSIYKAVEAKVYDGDLKGAARLLTSECSFAPSDENTLSTLKEKHPAPSHPLYVPPASDLSPPCLAVKVTDVADALQSFQRGSASGLDGLRPDHLKELVSPASGDNGLRLLESVTGLCNFMLKGKLNPDICPFLYGASLCALQKKDGGIRPIAVGSTFRRLVAKLCCHAVKNPMANFLQPHQVGFGTQLGCEAAIHATRAFALREGSADVILKLDVRNAFNCIERDVILSEVKTLIPAIFPFLYQCYSSPSNLSFNKTCILSQVGAQQGDPLGPLIFSLGIHKAISSLEAPLNIWYLDDGTIGGDIAAVERDIRLLFPALGEIGLEVNTSKCELYPCSPGAAADCDRFSLLIPGLKMVDRKSLQLLGAPVFPDGVQECLRTKTETLASLAGHFRHLPAHVSLTLLRNCFAMPKLTYVVRTAPSWQFPEEVDRFDCAIKRLLEETINVSLNESQWCQASLPIRHGGLGVRRLRETGPAAFLASSFGSAELVTQILSPNGDVICIPFQSEVLSSWSALYPGVNLPERPGCQRGWDEGTSRYLFSKMRGNSSGVELARLTAASRPESGAWLHALPSPNMGTLLDGDSLRVAVGLRLGCGVCEPHVCICGTHVDSSGLHGLSCVRCAGRRPRPHAINEIIRRAFVSAEVPCVLEPPGLSRLDGKRPDGLTLIPWRKGRCLIWDATCVSTFAASHLSATQQCAGGGAEMAARVKHSKYACLESAYDFVPFAVETAGPWGSEAKTLVQELGRRLRGKGRDPRSGWFIVQQVSLAIQRGNAASLIGTFGAGSVRGVI

SEQ ID NO: 19181 - protein, 920 aa, Lymantria dispar
MTTPTRAPCPHCPDSAKLYTVPHGLRVHIGRKHKDVLSLSSPDVGVSGPSGGSTVESHVDSGPSSFILNDLPVLKDKVRVLRHVPKGARCLAAGKLSSLIEQYLQSNCSKDWFALLTFAYTALRVPEQGDKKSLTAKVKANVEGCQRDLLEEDWVRKPLSIYKAVEAKVYDGDLKGAARLLTSECTFAPSDENTLSTLKEKHPAPSRPLYVPLASDLSPPCLAVRVTDVADALQSFQRGSASSLDGLRPDHLKELVSPASGDNGPRLLESVTRLCNFMLKGKLNPDICPFLYGASLCALQKKDGGIRPIAVGSTFRRLVAKLCCHAVKNPMANFLQPHQVGFGTQLGCEAAIHATRAFALREGSADVILKFDVRNAFNCIERDVILSEVKTLIPAIFPFLYQCYSSPSNLSFNKTCILSQVGAQQGDPLGPLIFSLGIHKAISSLEAPLNIWYLDDGTIGGDIAAVERDVKLLFPALGEIGLEVNTSKCELYPCSPGAAADCDRFSLLIPGLKIVDRKSLQLLGAPVFPDGVQECLRTKTETLASLAGHFRHLPAHVSLTLLRNCFAMPKLTYMVRTAPSWQFPEEVDRFDCAIKRLLEETINVSLNESQWCQASLPIRHGGLGVRRLRETGPAAFLASSFGSAELVTQILSPNGDAICIPFQSEVLSGWSALYPGVNLPERPGCQRGWDEGTSRYLFSKMRGNSSGVELARLTAASRPESGAWLHALPSPNMGTLLDDDSLRVAVGLRLGCGVCEPHVCICGTHVDASGLHGLSCVRCAGRRPRHHAINEIIRRAFVSAEVPCVLEPPGLSRSDGKRPDGRTLIPWRKGRCLIWDATCVSTFAACHLSITQQCAGGGAEMAARVKHSKYACLESAYDFVPFAVETAGPWGSEARTLVQELGRRLRGKGRDPRSGWFIVQ

SEQ ID NO: 19182 - protein, 670 aa, Lymantria dispar
MLKGKLNPDICPFLYGASLCALQKKDGGIRPIAVGSTFRRLVAKLCCHAVKNPMANFLQPDQVGFGTQLGCEAAIHATRAFALREGSADVILKLDVRNAFNCIERDVILSEVKTLIPAIFPFLYQCYSSPSNLSFNKTCILSHVGAQQGDPLGPLIFSLGIHKAISSLEAPLNIWYLDDGTIGGDIAAVERDIRLLFPALGEIGLEVNTSKCELYPCSPGAAADCDRFSLLIPGLKMVDRKSLQLLGAPVFPDGVQECLRTKTETLASLAGHFRHLPAHVSLTLLRNCFAMPKLTYVVRTAPSWQFPEEVDRFDCAIKRLLEETINVSLNESQWCQASLPIRHGGLGVRRLRETGPAAFLASSFGSAELVTQILSPNGDVICIPFQSEVLSSWSALYPGVNLPERPGCQRGWDEGTSRYLFSKMRGNSSGVELARLTAASRPESGAWLHALPSPNMGTLLDGDSLRVAVGLRLGCGVCEPHVCICGTHVDSSGLHGLSCVRCAGRRPRHHAINEIIRRAFVSAEVPCVLEPPGLSRLDGKRPDGLTLIPWRKGRCLIWDATCVSTFAACHLSATQQCAGGGAEMAARVKHSKYACLESAYDFVPFAVETAGPWGSEAKTLVQELGRRLRGKGRDPRSGWFIVQQVSLAIQRGNAASLIGTFGAGSVRGVI

SEQ ID NO: 19183 - protein, 947 aa, Lymantria dispar
MTTPTRAPCPHCPNSAKLYTVPHGLRVRIGRKHKDVLSLSPPDVGVSGPSGGSTVESHVDSGPSSFNLNGLPVLKDKVRVLRHVPKGARCLAAGKLSSLIEQCLQSNCSKDWFALLTFAYTALRVPEQGDGKSLTAKVKANVEGCQWDLLEEDWVRKPLSIYKAVEAKVYDGDLKGAARLLTSECSFAPSDENTLSTLKEKHPAPSHPLYVPPASDLSPPCLAVKVTDVADALQSFQRGSASGLDGLRPDHLKELVSPASGDNGLRLLESVTGLCNFMLKGKLNPDICPFLYGASLCALQKKDGGIRPIAVGSTFRRLVAKLCCHAVKNPMANFLQPDQVGFGTQLGCEAAIHATRAFALREGSADVILKLDVRNAFNCIERDVILSEVKTLIPAIFPFLYQCYSSPSNLSFNKTCILSQVGAQQGDPLGPLIFSLGIHKAISSLEAPLNIWYLDDGTIGGDIAAVERDIRLLFPALGEIGLEVNTSKCELYPCSPGAAADCDRFSLLIPGLKMVDRKSLQLLGAPVFPDGVQECLRTKTETLASLAGHFRHLPAHVSLTLLRNCFAMPKLTYVVRTAPSWQFPEEVDRFDCAIKRLLEETINVSLNESQWCQASLPIRHGGLGVRRLRETGPAAFLASSFGSAELVTQILSPNGDVICIPFQSEVLSSWSALYPGVNLPERPGCQRGWDEGTSRYLFSKMRGNSSGVELARLTAASRPESGAWLHALPSPNMGTLLAGDSLRVAVGLRLGCGVCEPHVCICGTHVDSSGLHGLSCVRCAGRRPRHHAINEIIRRAFVSAEVPCVLEPPGLSRLDGKRPDGLTLIPWRKGRCLIWDATCVSTFAAFHLSATQQCAGGGAEMAARVKHSKYACLESAYDFVPFAVETAGPWGSEAKTLVQELGRRLRGKGRDPRSGWFIVQQVSLAIQRGNAASLIGTFGAGSVRGVI

SEQ ID NO: 19184 - protein, 947 aa, Lymantria dispar
MTTPTRAPCPHCPNSAKLYTVPHGLRVHIGRKHKDVLSLSPPDVGVSGPSGGSTVESHVDSGPSSFNLNDLPVLKDKVRVLRHVPKGARCLAAGKLSSLIEQCLQSNCSKDWFALLTFAYTALRVPEQGDGKSLTAKVKANVEGCQWDLLEEDWVRKPLSIYKAVEAKVYDGDLKGAARVLTSECSFAPSDENTLSTLKEKHPAPSHPLYVPPASDLSPPCLAVKVTDVADALQSFQRGSASGLDGLRPDHLKELVSPASGDNGLRLLESVTGLCNFMLKGKLNPDICPFLYGASLCALQKKDGGIRPIAVGSTFRRLVAKLCCHAVKNPMANFLQPHQVGFGTQLGCEAAIHATRAFALREGSADVILKLDVRNAFNCIERDVILSEVKTLIPAIFPFLYQCYSSPSNLSFNKTCILSQVGAQQGDPLGPLIFSLGIHKAISSLEAPLNIWYLDDGTIGGDIAAVERDIRLLFPALGEIGLEVNTSKCELYPCSPGAAADCDRFSLLIPGLKMVDRKSLQLLGAPVFPDGVQECLRTKTETLASLAGHFRHLPAHVSLTLLRNCFAMPKLTYVVRTAPSWQFPEEVDRFDCAIKRLLEETINVSLNESQWCQASLPIRHGGLGVRRLRETGPAAFLASSFGSAELVTQILSPNGDVICIPFQSEVLSSWSALYPGVNLLERPGCQRGWDEGTSRYLFSKMRGNSSGVELARLTAASRPESGAWLHALPSPNMGTLLDGDSLRVAVGLRLGCGVCEPHVCICGTHVDSSGLHGLSCVRCAGRRPRHHAINEIIRRAFVSAEVPCVLEPPGLSRLDGKRPDGLTLIPWRKGRCLIWDATCVSTFAASHLSATQQCAGGGAEMAARVKHSKYACLESAYDFVPFAVETAGPWGSEAKTLVQELGRRLRGKGRDPRSGWFIVQQVSLAIQRGNAASLIGTFGAGSVRGVI

SEQ ID NO: 19185 - protein, 947 aa, Lymantria dispar
MTTPTRAPCPHCPDSAKLYTVPHGLRVHIGRKHKDVLSLSSPDVGVSGPSGGSTVESHVDSGPSSFIVNDLPVLKDKVRVLRHVPKGARCLAAGKLSSLIEQCLQSNCSKDWFALLTFAYTALRVPEQGDKKSLTAKVKANVEGCQRDLLEEDWVRKPLSIYKAVEAKVYDGDLKGAARLLTSECTFAPSDENTLSTLKEKHPAPSRPLYVPPASDLSPPCLAVRVTDVVDALQSFQRGSASGLDGLRPDHLKELVSPASGDNGPRLLESVTRLCNFMLKGKLNPDICPFLYGASLCALQKKDGGIRPIAVGSTFRRLVAKLCCHAVKNPMANFLQPHQVGFGTQLGCEAAIHATRAFALREGSADVILKLDVRNAFNCIERDVILSEVKTLIPAIFPFLYQCYSSPSNLSFNKTCILSQVGAQQGDPLGPLIFSLGIHKAISSLEAPLNIWYLDDGTIGGDIAAVERDVKLLFPALGEIGLEVNTSKCELYPCSPGAAADCDRFSLLIPGLKIVDRKSLQLLSAPVFPDGVQECLRTKTETLASLAGHFRHLPAHVSLTLLRNCFAMPKLTYMVRTAPSWQFPEEVDRFDCAIKRLLEETINVSLNESQWCQASLPIRHGGLGVRRLRETGPAAFLASSFGSAELVTQILSPNGDAICIPFQSEVLSGWSALYPGVNLPERPGCQRGWDEGTSRYLFSKMRGNSSGVELARLTAASRPESGAWLHALPSPNMGTLLDDDSLRVAVGLRLGCGVCEPHVCICGTHVDASGLHGLSCVRCAGRRPRHHAINEIIRRAFVSAEVPCVLEPPGLSRSDGKRPDGLTLIPWRKGRCLIWDATCVSTFAACHLSITQQCAGGGAEMAARVKHSKYACLESAYDFVPFAVETAGPWGSEARTLVQELGRRLRGKGRDPRSGWFIVQQVSLAIQRGNAASLMGTFGAGSVRGVI

SEQ ID NO: 19186 - protein, 947 aa, Lymantria dispar
MTTPTRAPCPHCPNSAKLYTVPHGLRVHIGRKHKDVLSLSPPDVGVSGPSGGSTVESHVDSGPSSFNLNDLPVLKDKVRVLRHVPKGARCLAAGKLSSLIEQCLQSNCSKDWFALLTFAYTALRVPEQGDGKSLTAKVKANVEGCQWDLLEEDWVRKPLSIYKAVEAKVYDGDLKGAARLLTSECSFAPSDENTLSTLKEKHPAPSHPLYVPPASDLSPPCLAVKVTDVADALQSFQRGSASGLDGLRPDHLKELVSPASGDNGLRLLESVTGLCNFMLKGKLNPDICPFLYGASLCALQKKDGGIRPIAVGSTFRRLVAKLCCHAVKNPMANFLQPHQVGFGTQLGCEAAIHATRAFALREGSADVILKLDVRNAFNCIERDVILSEVKTLIPAIFPFLYQCYSSPSNLSFNKTCILSQVGAQQGDPLGPLIFSLGIHKAISSLEAPLNIWYLDDGTIGGDIAAVERDIRLLFPALGEIGLEVNTSKCELYPCSPGAAADCDRFSLLIPGLKMVDRKSLQLLGAPVFPDGVQECLRTKTETLASLAGHFRHLPAHVSLTLLRNCFAMPKLTYVVRTAPSWQFPEEVDRFDCAIKRLLEETINVSLNESQWCQASLPIRHGGLGVRRLRETGPAAFLASSFGSAELVTQILSPNGDVICIPFQSEVLSSWSALYPGVNLPERPGCQRGWDEGTSRYLFSKMRGNSSGVELARLTAASRPESGAWLHALPSPNMGTLLDGDSLRVAVGLRLGCGVCEPHVCICGTHVDSSGLHGLSCVRCAGRRPRHHAINEIIRRAFVSAEVPCVLEPPGLSRLDGKRPDGLTLIPWRKGRCLIWDATCVSTFAACHLSATQQCAGGGAEMAARVKHSKYACLESAYDFVPFAVETAGPWGSEAKTLVQELGRRLRGKGRDPRSGWFIVQQVSLAIQRGNAASLMGTFGAGSVRGVI

SEQ ID NO: 19187 - protein, 947 aa, Lymantria dispar
MTTPTRAPCPHCPNSAKLYTVPHGLRVHIGRKHKDVLSLSPPDVGVSGPSGGSTVESHVDSGPSSFNLNDLPVLKDKVRVLRHVPKGARCLAAGKLSSLIEQCLQSNCSKDWFALLTFAYTALRVPEQGDGKSLTAKVKANVEGCQWDLLEKDWVRKPLSIYKAVEAKVYDGDLKGAARLLTSECSFAPSDENTLSTLKEKHPAPSHPLYVPPASDLSPPCLAVKVTDVADALQSFQRGSASGLDGLRPDHLKELVSPASGDNGLRLLESVTGLCNFMLKGKLNPDICPFLYGASLCALQKKDGGIRPIAVGSTFRRLVAKLCCHAVKNPMANFLQPHQVGFGTQLGCEAAIHATRAFALREGSADVILKLDVRNAFNCIEKDVILSEVKTLIPAIFPFLYQCYSSPSNLSFNKTCILSQVGAQQGDPLGPLIFSLGIHKAISSLEAPLNIWYLDDGTIGGDIAAVERDIRLLFPALGEIGLQVNTSKCELYPCSPGAAADCDRFSLLIPGLKMVDRKSLQLLGAPVFPDGVQECLRTKTETLASLAGHFRHLPAHVSLTLLRNCFAMPKLTYVVRTAPSWQFPEEVDRFDCAIKRLLEETINVSLNESQWCQASLPIRHGGLGVRRLRETGPAAFLASSFGSAELVTQILSPNGDVNCIPFQSEVLSSWSALYPGVNLPERPGCQRGWDEGTSRYLFSKMRGNSSGVELARLTAASRPESGAWLHALPSPNMGTLLDGDSLRVAVGLRLGCGVCEPHVCICGTHVDSSGLHGLSCVRCAGRRPRHHAINEIIRRAFVSAEVPCVLEPPGLSRLDGKRPDGLTLIPWRKGRCLIWDATCVSTFAACHLSATQQCAGGGAEMAARVKHSKYACLESAYDFVPFAVETAGPWGSEAKTLVQELGRRLRGKGRDSRSGWFIVQQVSLAIQRGNAASLMGTFGAGSIRGVI

SEQ ID NO: 19188 - protein, 947 aa, Lymantria dispar
MTTPTRAPCPHCLNSAKLYTVPHGLRVHIGRKHKDVLSLSPPDVGVSGPSGGSTVESHVDSGPSSFNLNDLPVLKDKVRVLRHVPKGARCLAAGKLSSLIEQCLQSNCSKDWFALLTFAYTALRVPEQGDGKSLTAKVKANVEGCQWDLLEEDWVRKPLSIYKAVEAKVYDGDLKGAARLLTSECSFAPSDENTLSTLKEKHPAPSHPLYVPPASDLSPPCLAVKVTDVADALQSFQRGSASGLDGLRPDHLKELVSPASGDNGLRLLESATGLCNFMLKGKLNPDICPFLYGASLCALQKKDGGIRPIAVGSTFRRLVAKLCCHAVKNPMTNFLQPHQVGFGTQLGCEAAIHATRAFALREGSADVILKLDVRNAFNCIERDIILSEVKTLIPTIFPFLYQCYSSPSNLSFNKTCILFQVGAQQGDPLGPLIFSLGIHKAISSLEAPLNIWYLDDGTIGGDIAAVERDIRLLFPALGEIGLEVNTSKCELYPCSPGAAADCDRFSLLIPGLKMVDRKSLQLLGAPVFPNGVQECLRTKTETLASLAGHFRHLPAHVSLTLLRNCFAMPKLTYVVRTAPSWQFPEEVDRFDCAIKRLLEETINVSLNESQWCQASLPIRHGGLGVRRLRETGPAAFLASSFGSAELVTQILSPNGDVICIPFQSEVLSSWSALYPGVNLPERPGCQRGWDEGTSRYLFSKMRGNSSGVELARLTTASRPESGAWLHALPSPNMGTLLDGDSLRVAVGLRLGCGVCEPHVCICGTHVDSSGLHGLSCVRCAGRRPRHHAINEIIRRAFVSAEVPCVLEPPGLSRLDGKRPDGLTLIPWRKGRCLIWDATCVSTFAACHLSATQQCAGGGAEMAARVKHSKYACLESAYDFVPFAVETAGLWGSEAKTLVQELGRRLRGKGRDPGSGWFIVQQVSLAIQRGNAASLMGTFGAGSVRGVI

SEQ ID NO: 19189 - protein, 947 aa, Lymantria dispar
MTTPTRAPCPHCPNSAKLYTVPHGLRVHIGRKHKDVLSLSPPDVGVSGPSGGSTVESHVDSGPSSFNLNDLPVLKDKVRVLRHVPKGARCLAAGKLSSLIEQCLQSNCSKDWFALLTFAYTALRVPEQGDGKSLTAKVKANVEGCQWDLLEEDWVRKPLSIYKAVEAKVYDGDLKGAARLLTSECSFAPSDENTLSTLKEKHPAPSHPLYVPPASDLSPPCLAVKVTDVADALQSFQRGSASGLDGLRPDHLKELVSPASGDNGLRLLESVTGLCNFMLKGKLNPDICPFLYGASLCALQKKDGGIRPIAVGSTFRRLVAKLCCHAVKNPMANFLQPHQVGFGTQLGCEAAIHATRAFALREGSADVILKLDVRNAFNCIERDVILSEVKTLIPAIFPFLYQCYSSPSNLSFNKTCILSQVGAQQGDPLGPLIFSLGIHKAISSLEAPLNIWYLDDGTIGGDIAAVERDIRLLFPALGEIGLEVNTSKCELYPCSPGAAADCDRFSLLIPGLKMVDRKSLQLLGAPVFPDGVQECLRTKTETLASLAGHFRHLPAHVSLTLLRNCFAMPKLTYVVRTAPSWQFPEEVDRFDCAIKRLLEETINVSLNESQWCQASLPIRHGGLGVRRLRETGPAAFLASSFGSAELVTQILSPNGDVICIPFQSEVLSSWSALYPGVNLPERPGCQRGWDEGTSRYLFSKMRGNSSGVELARLTAASRPESGAWLHALPSPNMGTLLDGDSLRVAVGLRLGCGVCEPHVCICGTHVDSSGLHGLSCVRCAGRRPRHHAINEIIRRAFVSAEVPCVLEPPGLSRLDGKRPDGLTLIPWRKGRCLIWDATCVSTFAACHLSATQQCAGGGAEMAARVKHSKYACLESAYDFVPFAVETAGPWGSEAKTLVQELGRRLRGKGRDPRSGWFIVQQVSLAIQRGNAASLIGTFGAGSVRGVI

SEQ ID NO: 19190 - protein, 947 aa, Lymantria dispar
MTTPTRAPCPHCPNSAKLYTVPHGLRVHIGRKHKDVLSLSPPDVGVSGPSGGSTVESHVDSGPSSFNLNDLPVLKDKVRVLRHVPKGARCLAAGKLSSLIEQCLQSNCSKDWFALLTFAYTALRVPEQGDGKSLTAKVKANVEGCQWDLLEEDWVRKPLSIYKAVEAKVYDGDLKGAARLLTSECSFAPSDENTLSTLKEKHPAPSHPLYVPPASDLSPPCLAVKVTDVADALQSFQRGSASGLDGLRPDHLKELVSPASGDNGLRLLESVTGLCNFMLKGKLNPDICPFLYGASLCALQKKDGGIRPIAVGSTFRRLVAKLCCHAVKNPMANFLQPHQVGFGTQLGCEAAIHATRAFALREGSADVILKLDVRNAFNCIERDVILSEVKTLIPAIFPFLYQCYSSPSNLSFNKTCILSQVGAQQGDPLGPLIFNLGIHKAISSLEAPLNIWYLDDGTIGGDIAAVERDIRLLFPALGEIGLEVNTSKCELYPCSPGAAADCDRFSLLIPGLKMVDRKSLQLLGAPVFPDGVQECLRTKTETLASLAGHFRHLPAHVSLTLLRNCFAMPKLTYVVRTAPSWQFPEEVDRFDCAIKRLLEETINVSLNESQWCQASLPIRHGDLGVRRLRETGPAAFLASSFGSAELVTQILSPNGDVICIPFQSEVLSSWSALYPGVNLPERPGCQRGWDEGTSRYLFSKMRGNSSGVELARLTAASRPESGAWLHALPSPNMGTLLDGDSLRVAVGLRLGCGVCEPHVCICGTHVDSSGLHGLSCVRCAGRRPRHHAINEIIRRAFVSAGVPCVLEPPGLSRLDGKRPDGLTLIPWRKGRCLIWDATCVSTFAACHLSATQQCAGGGAEMAARVKHSKYACLESAYDFVPFAVETAGPWGSEAKTLVQELGRRLRGKGRDPRSGWFIVQQVSLAIQRGNAASLIGTFGAGSVRGVI

SEQ ID NO: 19191 - protein, 946 aa, Lymantria dispar
MTTPTRAPCPHCPDSAKLYTVPHGLRVHIGRKHKDVLSLSSPDVGVSGPSGGSTVESHVDSGPSSFILNDLPVLKDKVRVLRHVPKGARCLAAGKLSSLIEQCLQSNCSKDWFALLTFAYTALRVPEQGDKKSLTAKVKANVEGCQRDLLEDWVRKPLSIYKAVEAKVYDGDLKGAARLLTSECTFAPSDENTLSTLKEKHPAPSRPLYVPPASDLSPPCLAVRVTDVADALQSFQRGSASGLDGLRPDHLKELVSPASGDNGPRLLESVTRLCNFMLKGKLNPDICPFLYGASLCALQKKDGGIRPIAVGSTFRRLVAKLCCHAVKNPMANFLQPHQVGFGTQLGCEAAIHATRVFALREGSADVILKLDVRNAFNCIERDVILSEVKTLIPAIFPFLYQCYSSPSNLSFNKTCILSQVGAQQGDPLGPLIFSLGIHKAISSLEAPLNIWYLDDGTIGGDIAAVERDVKLLFPALGEIGLEVNTSKCELYPCSPGAAADCDRFSLLIPGLKIVDRKSLQLLGAPVFPDGVQECLRTKTETLASLAGHFRHLPAHVSLTLLRNCFAMPKLTYMVRTAPSWQFPEEVDRFDCAIKRLLEETINVSLNESQWCQASLPIRHGGLGVRRLRETGPAAFLASSFGSAELVTQILSPNGDAICIPFQSEVLSGWSALYPGVNLPERPGCQRGWDEGTSRYLFSKMRGNSSGVELARLTAASRPESGAWLHALPSPNMGTLLDDDSLRVAVGLRLGCGVCEPHVCICGTHVDASGLHGLSCVRCAGRRPRHHAINEIIRRAFVSAEVPCVLEPPGLSRSDGKRPDGITLIPWRKGRCLIWDATCVSTFAACHLSITQQCAGGGAEMAARVKRSKYACLESAYDFVPFAVETAGPWGSEARTLVQELGRRLRGKGRDPRSGWFIVQQVSLAIQRGNAASLMGTFGAGSVRGVI

SEQ ID NO: 19192 - protein, 947 aa, Lymantria dispar; identical to SEQ ID NO: 19189

SEQ ID NO: 19193 - protein, 947 aa, Lymantria dispar
MTTPTRAPCPHCPNSAKLYTVPHGLRVHIGRKHKDVLSLSPPDVGVSGPSGGSTVESHVDSGPSSFNLNDLPVLKDKVRVLRHVPKGARCLAAGKLSSLIEQCLQSNCSKDWFALLTFAYTALRVPEQGDGKSLTAKVKANVESCQWDLLEEDWVRKPLSIYKAVEAKVYDGDLKGAARLLTSECSFAPSDENTLSTLKEKHPAPSHPLYVPPASDLSPPCLAVKVTDVADALQSFQRGSASGLDGLRPDHLKELVSPASGDNGLRLLESVTGLCNFMLKGKLNPDICPFLYGASLCALQKKDGGIRPIAVGSTFRRLVAKLCCHAVKNPMANFLQPHQVGFGTQLGCEAAIHATRAFALREGSADVILKLDVRNAFNCIERDVILSEVKTLIPAIFPFLYQCYSSPSNLSFNKTCILSQVGAQQGDPLGPLIFSLGIHKAISSLEAPLNIWYLDDGTIGGDIAAVERDIRLLFPALGEIGLEVNTSKCELYPCSPGAAADCDRFSLLIPGLKMVDRKSLQLLGAPVFPDGVQECLRTKTETLASLAGHFRHLPAHVSLTLLRNCFAMPKLTYVVRTAPSWQFPEEVDRFDCAIKRLLEETINVSLNESQWCQASLPIRHGGLGVRRLRETGPAAFLASSFGSSELVTQILSPNGDVICIPFQSEVLSSWSALYPGVNLPERPGCQRGWDEGTSRYLFSKMRGNSSGVELARLTAASRPESGAWLHALPSPNMGTLLDGDSLRVAVGLRLGCGVCEPHVCICGTHVDSSGLHGLSCVRCAGRRPRHHAINEIIRRAFVSAEVPCVLEPPGLSRLDGKRPDGLTLIPWRKGRCLIWDATCVSTFAAFHLSATQQCAGGGAEMAARVKHSKYACLESAYDFVPFAVETAGPWGSEAKTLVQELGRRLRGKGRDPRSGWFIVQQVSLAIQRGNAASLIGTFGAGSVRGVI

SEQ ID NO: 19194 - protein, 947 aa, Lymantria dispar
MTTPTRAPCPHCPDSAKLYTVPHGLRVHIGRKHKDVLSLSSPDVGVSGPSGGSTVESHVDSGPSSFIVNDLPVLKDKVRVLRHVPKGARCLAAGKLSSLIEQCLQSNCSKDWFALLTFAYTALRVPEQGDKKSLTAKVKANVEGCQRDLLEEDWVRKPLSIYKAVEAKVYDGDLKGAARLLTSECTFAPSDENTLSTLKEKHPAPSRPLYVPPASDLSPPCLAVRVTDVVDALQSFQRGSASGLDGLRPDHLKELVSPASGDNGPRLLESVTRLCNFMLKGKLNPDICPFLYGASLCALQKKDGGIRPIAVGSTFRRLVAKLCCHAVKNPMANFLQPHQVGFGTQLGCEAAIHATRAFALREGSADVILKLDVRNAFNCIERDVILSEVKTLIPAIFPFLYQCYSSPSNLSFNKTCILSQVGAQQGDPLGPLIFSLGIHKAISSLEAPLNIWYLDDGTIGGDIAAVERDVKLLFPALGEIGLEVNTSKCELYPCSPGAAADCDRFSLLIPGLKIVDRKSLQLLGAPVFPDGVQECLRTKTETLASLAGHFRHLPAHVSLTLLRNCFAMPKLTYMVRTAPSWQFPEEVDRFDCAIKRLLEETINVSLNESQWCQASLPIRHGGLGVRRLRETGPAAFLASSFGSAELVTQILSPNGDAICIPFQSEVLSGWSALYPGVNLPERPGCQRGWDEGTSRYLFSKMRGNSSGVELARLTAASRPESGAWLHALPSPNMGTLLDDDSLRVAVGLRLGCGVCEPHVCICGTHVDASGLHGLSCVRCAGRRPRHHAINEIIRRAFVSAEVPCVLEPPGLSRSDGKRPDGLTLIPWRKGRCLIWDATCVSTFAACHLSITQQCAGGGAEMAARVKHSKYACLESAYDFVPFAVETAGPWGSEARTLVQELGRRLRGKGRDPRSGWFIVQQVSLAIQRGNAASLMGTFGAGSVRGVI

SEQ ID NO: 19195 - protein, 947 aa, Lymantria dispar; identical to SEQ ID NO: 19186

SEQ ID NO: 19196 - protein, 942 aa, Lymantria dispar
MTTPTRAPCPHCPDSAKLYTVPHGLRVHIGRKHKDVLSLSSPDVGVSGPSGGSTVESHVDSGPSSFILNDLPVLKDKVRVLRHVPKGARCLAAGKLSSLIEQCLQSNCSKDWFALLTFAYTALRVPEQGDKKSLTAKVKANVEGCQRDLLEEDWVRKPLSIYKAVEAKVYDGDLKGAARLLTSECRFAPSDENTLSTLKEKHPAPSRPLYVPPASDLSPPCLAVRVTDVADALQSFQRGSASGLDGLRPDHLKELVSPASGDNGPRLLESVTRLCNFMLKGKLNPDICPFLYGASLCALQKKDGGIRPIAVGSTFRRLVAKLCCHAVKNPMANFLQPHQVGFGTQLGCEAAIHATRAFALREGSADVILKLDVRNAFNCIERDVILSEVKTLIPAIFPFLYQCYSSPSNLSFNKTCILSQVGAQQGDPLGPLIFSLGIHKAISSLEAPLNIWYLDDGTIGGDIAAVERDVKLLFPALGEIGLEVITSNCELYPCSPGAAADCDRFSLLIPGLKIVDRKSLQLLGAPVFPDGVQECLRTKTETLASLAGHFRHLLAHVSLTLLRNCFAMPKLTYMVRTAPSWQFPEEVDRFDCAIKRLLEETINVSLNESQWCQASLPIRHGGLGVRRLREFLASSFGSAELVTQILSPNGDAICIPFQSEVLSGWSALYPGVNLPERPGCQRGWDEGTSRYLFSKMRGNSSGVELARLTAASRPESGAWLHALPSPNMGTLLDDDSLRVAVGLRLGCGICEPHVCICGTHVDASGLHGLSCVRCAGRRPRHHAINEIIRRAFVSAEVPCVLEPPGLSRSDGKRPDGLTLIPWRKGRCLIWDATCVGTFAACHLSITQQCAGGGAEMAARVKHSKYACLESAYDFVPFAVETAGPWGSEARTLVQELGRRLRVKGRDPRSGWFIAQQVSLAIQRGNAASLMGTFGAGSVRGVI

SEQ ID NO: 19197 - protein, 948 aa, Erannis defoliaria
MTSPSRAPCPYCPNSSKLYAVPHGLRVHIGRMHRDISASISSSLLPSSLSAPLSISGSPSCVGLEDLSSLKAKVRVLRHVPKGARCLAAGKLSSVIDRCVSSNAIEDWTRLLSFAFSALRIPDLGIKKSLTAKVKDNLAGDGLPDISGEFSPMIPPSLYQVVQAKVFEGDLRGAARVLTSECSFAPVNSDTLAALKEKHPPPSCPIRIPSAPDPASSCLTVEAEDVVCALESFHRGSASGLDGLRPEHLRELTSPSAGDNGVKLLASLTHLCNFLLEGRLNPAVCPFLYGGSLCALQKKDGGVRPIAVGSTIRRLVAKLCCRAVRSNMAAYLQPRQVGFGTPLGCEAAIHATRVFVMREGCDDVLVKLDIRNAFNCIDRSVMLEEVRALTPSIYPFVTQCYSTPSNLMFNSERILSQEGAQQGDPLGPLIFSLAIHKAISSLQAPLNLWYLDDGTIGGCPDTVERDLRQLFPALECLGLQVNTAKCEFFACSPDAAKSEARFSSLIPGIKCQSRSTLSLLGAPIFAEGVSDCLNSKTDILSSLTVHFRHLPAHVSLTLLRSCFAMPKLTYVVRTAPTWKCPDEVLRFDDLLKLALEEIVNVRLSGMQWMQASLPIRHGGLGVRRLQESGPIAFLSSAHGVANLVTHIVPNNGDIVRIPFVSEARSVWSSLCPGSDPPEKFESQRGWDDITSKSVLGQLQNLSSGVDVARLNAACKPESGAWLHALPSPHWGMLLDTDSLRVAVGLRLGCSICVPHTCVCGARVESDGYHGLSCIKCAGRRPRHHALNEILRRALVDAEIPCALEPPGLSRSDGKRPDGLTLIPWRRGRCLIWDATCVSTFAACHLAATQQVAGGGAEAAARAKRHKYASLETQYEFVPFAVETAGSWGSDAKKLVAEIGRRLREKGRDPRSGHFLAQRISLAIQRGNAAGLMGTFGRGAGNDLGHSIL

SEQ ID NO: 19198 - protein, 950 aa, Erannis defoliaria
MTTPSRAPCPYCPDSGKLFSVPHGLRVHIGRMHRDITSSQGPAATPLQSTSSVQSTTGSNDLPGIRLQDLPALKNKVRVLKHVPKGARCLAAGKLSSIIDHCVQSNDAQDWVALLSFAFTALRTPSEGVKKSLTAKVKDNIVGDVQSEVLGGRPPGRPSSLYHVVQSKVFDGDLRGAARLLTSDCSFAPSNEHTLFALREKHPSPSLPTQIPPAPDPPTPCLTVKPDEVASALHSFCRGSASGLDGLRPEHLKELTSSSAGDNGPRLLESLTALCNFLLAGHLNSEVCPFLYGGTLCALQKKDGGVRPIAVGNTIRRLVAKLCCQAVKGGMAAYLQPHQLGFGTPLGCEAAIHATRLFLFREHSDDILLKLDIRNAFNSIDRGAMLAEVRTMTPSIFPFLSQCYSSPSNLSYNEELILSQVGAQQGDPLGPLIFSLAIHKTISSLEAPLNLWYLDDGTIGGSPADVERDVKALFPALKALGLEVNTAKCEFFSGSPMAADIEARFASLIPGLRFVARESLCLLGAPIFAEGVSECLVTKNYTLASLADHFKHLPAHVSLTLLRACFAMPKLTYVIRTAPSWKFPEEVQRFDDTLKQILEETINVSLDESQWSQACLPIRYGGLGVRRLRESGPSAFLASAYGVTELVTQILPATGDRICVPYASEAYSVWSAACTGENQPAKPERQRGWDDILCSKVFSELREASSGATRARLNAAAVPESGAWLHAYPSPQLGTLLDNDSVRVAVALRLGCRVCEPHTCVCGTCVGSNGHHGLSCARSAGRRPRHHALNEILRRALVSAEVPSVLEPPGLSRADGKRPDGLTLVPWQRGRCIVWDATCVCTFAACHLRGSQQRAGSAAELAAKGKSRKYADLALAYDFVPFAVETAGPWCADARKFIGDIGQRLREKGRDPRAGWFLTQQISLSIQRGNAAAIMGTFGQGALRGGIFDE

SEQ ID NO: 19199 - protein, 950 aa, Erannis defoliaria
MTTPSRAPCPYCPDSGKLFSVPHGLRVHIGRMHRDITSSQGPAATPLQSTSSVQSTTGSNDLPGIRLQDLPALKNKVRVLKHVPKGARCLAAGKLSSIIDHCVQSNDAQDWVALLSFAFTALRTPSEGVKKSLTAKVKDNIVGDVQSEVLGGRPPGRPSSLYHAVQSKVFDGDLRGAARLLTSDCSFAPSNEHTLFALREKHPSPSLPTQIPPAPDPPTPCLTVKPDEVASALHSFCRGSASGLDGLRPEHLKELTSSSAGDNGPRLLESLTALCNFLLAGHLNSEVCPFLYGGTLCALQKKDGGVRPIAVGNTIRRLVAKLCCQAVKGGMAAYLQPHQLGFGTPLGCEAAIHATRLFLFREHSDDILLKLDIRNAFNSIDRGAMLAEVRTMTPSIFPFLSQCYSSPSNLSYNEELILSQVGAQQGDPLGPLIFSLAIHKTISSLEAPLNLWYLDDGTIGGSPADVERDVKALFPALKALGLEVNTAKCEFFSGSPMAADIEARFASLIPGLRFVARESLCLLGAPIFAEGVSECLVTKNYTLASLADHFKHLPAHVSLTLFRACFAMPKLTYVIRTAPSWKFPEEVQRFDDTLKQILEETINVSLDESQWSQACLPIRYGGLGVRRLRESGPSAFLASAYGVTELVTQILPATGDRICVPYASEAYSVWSAACTGENQPAKPERQRGWDDILCSKVFSELREASSGATRARLNAAAVPESGAWLHAYPSPQLGTLLDNDSVRVAVALRLGCRVCEPHTCVCGTCVGSNGHHGLSCARSAGRRPRHHALNEILRRALVSAEVPSVLEPPGLSRADGKRPDGLTLVPWQRGRCIVWDATCVCTFAACHLRGSQQRAGSAAELAAKGKSRKYADLALAYDFVPFAVETAGPWCADARKFIGDIGQRLREKGRDPRAGWFLTQQISLSIQRGNAAAIMGTFGQGALRGGIFDE

SEQ ID NO: 19200 - protein, 950 aa, Erannis defoliaria
MTTPSRAPCPYCPDSGKLFSVPHGLRVHIGRMHRDNTSSQGPAATPLQSTSSVQSTTGSNDLPGIRLQDLPTLKNKVRVLKHVPKGARCLAAGKLSSIIDHCVQSNDTQDWVALLSFAFTALRTPSEGVKKSLTAKVKDNIVGDVQSEVLSGRPPGRPSSLYHVVQSKVFDGDLRGAARLLTSDCSFAPSNEHTLFALREKHPSPSLPTQIPPAPDPPTPCLTVKPDEVASALHSFCRGSASGLDGLRPEHLKELTSSSAGDNGPRLLESLTALCNFLLAGHLNSEVCPFLYGGTLCALQKKDGGVRPIAVGNTIRRLVAKLCCQAVKGGMAAYLQPHQLGFGTPLGCEAAIHATRLFLFREHSDDILLKLDIRNAFNSIDRGAMLAEVRTMTPSIFPFLSQCYSSPSNLSYNEELILSQVGAQQGDPLGPLIFSLAIHKTISSLEAPLNLWYLDDGTIGGSPADVERDVKALFPALKALGLEVNTAKCEFFSGSPVAADIEARFASLIPGLRFVARESLCLLGAPIFAEGVSECLVTKNYTLASLADHFKHLPAHVSLTLLRACFAMPKLTYVIRTAPSWKFPEEVQRFDDTLKQILEETINVSLDESQWSQACLPIRYGGLGVRRLRESGPSAFLASAYGVTELVTQILPATGDRICVPYASEAYSVWSAACTGENQPAKPERQRGWDDILCSKVFSELREASSGATRARLNAAAVPESGAWLHAYPSPQLGTLLDNDSVRVAVALRLGCRVCEPHTCVCGTCVSSNGHHGLSCARSAGRRPRHHALNEILRRALVSAEVPSVLEPPGLSRADGKRPDGLTLVPWQRGRCIVWDATCVCTFAACHLRGSQQRAGTAAELAAKGKSRKYADLALAYDFVPFAVETAGPWCADARKFIGDIGQRLREKGRDPRAGWFLTQQISLSIQRGNAAAIMGTFGQGALRGGIFDE

SEQ ID NO: 19201 - protein, 950 aa, Erannis defoliaria
MTTPSRAPCPYCPDSGKLFSVPHGLRVHIGRMHRDITSSQGPAATPLQSTSSVQSTTGSNDLPGIRLQDLPTLKNKVRVLKHVPKGARCLAAGKLSSIIDHCVQSNDTQDWVALLSFAFTALRTPSEGVKKSLTAKVKDNIVGDVQSEVLSGRPPGRPSSLYHVVQSKVFDGDLRGAARLLTSDCSFAPSNEHTLFALREKHPSPSLPTQIPPAPDPPTPCLTVKPDEVASALHSFCRGSASGLDGLRPEHLKELTSSSAGDNGPRLLESLTALCNFLLAGHLNSEVCPFLYGGTLCALQKKDGGVRPIAVGNTIRRLVAKLCCQAVKGGMAAYLQPHQLGFGTPLGCEAAIHATRLFLFREHSDDILLKLDIRNAFNSIDRGAMLAEVRTMTPSIFPFLSQCYSSPSNLSYNEELILSQVGAQQGDPLGPLIFSLAIHKTISSLEAPLNLWYLDDGTIGGSPADVERDVKALFPALKALGLEVNTAKCEFFSGSPMAADIEARFASLIPGLRFVARESLCLLGAPIFAEGVSECLVTKNYTLASLADHFKHLPAHVSLTLLRACFAMPKLTYVIRTAPSWKFPEEVQRFDDTLKQILEETINVSLDESQWSQACLPIRYGGLGVRRLRESGPSAFLASAYGVTELVTQILPATGDRICVPYASEAYSVWSAACTGENQPAKPERQRGWDDILCSKVFSELREASSGATRARLNAAAVPESGAWLHAYPSPQLGTLLDNDSVRVAVALRLGCRVCEPHTCVCGTCVGSNGHHGLSCARSAGRRPRHHALNEILRRALVSAEVPSVLEPPGLSRADGKRPDGLTLVPWQRGRCIVWDATCVCTFAACHLRGSLQRAGSAAELAAKGKSRKYADLALAYDFVPFAVETAGPWCADARKFIGDIGQRLREKGRDPRAGWFLTQQISLSIQRGNAAAIMGTFGQGALRGGIFDE

SEQ ID NO: 19202 - protein, 950 aa, Erannis defoliaria
MTTPSRAPCPYCPDSGKLFSVPHGLRVHIGRMHRDITSSQGPAATPLQSTSSVQSTTGSNDLPGIRLQDLPTLKNKVRVLKHVPKGARCLAAGKLSSIIDHCVQSNDTQDWVALLSFAFTALRTPSEGVKKSLTAKVKDNIVGDVQSEVLSGRPPGRPSSLYHVVQSKVFDGDLRGAARLLTSDCSFAPSNEHTLFALREKHPSPSLPTQIPPAPDPPTPCLTVKPDEVASALHSFCRGSASGLDGLRPEHLKELTSSSAGDNGPRLLESLTALCNFLLAGHLNSEVCPFLYGGTLCALQKKDGGVRPIAVGNTIRRLVAKLCCQAVKGGVAAYLQPHQLGFGTPLGCEAAIHATRLFLFREHSDDILLKLDIRNAFNSIDRGAMLAEVRTMTPSIFPFLSQCYSSPSNLSYNEELILSQVGAQQGDPLGPLIFSLAIHKTISSLEAPLNLWYLDDGTIGGSPADVERDVKALFPALKALGLEVNTAKCEFFSGSPVAADIEARFASLIPGLRFVARESLCLLGAPVFAEGVSECLVTKNYTLASLADHFKHLPAHVSLTLLRACFAMPKLTYVIRTAPSWKFPEEVQRFDDTLKQILEETINVSLDESQWSQACLPIRYGSLGVRRLRESGPSAFLASAYGVTELVTQILPATGDRICVPYASEAYSVWSAACTGENQPAKPERQRGWDDILCSKVFSELREASSGATRARLNAAAVPESGAWLHAYPSPQLGTLLDNDSVRVAVALRLGCRICEPHTCVCGTCVGSNGHHGLSCARSAGRRPRHHALNEILRRALVSAEVPSVLEPPGLSRADGKRPDGLTLVPWQRGRCIVWDATCVCTFAACHLRGSQQRAGSAAELAAKGKSRKYADLALAYDFVPFAVETAGPWCADARKFIGDIGQRLREKGRDPRAGWFLTQQISLSIQRGNAAAIMGTFGQGALRGGIFDE

SEQ ID NO: 19203 - protein, 949 aa, Sarmientola browni
MSVPARAPCPHCPVTSIKQYTVPHGLKVHFGHKHRDLVLHNSAPSIPTTSTEPLIQTIVNQACITLSDLPTLKSKIRVLRHVPKGARSLAAAKLSLVIEQCLNSNSLDAWLALLSFAFTALRLPDQGDNKSLTSKVKVNVEDNRLHIPADALSRKPSSLYKYAQSKVFEGDIRGAARLLSSNCSFAPSNEATLASLKEKHPASSRPPYIPPTSNLPIPCLTVKVEDVADAIQSFCRGSAAGIDGLRPDHLKELTSSSAGDNGPRLLESLTRLCNFLLKGHVQPDICPFLYGGSLCALQKKDGGVRPIAIGNTFRRLVAKLCCRAVKHTLASYLQPHQVGFGTHLGCEAAIHATRAFVMREGSNDVVIKLDIRNAFNCIERDIILSEVRELTPSIFPFLQQCYSSPSNLIYNNETLLSQVGAQQGDPLGPLIFSIAIHKCISSLKSPLNIWYLDDGTVGGSPDTVESDLRSLFPALKDLGLEINTSKCEFFPCSPVAKESCDRFKSFIPGLRILDINSFFLLGAPIFVEGVSDCLRTKMLTLSSLAVHFKHLPAHISLTLLRNCFSMPKLTYILRTVPTWRSSEEVINFDNTLKELLEEILNVHLSETQWCQASLAIRFGGLGVRRLQETGPIAFLASSYGVADLVTRILFNNGNSISIPYTEEAFSMWSVLCPGLDAPETPMLQHSWSDLLCNRFLSQLREESSGVELARLNAAVRPESGAWLHALPSPHVGTLLDDNALRIATALRLGCDICEPHICICGASVEANGHHGLSCIRSAGRRPRHYAINDLIRRALVLADVPCVLEPPGLSRSDGKRPDGLTLIPWQRGRCLVWDATCISTFASCHLPGTQQSAGAGAETAAKSKRLKYACLESAYDFLPFAVECAGPWCIEAKKFVQILGRRLRESGRDPHSVAYLTQQISLAIQRGNAASVMGTFGQGAMRGGLFDVF

SEQ ID NO: 19204 - protein, 948 aa, Erannis defoliaria
MASLTRAPCPHCPGSAKLYSVPHGLRVHIGRMHKDVALPGLVGPAPTASLDPSSQSAGAPATTLPGLSLDDLPTLKSKVRVLRHVPKGARCLAAGRLSSLIEQCVQSNKTVDWVALLSFAYTALRLPDSGDNKSLTSKVKENIIASSQSSFPADSLPQRAPSFYKSVQAKVFEGDLRGAARLLTSDCSFAPSGADTLAALRDKHPAPARLPSIPPAPDVESTPCLVVKVEDVSGALHSFYRGTAAGMDGLRPEHLKELTSSSAGDNGQRLLESLTRLCNFLLKGALNADVCPLLYGGSLCALQKKDGGLRPIAVGNTFRRLVAKLCCQAVRGEVASYLQPHQLGFGSSLGCEAAIHATRAFVMRQGSNDVLLKLDIRNAFNSIERGALLSEARDLAPSIFPFLCQCYSSPSVLSYEGQRILSQVGAQQGDPLGPLVFSLAIQKAIKSLESPLNVWYLDDGTIGGSPEVVQRDVVSLFPALKDLGLEVNTAKCEFYPCSPEAAESSADFTSLIPGLRIMDRKSLFLLGSPIFLEGMQDSLACKTQTLTSLASHFQHLPAHVSLSLLRACFGMPKLTYVIRTTPTWEFPEEVLRYDDVLKRIVEEVLNISLSEAQWCQASLPIRFGGLGVRRLQECGPVAFLASSYGASGLVGCLLHNLDVDVSIPFVREAHGMWRHLYPGTDPPAKPSVQRGWDDVAGAHILAHLRSGASGVELARLNAASKPESGAWLRALPSPNLGTLLDDDSLRVAAGLRLGCAVCEPHTCVCGAKVEADGLHGLSCARCAGRRPRHHAINELLRRALVSADIPCVLEPPGLSRSDGKRPDGLTLVPWQKGRCLIWDATCVSTFSACHLSATQRTAGAGAESAALGKHNKYAALESGYDFVPFAVETAGPWCSEAKKFVADLGRRLRSSGRDPRSGQYLTQHISLAIQRGNAASLMGTFGRVVTDR

SEQ ID NO: 19205 - protein, 959 aa, Biston betularia
MTSLSRASCPHCPDSSKLYSLPHGLRVHIGRMHKQVALQNHALCSPSSHPIAVTASCPAVPAHSPEVTMGPGISAGISLKDFPSLKGKIKVIKHVPKGARCLAAGKLASIMDRCVTSNGEEDWLALLTFSFIALRMPDQSEKKTSLTAKVKANIENGQLDLLTECGPRKPPSLYKAVATKVYDGDVKGAARLLTSDCTFAPSNQDTFAALKDKHPAPSHPPYIPPAPDPSISHLLASEEDVAGALQSFYRGSAPGPDGLRPEHLQELVSSSAGDNGPRLLEALTRLCNFLLKGHLNPVICPFLYGGSLCALQKSDGGVRPIAVGNTLRRLVAKVCCRSVKNSMAAYLQPHQLGFGTPLGCEAAIHATRAFAMREGSDDVLLKLDIRNAFNSVERNSFMSEIKALTPSIYPFIRQCYSTPSNLYYNNCCILSQEGAQQGDPLGPLAFCLAIHRAIKSLEAPLNIWYLDDGTIGGSPDTIERDVKVLFPALKELGLEVNTAKCELFSCNPIASGASGGLRSLIPGLRIMNRGSLSLLGAPIFPEGVGDCLRAKTEAVASLAVHLARLPAHVSVALLRNCFAMPKITYVIRTAPCWKFPEEVLQFDSALRSVLEETLNVQLNERQWCQASLPIRHGGLGVRRLQETGPIAFLASSHGVAELVTRILPSDGSLIRVPYAEEAFNIWSSLCPQADPPNTPKWQRSWDDVACVQLISKFRSESSGPELARINASVRPESGAWLHALPSPHLGTLLDDDSLRVAVALRLGCAVCEPHICICGAQVEANGHHGLGCTRCAGRRPRHHAINDILKRALVSAEVPSVLEPPGLSRSDGKRPDGLTLVPWRRGRCLVWDATCVSTFASCHLPATQQSAGAGAEAAARGKHLKYACLGAAYEFVPFAVETAGPWCAEARRLVHDLGIRLREKGRDPRSGWFLAQRISLAIQRGNAASIAGTFGRGSMRGET

SEQ ID NO: 19206 - protein, 969 aa, Erannis defoliaria
MYTNKIVCMNVILITFRLYFAMASPTRAPCPHCPGSAKLYSVPHGLRVHIGRMHKDVALPGLVGPAPTASLDPSSQSAGAPATTLPGLSLDDLPTLKSKVRVLRHVPKGARCLAAGRLSSLIEQCVQSNKTVDWVALLSFAYTALRLPDSGDNKSLTSKVKENIIASSQSSFPADSLPQRAPSFYKSVQAKVFEGDLRGAARLLTSDCSFAPSGADTLAALRDKHPAPARLPSIPPAPDVESTPCLVVKVEDVSGALHSFYRGTAAGMDGLRPEHLKELTSSSAGDNGQRLLESLTRLCNFLLKGALNADVCPLLYGGSLCALQKKDGGLRPIAVGNTFRRLVAKLCCQAVRGEVASYLQPHQLGFGSSLGCEAAIHATRAFVMRQGSNDVLLKLDIRNAFNSIERGALLSEARDLAPSIFPFLCQCYSSPSVLSYEGQRILSQVGAQQGDPLGPLVFSLAIQKAIKSLESPLNVWYLDDGTIGGSPEVVQRDVVALFPALKDLGLEVNTAKCEFYPCSPEAAESSADFTSLIPGLRIMDRKSLFLLGSPIFLEGMQDSLACKTQTLTSLASHFQHLPAHVSLSLLRACFGMPKLTYVIRTTPTWEFPEEVLRYDDVLKRIVEEVLNISLSEAQWCQASLPIRFGGLGVRRLQECGPVAFLASSYGASGLVGCLLHNLDVDVSIPFVREAHGMWRHLYPGTDPPAKPSVQRGWDDVAGAHILAHLRSGASGVELARLNAASKPESGAWLRALPSPNLGTLLDDDSLRVAAGLRLGCAVCEPHTCVCGAKVEADGLHGLSCARCAGRRPRHHAINELLRRALVSADIPCVLEPPGLSRSDGKRPDGLTLVPWQKGRCLIWDATCVSTFSACHLSATQRTAGAGAESAALGKHNKYAALESGYDFVPFAVETAGPWCSEAKKFVADLGRRLRSSGRDPRSGQYLTQHISLAIQRGNAASLMGTFGRVVTDR

SEQ ID NO: 19207 - protein, 948 aa, Erannis defoliaria
MASPTRAPCPHCPGSAKLYSVPHGLRVHIGRMHKDVALPGLVGPAPTASLDPSSQSARAPATTLPGLRLDDLPTLKSKVRVLRHVPKGARCLAAGRLSSLIEQCVQSNKTVDWVALLSFAYTALRLPDSGDNKSLTSKVKENIIASSQSSFPADSLPQRAPSFYKSVQAKVFEGDLRGAARLLTSDCSFAPSGADTLAALRDKHPAPARLPSIPPAPDVESTPCLVVKVEDVSSALYSFYRGTAAGMDGLRPEHLKELTSSSAGDNGQRLLESLTRLCNFLLKGALNADVCPLLYGGSLCALQKKDGGLRPIAVGNTFRRLVAKLCCQAVRGEIASYLQPHQLGFGSSLGCEAAIHATRAFVIRQGSNDVLLKLDIRNAFNSIKRGALLSEARDLAPSIFPFLCQCYSSPSVLSYEGQRILSQVGAQQGDPLGPLVFSLAIQKAIKSLESPLNVWYLDDGTIGGSPEVVQRDVVALFPALKDLGLEVNTAKCEFYPCSPEAAESSADFTSLIPGLRIMDRKSLFLLGLPIFLEGMQDSLACKTQTLTSLASHFQHLPAHVSLSLLRACFGMPKLTYVIRTTPTWEFPEEVLRYDDVLKRIVEEVLNISLSEAQWCQASLPIRFGGLGVRRLQECGPVAFLASFYGASGLVGCLLHNLDVDVSIPFVREAHGMWRHLYPGTDPPAKPSVQRGWDDVAGAHILAHLRSGASGVELARLNAVSKPESGAWLRALPSPNLGTLLDDDSLRVAASLRLGCAVCEPHTCVCGAKVEADGLHGLSCARCADRRPRHHAINELLRRALVSADIPCVLEPPGLSRSDGKRPDGLTLVPWQKGRCLIWDATCVSTFSACHLSATQRTAGAGAESAALGKHNKYAALESGYNFVPFAVETAGPWCSEAKKFVADLGRRLRSSGRDPRSGQYLTQHISLAIQRGNAASLMGTFGRVVTDR

SEQ ID NO: 19208 - protein, 944 aa, Salantoia eriopis
MSVPLRASCPHCPAESLKVYTVPHGLRVHFGHKHRDLVLHNSVSSNLSTSAAPLTQTLDDQECITLSNLPTLKSKIRVLKHVPKGARCLAAGKLSAVIEECLNSNTPDVWLTLLSFAFTSLRLPDQGDNRSLTSKVKSNIENSQFLFPADSLSRKPFSFYKYVQSKVFEGDLKGAARLLTSDCSFAPTNEATVAALKEKHPIPSRPQYIPPAPKLSTPCLSVKVEDVADALQSFYRGSAAGLDGLRPEHLKELTSSSAGDNGPRLLESLTRLCNFLLMGHLHPDICPFLYGGSLCALQKKDGGVRPIAIGNTFRRLVAKLCCHAVKNSMASYLQPHQIGFGTPLGCEAAIHATRAFVMRDGSNDVLIKLDIRNAFNCIERDVILSEARELTPSIFPFLQQCYSTPSNLVYNNMTILSQVGAQQGDPLGPLIFSMAIHKCISSLKSPLNIWYLDDGTIGGSPDSVERDVRSLFPALRELGLEINTSKCEIYPCSSVAFDSCNRFESLIPGLRIIDKKSLFLLGSPIFLEGVSDSIQAKMLTLSALEVHFKHLPAHISLTLLRTCFGLPKLSYLLRTAPTWRFPGDVINYDNILKRIMEDILNVHLSETQWCQASLSIRFGGLGVRRLQETGPIAFLSSSYGVVDLVTSILLNNGDTINIPYAEEALSMWSVLCPGLDAPVRPKLQRSWSDLLCQRLFSQLQDESSGVDLARLNASVRPESGSWLHALPSPHVGTLLEDNTLRIATALRLGCNICEPHICICGASVEANGHHGLSCTRCAGRRPRHLAINDLIKRALVSADVPCVLEPPGLSRSDGKRPDGLTLIPWQRGRCLVWDATCVSTFAACHLPGTQQSAGAGAEAAARAKHLKYACLESTYDFLPFAVETSGPWCNEARKFVRILGRRLKANRAESYLIQQISLAIQRGNAASIMGTFGQGAIRGGLFVN

SEQ ID NO: 19209 - protein, 959 aa, Biston betularia
MTSLSRASCPHCPDSSKLYSLPHGLRVHIGRMHKQVALQNHALCSPSSHPIAVTASCPAVHAHSPEVTMGPGISAGISLKDFPSLKGKIKVIKHVPKGARCLAAGKLASIMDRCVTSNGEEDWLALLTFSFIALRMPDQSEKKTSLTAKVKANIENGQLDLLTECGPRKPPSLYKAVATKVYDGDVKGAARLLTSDCTFAPSNQDTFAALKDKHPAPSHPPYIPPAPDPSISHLLASEEDVAGALQSFYRGSAPGPDGLRPEHLQELVSSSAGDNGPRLLEALTRLCNFLLKGHLNPVICPFLYGGSLCALQKSDGGVRPIAVGNTLRRLVAKVCCRSVKNSMAAYLQPHQLGFGTPLGCEAAIHATRAFAMREGSDDVLLKLDIRNAFNSVERNSFMSEIKALTPSIYPFIRQCYSTPSNLYYNNCCILSQEGAQQGDPLGPLAFCLAIHRAIKSLEAPLNIWYLDDGTIGGSPDTIERDVKVLFPALKELGLEVNTAKCELFSCNPIASGASGGLRSLIAGLRIMNRGSLSLLGAPIFPEGVGDCLRAKTEAVASLAVHLARLPAHVSVALLRNCFAMPKITYVIRTAPCWKFPEEVLQFDSALRSVLEETLNVQLNERQWCQASLPIRHGGLGVRRLQETGPIAFLASSHGVAELVTRILPSDGSLIRVPYAEEAFNIWSSLCPQADPPNMPKWQRSWDDVACVQLISKFRSESSGPELARINASVRPESGAWLHALPSPHLGTLLDDDSLRVAVALRLGCAVCEPHICICGAQVEANGHHGLGCTRCAGRRPRHHAINDILKRALVSAEVPSVLEPPGLSRSDGKRPDGLTLVPWRRGRCLVWDATCVSTFASCHLPATQQSAGAGAEAAARGKHLKYACLGAAYEFVPFAVETAGPWCAEARRLVHDLGIRLREKGRDPRSGWFLAQRISLAIQRGNAASIAGTFGRGSMRGET

SEQ ID NO: 19210 - protein, 947 aa, Erannis defoliaria
MASPTRAPCPHCPGSAKLYSVPHGLRVHIGRMHKDVALPGSVGPAPTASLDPSSQSAGAPATTLPGLSLDDLPTLSKVRVLRHVPKGARCLAAGRLSSLIEQCVQSNKTVDWVALLSFAYTALRLPDSGDNKSLTSKVKENIIASSQSSFPADSLPQRAPSFYKSVQAKVFEGDLRGAARLLTSDCSFAPSGADTLAALRDKHPAPTRLPSIPPAPDVESTPCLVVKVEDVSGALHSFYRGTAAGMDGLRPEHLKELTSSSAGDNGQRLLESLTRLCNFLLKGALNADVCPLLYGGSLCALQKKDGGLRPIAVGNTFRRLVAKLCCQAVRGEVASYLQPHQLGFGSSLGCEAAIHATRAFVMRQGSNDVLLKLDIRNAFNSIERGALLSEARDLAPSIFPFLCQCYSSPSVLSYEGQRILSQVGAQQGDPLGPLVFSLAIQKAIKSLESPLNVWYLDDGTIGGSPEVVQRDVVALFPALKDLGLEVNTAKCEFYACSPEAAESSADFTSLIPGLRIMDRKSLFLLGSPIFLEGMQDSLACKTQTLTSLASHFQHLPAHVSLSLLRACFGMPKLTYVIRTTPTWEFPEEVLRYDDVLKRIVEEVLNISLSEAQWCQASLPIRFGGLGVRRLQECGPVAFLASSYGASGLVGCLLHNLDVDVSIPFVREAHGMWRHLYPGTDPPAKPSVQRGWDDVAGAHILAHLRSGASGVELARLNAASKPESGAWLRALPSPNLGTLLDDDSLRVAASLRLGCAVCEPHTCVCGAKVEADGLHGLSCARCAGRRPRHHAINELLRRALISADIPCVLEPPGLSRSDGKRPDGLTLVPWQKGRCLIWDATCVSTFSACHLSATQRTAGAGAESAALGKHNKYAALESGYNFVPFAVETAGPWCSEAKKFVDDLGRRLRSSGRDPRSGQYLTQHISLALQRGNAASLMGTFGRVVTDR

SEQ ID NO: 19211 - protein, 951 aa, Eilema depressum
MASPTRSPCPHCPGSARLFALPHGLRVHIGRMHKGAGVSSRLGVESDMASGGPASPAGEAPAASQAGLGLGDLPTLKSRIRVLRHVPKGARHLAAGRLSFLIEQCLGANQASDWASLLSFAFTALRLPGTGDGRSLTARVKENIARSAQLSCPSDPLPRRLPSFYKSVQAKVYDGDLRGAARLLTSDCSFAPRGADTLAALRDKHPAPANPTIILPAPDDDSSPCLEVSAGEVSEAVGSFPRGSAAGMDGLRPEHLKELISPSAGDNGQKLLASLTRLCNFLLRGSLNDEVCPFLYGGSLFALQKRDGGIRPIAVGNAFRRLVAKLCCRAVRGAVAPYLQPHQLGFGTPLGCEAAIHAVRAFVTREGSGDVLLKVDIRNAFNSIDRGAMLAEVRELTPSIFPFLRQCYTCRSSLSYDGETIWSQVGAQQGDPLGPLIFSMAIHKAIQSLQSPLNVWYLDDGTIGGRPDVVLRDVAALFPALRDLGLEINPEKCELYPCGPVTAESSMNFMSLIPGLRIMDRNSLCLLGSPLFPEGMPDDLAARTRVLASLAEHFRHLPAHVSLSLLRSCFGMPKLTYVIRTTPTWEFPDEVLRFDETLKRIVEETLNVDLSERQWCQASLPIRFGGLGVRRLRECGPIAFLASSHGASRLVRSLLSRVGAGIDIPYFREAHETWTRLYPESVPPARPGEQRGWDNVSGACILARLRDGASGVELARLNASSEPESGAWLQALPSPNLGTLLDDDSLRVAAGLRLGCAVCEPHTCVCGARVEANGLHGLSCVRSAGRRPRHHALNEVVRKALVAAGIPCVLEPPGLSRTDGKRPDGLTLVPWRRGRSLIWDATCVCTFASCHLTATQRVAGAGAESAALLKHSKYADLEAAGYDFVPFAVETAGPWGLEAKKFVADLGCRMRREGRDPRSGQYLQQNISLAIQRGNAASLMGTFGRGDVVLT

SEQ ID NO: 19212 - protein, 954 aa, Eilema sororculum
MASPSRSPCPHCPGSARLYALPHGLRVHIGRMHKGVGMPLVGRVLGFGSDTVPGDPTSPARGAPATTQAGLGLGDLPALKPRIRVLRHVPKGARHLAAGRLSFLIEQCLSSYQAPDWTSLMSFAFTALRLPGTGDGRSLTSRVKENITRGAQLSYPTDPLPQRSPSFYKSIQAKVYEGDLRGAARLLTSDCTFVPRGADTLASLRDKHPTLIHPTIVPPVPGEDASPSLEVSVGDVSEAINSFPRGSVAGMDGLRPEHIKELTSPSAGDNGRKLLESLTRLCNFLLKGNVRDDVCPYLYGGSLFALQKKDGGIRPIAVGNTLRRLVAKLCCRAVRGAVTPYLQPHQLGFGTPLGCEAAIHAARAFVTREGGGDVLLKVDIRNAFNSIDRGAMLAEVRELTPSIYPFLRQCYAFHSLLSYDGEIIWSQVGAQQGDPLGPLIFSMAIHKTIQSLQSPLNVWYLDDGTIGGSPDVVLRDVEALFPALKDLGLEINTAKCELYPCGLMTEELRANFMSRIPGLRIMDRDTLCLLGSPLFPEGMPEDLTTRTRVLASLAEHFHHLPAHVSLSLLRSCFGMPKLTYVIRTTPTWEFPDEVLRFDETLKRIVEEILNIDLNERQWCQASLPIRFGGLGVRRLQECGPIAFLASCHGASRLVGRLLSRVDADMDIPYLKGAHETWTRLYPESDPPERPGEQRGWDSASGACILARLRDSASGVELARLNASSEPESGAWLHALPSPNLGTLLDDDSLRVAAGLRLGCTVCEPHTCACGARVEADGLHGLSCTRSAGRRPRHHAINDIVRRALVPAGIPCILEPPGLSRTDGKRPDGLTLVPWRRGRCLIWDATCVCTFASCHLTATQRVAGAGAESAALLKHNKYAALEAAGYDFVPFAVETAGPWGLEAKRFVADLGCRLRKEGWDSRSSQYLIQNVSLAIQRGNAASLMGTFGRGDVDTT

SEQ ID NO: 19213 - protein, 952 aa, Eilema depressum
MASPTRSPCPHCPGSARLFALPHGLRVHIGRMHKGVGAPLAGRGLWVGSDAVPGDTASPGGVAPATSQAELGLSDLPSLRSRIRVLRHVPKGARHLAAGRLSFLIEQCLSSNRAPDWVSLLSFAFTALRLPGAGDGRSLTSRVKENITKSAQLPYPKDPLPQRSPSFYKSLQAKVYEGDLRGAARLLASDCSFAPRGADTLASLREKHPTPARPIIVPPAPDIDSSPCLEVSAGDVAEAIRSFPRGSAAGMDGLRPDHVKELTSQSAGDNGQKLLESLTRLCNFLLKGDLSDDVCPFLYGGSLFALQKKDGGIRPIAVGNTVRRLVARLCCRAVRGAVSPYLQPHQLGFGTPLGCEAAIHAARAFVMRQGSDDVLLKLDIRNAFNSIDRGALLEEVRELTPSIFPFLRQCYGSRSLLSYDGETIWSQVGAQQGDPLGPLIFSMAIHKAIQSLQSPLNVWYLDDGTIGGSPDVVLRDVEVLFPVLKDLGLEINSAKCELYPCGPVAQELAVNFMSLIPGLRFMDRDSLSLLGSPLFPEGMPGDLATRTRVLATLADHFHHLPAHVSLSLLRSCFGMPKLTYVIRTTPTWEFPDEVRRFDEVLKGIVENILNVDLSERQWCQASLPIRFGGLGVRRLQECGPIAFLASSHGVTRLVGCILSRVGADISIPYFREAHETWTALYPEAVPPARPGEQRGWDDASGTCILTRLRDSAVGIELARLNASSEPESGAWLHALPSPNLGTLLDDDSLRVAAALRLGCTVCEPHNCVCGARVEANGLHGLSCARSAGRRPRHHALNEIVRRALVSAGIPCVLEPPGLSRTDGKRPDGLTLVPWRRGRSLIWDATCVCTFASCHLAATQRAAGAGAESAALVKHGKYADLEAAGYDFVPFAVETAGPWGLEAKRFVADLGYRLRREGRDPRSGQYLQQNISLAIQRGNAASLMGTFGQGGVV

SEQ ID NO: 19214 - protein, 978 aa, Eilema sororculum
MTLYNLSGIVRIYLKHEKTLINTIYMSPSRSPCPHCPGSARLYALPHGLRVHIGRMHKGVGMPLVGRALGFGSDTVPGDPTSPARGAPATTQAELGLGDLPALKPRIRVLRHVPKGARHLAAGRLSFLIEQCLSSNQAPDWTSLMSFAFTALRLPGTGDGRSLTSRVKENITRGAQLSYPADPLPQRSPSFYKSIQAKVYEGDLRGAARLLTSDCTFAPRGADTLASLRDKHPTLIHPTIVPPVPGEDASPSLEVSVGDVSEAINSFPRGSAAGVDGLRPEHIKELTSPSAGDNGRKLLESLTRLCNFLLKGNVRDDVCPYLYGGSLFALQKKDGGIRPIAVGNTLRRLVAKLCCRAVRGAVTPYLQPHQLGFGTPLGCEAAIHAARAFVTREGGGDVLLKVDIRNAFNSIDRGAMLAEVRELTPSIYPFLRQCYAFHSLLSYDGEIIWSQVGAQQGDPLGPLIFSMAIHKTIQSLQSPLNVWYLDDGTIGGSPDVVLRDVEALFPALKDLGLEINTAKCELYPCGLMTEELRANFMSRIPGLRIMDRDTLCLLGSPLFPEGMPEDLTTRTRVLASLAEHFHHLPAHVSLSLLRSCFGMPKLTYVIRTTPTWEFPDEVLRFDETLKRIVEEILNIDLNERQWCQASLPIRFGGLGVRRLQECGPIAFLASCHGASRLVGRLLSRVDADMDIPYLKEAHETWTRLYPESDPPERPGEQRAWDSASGACILARLRDSASGVELARLNASSEPESGAWLHALPSPNLGTLLDDDSLRVAAGLRLGCTVCEPHTCACGARVEADGLHGLSCTRSAGRRPRHHAINDIVRRALVSAGIPCILEPPGLSRTDGKRPDGLTLVPWRRGRCLIWDATCVCTFASCHLTATQRVAGAGAESAALLKHNKYAALEAAGYDFVPFAVETAGPWGLEAKRFVADLGCRLRKEGWDSRSGQYLIQNVSLAIQRGNAASLMGTFGRGDVDTT

SEQ ID NO: 19215 - protein, 951 aa, Eilema depressum
MASPTRSPCPHCPGSARLFALPHGLRVHIGRMHKGAGVSSRLGVESDMASGGLASPAGEAPAASQAGLGLGDLPTLKSRIRVLRHVPKGARHLAAGRLSFLIEQCLGANQASDWASLLSFAFTALRLPGTGDGRSLTARVKENIARSAQLSCPPDPLPQRLPSFYKSVQAKVYDGDLRGAARLLTSDCSFAPRGADTLAALRDKHPAPANPTIILPAPDDDSSPCLEVSAGEVSEAVGSFPRGSAAGMDGLRPEHLKELISPSAGDNGQKLLESLTRLCNFLLRGNLNDDVCPFLYGGSLFALQKRDGGIRPIAVGNAFRRLVAKLCCRAVRGAVAPYLQPHQLGFGTPLGCEAAIHAVRAFVTREGSGDVLLKVDIRNAFNSIDRGAMLAEVRELTPSIFPFLRQCYACRSSLSYDGETIWSQVGAQQGDPLGPLIFSMAIHKAIQSLQSPLNVWYLDDGTIGGRPDVVLRDVAALFPALRDLGLEINPEKCELYPCGPVTAESSMNFMSLIPGLRIMDRNSLCLLGSPLFPEGMPDDLAARTRVLASLAEHFRHLPAHVSLSLLRSCFGMPKLTYVIRTTPTWEFPDEVLRFDETLKRIVEETLNVDLSERQWCQASLPIRFGGLGVRRLRECGPIAFLASSHGASRLVRSLLSRVGAGIDIPYFREAHETWTRLYPESVPPARPGEQRGWDNVSGACILARLRDGASGIELARLNASSEPESGAWLQALPSPNLGTLLDDDSLRVAAGLRLGCAVCEPHTCVCGARVEANGLHGLSCVRSAGRRPRHHALNEVVRKALVAAGIPCVLEPPGLSRTDGKRPDGLTLVPWRRGRSLIWDATCVCTFASCHLTATQRVAGAGAESAALLKHSKYADLEAAGYDFVPFAVETAGPWGLEAKKFVADLGCRMRREGRDPRSGQYLQQNISLAIQRGNAASLMGTFGRGDVVST

SEQ ID NO: 19216 - protein, 947 aa, Eilema depressum
MASPTRSPCPHCPGSARLFALPHGLRVHIGRMHKGVGASLAGRGLWVGSDAVPGDTSSPGGVAPATSQAELGLSDLPSLRSRIRVLRHVPKGARHLAAGRLSFLIEQCLSSNRAPDWVSLLSFAFTALRLPGAGDGRSLTSRVKENITKSAQLPYPKDPLPQRSPSFYKSVQAKVYEGDLRGAARLLASDCSFAPRGADTLASLREKHPTPARPIIVPPAPDIDSSPCLEVSAGDVAEAIRSFPRGSAAGMDGLRPDHVKELTSQSAGDNGQKLLESLTRLCNFLLKGDLSDDVCPFLYGGSLFALQKKDGGIRPIAVGNTVRRLVARLCCRAVRGTVSPYLQPHQLGFGTPLGCEAAIHAARAFVMRQGSDDVLLKLDIRNAFNSIDRGALLEEVRELTPSIFPFLRQCYGSRSLLSYDGETIWSQVGAQQGDPLGPLIFSMAIHKAIQSLQSPLNVWYLDDGTIGGSPDVVLRDVEVLFPVLKDLGLEINPAKCELYPCGPVAQELAVNFMSLIPGLRFMDRDSLSLLGSPLFPEGMPGDLATRTRVLATLADHFHHLPAHVSLSLLRSCFGMPKLTYVIRTTPTWEFPDEVRRFDEVLKGIVENILNVDLSERQWCQASLPIRFGGLGVRRLQECGPIAFLASSHGVTRLVGCILSRVGADISIPYFREAHETWTALYPEAVPPARPGEQRGWDDASGTCILTRLRDSAVGIELARLNASSEPESGAWLHALPSPNLGTLLDDDSLRVAAALRLGCTVCEPHNCVCGARVEANGLHGLSCARSAGRRPRHHALNEIVRRALVSAGIPCVLEPPGLSRTDGKRPDGLTLVPWRRGRSLIWDATCVCTFASCHLAATQRAAGAGAESAALVKHGKYADLEAAGYDFVPFAVETAGPWGLEARRFVADLGYRLRREGRDPRSGQYLQQNISLAIQRGNAASLMGTFG

SEQ ID NO: 19217 - protein, 951 aa, Eilema depressum
MASPTRSPCPHCPGSARLFALPHGLRVHIGRMHKGAGVSSRLGVESDMASGGPASPAGEAPAASQAGLGLGDLPTLKSRIRVLRHVPKGARHLAAGRLSFLIEQCLGANQASDWASLLSFAFTALRLPGTGDGRSLTARVKENIARSAQLSCPSDPLPQRLPSFYKSVQAKVYDGDLRGAARLLTSDCSFAPRGADTLAALRDKHPAPANPTIILPAPDDDSSPCLEVSAGEVSEAVGSFPRGSAAGMDGLRPEHLKELISPSAGDNGQKLLASLTRLCNFLLRGSLNDEVCPFLYGGSLFALQKRDGGIRPIAVGNAFRRLVAKLCCRAVRGAVAPYLQPHQLGFGTPLGCEAAIHAVRAFVTREGSGDVLLKVDIRNAFNSIDRGAMLAEVRELTPSIFPFLRQCYSCRSSLSYDGETIWSQVGAQQGDPLGPLIFSMAIHKAIQSLQSPLNVWYLDDGTIGGRPDVVLRDVAALFPALRDLGLEINPEKCELYPCGPVTAESSMNFMSLIPGLRIMDRNSLCLLGSPLFPEGMPDDLAARTRVLASLAEHFRHLPAHVSLSLLRSCFGMPKLTYVIRTTPTWEFPDEVLRFDETLKRIVEETLNVDLSERQWCQASLPIRFGGLGVRRLRECGPIAFLASSHGASRLVRSLLSRVGAGIDIPYFREAHETWTRLYPESVPPARPGEQWGWDNVSGACILARLRDGASGVELARLNASSEPESGAWLQALPSPNLGTLLDDDSLRVAAGLRLGCAVCEPHTCVCGARVEANGLHGLSCVRSAGRRPRHHALNEVVRKALVAAGIPCVLEPPGLSRTDGKRPDGLTLVPWRRGRSLIWDATCVCTFASCHLTATQRVAGAGAESAALLKHSKYADLEAAGYDFVPFAVETAGPWGLEAKKFVADLGCRMRREGRDPRSGQYLQQNISLAIQRGNAASLMGTFGRGDVVST

SEQ ID NO: 19218 - protein, 950 aa, Erannis defoliaria
MTNPARAPCPHCLDSVKLFSVPHGLRVHIGRKHKNIVRPATPPGPIFVASGAPTPLAPSPSPARDLPSFCLEDLPALRARVRVLRHIPKGARCLAAGKLATLINNAIKSNSACDWLEVLTFAYTALKVPVQGDKKTLTAKVKYNVEKAHLELPSEFVPSRSPSLYKSVQGKVFEGDLRGAARLLTSDCTFAPSGEETLASLKEKHPAPSGAPRIPPLPDSATPCLVVTLENVSAALQTFQRGSAAGIDGLRPDHLKELTSSSAGDCGLRLLEAITKLCNFLLEGNLSPEVCPLLYGGSLCALQKKDGEVRPIAVGSALRRLVAKLCCQAVRSSMAPYLQPHQVGFGTPLGCEAAIHATRSFVLREGSDDVLVKLDIRNAFNSIDRVLMLEEVKDLTPSIFRFLLQCYATPSYLSYDGSRILSQVGVQQGDPLGPLIFSMAIQKAIKALEAPLNIWYLDDGTIGGHPDVVARDIRMLFPALKDLGLEVNTAKCELYLCSPVAAESSATFESLIPGLRITNRDSLCLLGAPVFLDGVSDSLRLKTATLTSLSAHFHHLPAHVALTLLGTCFAMPKITYVIRTAPCWKFPEEVSRFDIALKQIVEETLNVCLSESQWSQASLPIRFGGLGVRRLHETGPIAFLASAHGVADLVTRILRNGDIVRIPYAEEASARWSVMCPDAGLPLKPEWQRSWDNLLGKQLVTKWRSENTGVDLARINAVTTPESGAWLHALPSPHMGTLLDDDSLRVAAALRLGCPVCEPHTCICGARVEADGHHGLSCTRCAGRRPRHHAINDILKRAFVLAEVPCVLEPPGLSRTDGKRPDGLTLVPWQKGRCLVWDATCVSTFASCHLPATQQSAGAGAEAAARGKRLKYASLEPVYDFVPFAVETSGPWCSEAKQLVRNLGRRLKERGRDPRSGWFLAQQISIAVQRGNAASVLGTFGPGAARGSDP

SEQ ID NO: 19219 - protein, 948 aa, Erannis defoliaria
MTSPARAPCPYCPDSVKLFSIPHGLRVHIGRKHKDIALPATLGSKSAVPVGLQPLASQPPPPTRDLPSFCLEDLPTLRARVRVLRHIPRGARCLAASKLATLINNALGSNSSSDWLEVLTFSYTALKVPDQGDKKTLTAKVKYNVEKAHLELPTEVGSSGSPSLYKSVQAKVFEGDLRGAARLLTSDCSFAPPGEETLASLREKHPAPSGAPRIPPLPDSSAPCLVVTVENVSAALQTFHRGSAAGMDGLRPDHLKELTSSSAGDWGQRLLEAITKLCNFLLEGNLCAEVCPFLYGGSLCALQKKDGGVRPIAVGSSLRRLVAKLCCQAVRSGMTPYLQPHQVGFGTSLGCEAAIHATRSFVLREGSDDVLVKLDIRNAFNSIDRVSMLEEVKDLTPSIFRFLLQCYAAPSYLSYDGNRILSQVGVQQGDPLGPLIFSMAIQKAIRAIKAPLNIWYLDDGTIGGHPDIVARDIRVLFPALKDLGLEVNTAKCELYPCSPVAAESRSTFESLIPGLRIMNRDALCLLGAPIFVDGVPDSLRSKTATLTSLSAHFQHLPAHVALTLLGTCFAMPKITYVIRTAPSWKFPEEVSCFDNALKQMVEETLNVCLNESQWSQASLPIRFGGLGVRRLHETGPIAFLASSHGVADLVTRILHNGDIVRIPYAEEAFVRWSAMCPDANPPEKPEWQRSWDNLLGKRLITKWRSECTGVDLARLNAVTTPESGAWLHALPSPHMGTLLDDDSLRVAAALRLGCSVCEPHTCICGARVEADGHHGLSCTRCAGRRPRHHAINDILKRAFVSAEVPCVLEPPGLSRSDGKRPDGLTLVPWQKGRCLVWDATCVSTFASCHLPATQQSAGAGAEAAARGKRYKYASLEPVYDFVPFAVETSGPWSSDAKQLVRDLGRRLRERGQDPRSGWFLAQRVSIAIQRGNAASVLGTFGPGATRGS

SEQ ID NO: 19220 - protein, 948 aa, Erannis defoliaria
MTSPARAPCPYCPDSVKLFSIPHGLRVHIGRKHKDIALPATLGSKSAVPVGLQPLASQPPPPTRDLPSFCLEDLPTLRARVRVLRHIPRGARCLAASKLATLINNALGSNSSSDWLEVLTFSYTALKVPDQGDKKTLTAKVKYNVEKAHLELPTEVGSSGSPSLYKSVQAKVFEGDLRGAARLLTSDCSFAPPGEETLASLREKHPAPSGAPRIPPLPDSSAPCLVVTVENVSAALQTFHRGSAAGMDGLRPDHLKELTSSSAGDWGQRLLEAITKLCNFLLEGNLCAEVCPFLYGGSLCALQKKDGGVRPIAVGSSLRRLVAKLCCQAVRSGMTPYLQPHQVGFGTSLGCEAAIHATRSFVLREGSDDVLVKLDIRNAFNSIDRVSMLEEVKDLTPSIFRFLLQCYAAPSYLSYDGNRILSQVGVQQGDPLGPLIFSMAIQKAIRAIKAPLNIWYLDDGTIGGHPDIVARDIRVLFPALKDLGLEVNTAKCELYPCSPVAAESRSTFESLIPGLRIMNRDALCLLGAPIFVDGVPDSLRSKTATLTSLSAHFQHLPAHVALTLLGTCFAMPKITYVIRTAPSWKFPEEVSCFDNALKQMVEETLNVCLNESQWSQASLPIRFGGLGVRRLHETGPIAFLASSHGVADLVTRILHNGDIVRIPYAEEAFVRWSAMCPDANPPEKPEWQRSWDNLLGKRLITKWRSECTGVDLARLNAVTTPESGAWLHALPSPHMGTLLDDDSLRVAAALRLGCSVCEPHTCICGARVEADGHHGLSCTRCAGRRPRHHAINDILKRAFVSAEVPCVLEPPGLSRSDGKRPDGLTLVPWQKGRCLVWDATCVSTFASCHLPATQQSAGAGAEAAARGKRYKYASLEPVYDFVPFAVETSGPWSSDAKQLVRDLGRRLRERGQDPRSGWFLAQRVSIAIQRGNAASVLGTFGPCATRGS

SEQ ID NO: 19221 - protein, 948 aa, Erannis defoliaria
MTSSARAPCPYCPDSVKLFSIPHGLRVHIGRKHKDIALPATLGSKSAVPVGLQPLASQPPPPTRDLPSFCLEDLPTLRARVRVLRHIPRGARCLAASKLATLINNALGSNSSSDWLEVLTFSYTALKVPDQGDKKTLTAKVKYNVEKAHLELPTEVGSSGSPSLYKSVQAKVFEGDLRGAARLLTSDCSFAPPGEETLASLREKHPAPSGAPRIPPLPDSSAPCLVVTVENVSAALQTFHRGSAAGMDGLRPDHLKELTSSSAGDWGQRLLEAITKLCNFLLEGNLCAEVCPFLYGGSLCALQKKDGGVRPIAVGSSLRRLVAKLCCQAVRSGMTPYLQPHQVGFGTSLGCEAAIHATRSFVLREGSDDVLVKLDIRNAFNSIDRVSMLEEVKDLTPSIFRFLLQCYAAPSYLSYDGNRILSQVGVQQGDPLGPLIFSMAIQKAIRAIKAPLNIWYLDDGTIGGHPDIVARDIRVLFPALKDLGLEVNTAKCELYPCSPVAAESRSTFESLIPGLRIMNRDALCLLGAPIFVDGVPDSLRSKTATLTSLSAHFQHLPAHVALTLLGTCFAMPKITYVIRTAPSWKFPEEVSCFDNALKQMVEETLNVCLNESQWSQASLPIRFGGLGVRRRHETGPIAFLASSHGVADLVTRILHNGGIVRIPYAEEAFVRWSAMCPDANPPEKPEWQRSWDNLLGKRLITKWRSECTGVDLARLNAVTTPESGAWLHALPSPHMGTLLDDDSLRVAAALRLGCSVCEPHTCICGARVEADGHHGLSCTRCAGRRPRHHAINDILKRAFVSAEVPCVLEPPGLSRSDGKRPDGLTLVPWQKGRCLVWDATCVSTFASCHLPATQQSAGAGAEAAARGKRYKYASLEPVYDFVPFAVETSGPWSSDAKQLVRDLGRRLRERGQDPRSGWFLAQRVSIAIQRGNAASVLGTFGPGATRGS

SEQ ID NO: 19222 - protein, 948 aa, Erannis defoliaria
MTSPARAPCPYCPDSVKLFSIPHGLRVHIGRKHKDIALPATLGSKSAVPVGLQPLASQPPPPTRDLPSFCLEDLPTLRARVRVLRHIPRGARCLAASKLATLINNALGSNSSSDWLEVLTFSYTALKVPDQGDKKTLTAKVKYNVEKAHLELPTEVGSSGSPSLYKSVQAKVFEGDLRGAARLLTSDCSFAPPGEETLASLREKHPAPSGAPRIPPLPDSSAPCLVVTVENVSAALQTFHRGSAAGMDGLRPDHLKELTSSSAGDWGQRLLEAITKLCNFLLEGNLCAEVCPFLYGGSLCALQKKDGGVRPIAVGSSLRRLVAKLCCQAVRSGMTPYLQPHQVGFGTSLGCEAAIHATRSFVLREGSDDVLVKLDIRNAFNSIDRVSMLEEVKDLTPSIFRFLLQCCAAPSYLSYDGNRILSQVGVQQGDPLGPLIFSMAIQKAIRAIKAPLNIWYLDDGTIGGHPDIVARDIRVLFPALKDLGLEVNTAKCELYPCSPVAAESRSTFESLIPGLRIMNRDALCLLGAPIFVDGVPDSLRSKTATLTSLSAHFQHLPAHVALTLLGTCFAMPKITYVIRTAPSWKFPEEVSCFDNALKQMVEETLNVCLNESQWSQASLPIRFGGLGVRRLHETGPIAFLASSHGVADLVTRILHNGDIVRIPYAEEAFVRWSAMCPDANPPEKPEWQRSWDNLLGKRLITKWRSECTGVDLARLNAVTTPESGAWLHALPSPHMGTLLDDDSLRVAAALRLGCSVCEPHTCICGARVEADGHHGLSCTRCAGRRPRHHAINDILKRAFVSAEVPCVLEPPGLSRSDGKRPDGLTLVPWQKGRCLVWDATCVSTFASCHLPATQQSAGAGAEAAARGKRYKYASLEPVYDFVPFAVETSGPWSSDAKQLVRDLGRRLRERGQDPRSGWFLAQRVSIAIQRGNAASVLGTFGPGATRGV

SEQ ID NO: 19223 - protein, 948 aa, Erannis defoliaria
MTSPARAPCPYCPDSVKLFSIPHGLRVHIGRKHKDIALPATLGSKSAVPVGLQPLASQPPPPTRDLPSFCLEDLPTLRARVRVLRHIPRGARCLAASKLATLINNALGSNSSSDWLEVLTFSYTALKVPDQGDKKTLTAKVKYNVEKAHLELPTEVGSSGSPSLYKSVQAKVFEGDLRGAARLLTSDCSFAPPGEETLASLREKHPAPSGAPRIPPLPDSSAPCLVVTVENVSAALQTFHRGSAAGMDGLRPDHLKELTSSSAGDWGQRLLEAITKLCNFLLEGNLCAEVCPFLYGGSLCALQKKDGGVRPIAVGSSLRRLVAKLCCQAVRSGMTPYLQPHQVGFGTSLGCEAAIHATRSFVLREGSDDVLVKLDIRNAFNSIDRVSMLEEVKDLTPSIFRFLLQCYAAPSYLSYDGNRILSQVGVQQGDPLGPLIFSMAIQKAIRAIKAPLNIWYLDDGTIGGHPDIVARDIRVLFPALKDLGLEVNTAKCELYPCSPVAAESRSTFESLIPGLRIMNMDALCLLGAPIFVDGVPDSLRSKTATLTSLSAHFQHLPAHVALTLLGTCFAMPKITYVIRTAPSWKFPEEVSCFDNALKQMVEETLNVCLNESQWIQASLPIRFGGLGVRRLHETGPIAFLASSHGVADLVTRILHNGDIVRIPYAEEAFVRWSAMCPDANPPEKPEWQRSWDNLLGKRLITKWRSECTGVDLARLNAVTTPESGAWLHALPSPHMGTLLDDDSLRVAAALRLGCSVCEPHTCICGARVEADGHHGLSCTRCAGRRPRHHAINDILKRAFVSAEVPCVLEPPGLSRSDGKRPDGLTLVPWQKGRCLVWDATCVSTFASCHLPATQQSAGAGAEAAARGKRYKYASLEPVYDFVPFAVETSGPWSSDAKQLVRDLGRRLRERGQDPRSGWFLAQRVSIAIQRGNAASVLGTFGPGATRGS

SEQ ID NO: 19224 - protein, 948 aa, Erannis defoliaria
MTSPARAPCPYCPDSVKLFSIPHGLRVHIGRKHKDIALPATLGSKSAVPVGLQPLASQPPPPTRDLPSFCLEDLPTLRARVRVLRHIPRGARCLAASKLATLINNALGSNSSSDWLEVLTFSYTALKVPDQGDKKTLTAKVKYNVEKAHLELPTEVGSSGSPSLYKSVQAKVFEGDLRGAARLLTSDCSFAPPGEETLASLREKHPAPSGAPRIPPLPDSSAPCLVVTVENVSAALQTFHRGSAAGMDGLRPDHLKELTSSSAGDWGQRLLEAITKLCNFLLEGNLCAEVCPFLYGGSLCALQKKDGGVRPIAVGSSLRRLVAKLCCQAVRSGVTPYLQPHQVGFGTSLGCEAAIHATRSFVLREGSDDVLVKLDIRNAFNSIDRVSMLEEVKDLTPSIFRFLLQCYAAPSYLSYDGNRILSQVGVQQGDPLGPLIFSMAIQKAVRAIKAPLNIWYLDDGTIGGHPDIVARDIRVLFPALKDLGLEVNTAKCELYPCSPVAAESRSTFESLIPGLRIMNRDALCLLGAPIFVDGVPDSLRSKTATLTSLSAHFQHLPAHVALTLLGTCFAMPKITYVIRTAPSWKFPEEVSCFDNALKQMVEETLNVCLNESQWSQASLPIRFGGLGVRRLHETGPIAFLASSHGVADLVTRILHNGDIVRIPYAEEAFVRWSAMCPDANPPEKPEWQRSWDNLLGKRLITKWRSECTGVDLARLNAVTTPESGAWLHALPSPHMGTLLDDDSLRVAAALRLGCSVCEPHTCICGARVEADGHHGLSCTRCAGRRPRHHAINDILKRAFVSAEVPCVLEPPGLSRSDGKRPDGLTLVPWQKGRCLVWDATCVSTFASCHLPATQQSAGAGAEAAARGKRYKYASLEPVYDFVPFAVETSGPWSSDAKQLVRDLGRRLGERGQDPRSGWFLAQRVSIAIQRGNAASVLGTFGPGATRGS

SEQ ID NO: 19225 - protein, 948 aa, Erannis defoliaria
MTSPARAPCPYCPDSVKLFSIPHGLRVHIGRKHKDIALPATLGSKSAVPVGLQPLASQPPPPTRDLPSFCLEDLPTLRARVRVLRHIPRGARCLAASKLATLINNALGSNSSSDWLEVLTFSYTALKVPDQGDKKTLTAKVKYNVEKAHLELLTEVGSSGSPSLYKSVQAKVFEGDLRGAARLLTSDCSFAPPGEETLASLREKHPAPSGAPRIPPLPDSSAPCLVVTVENVSAALQTFHRGSAAGMDGLRPDHLKELTSSSAGDWGQRLLEAITKLCNFLLEGNLCAEVCPFLYGGSLCALQKKDGGVRPIAVGSSLRRLVAKLCCQAVRSGMTPYLQPHQVGFGTSLGCEAAIHATRSFVLREGSDDVLVKLDIRNAFNSIDRVSMLEEVKDLTPSIFRFLLQCYAAPSYLSYDGNRILSQVGVQQGDPLGPLIFSMAIQKAIRAIKAPLNIWYLDDGTIGGHPDIVARDIRVLFPALKDLGLEVNTAKCELYPCSPVAAESRSTFESLIPGLRIMNRDALCLLGAPIFVDGVPDSLRSKTATLTSLSAHFQHLPAHVALTLLGTCFAMPKITYVIRTAPSWKFPEEVSCFDNALKQMVEETLNVCLNESQWSQASLPIRFGGLGVRRLHETGPIAFLASSHGVADLVTRILHNGDIVRIPYAEEAFVRWSAMCPDANPPEKPEWQRSWDNLLGKRLITKWRSECTGVDLARLNAVTTPESGAWLHALPSPHMGTLLDDDSLRVAAALRLGCSVCEPHTCICGARVEADGHHGLSCTRCAGRRPRHHAINDILKRAFVSAEVPCVLEPPGLSRSDGKRPDGLTLVPWQKGRCLVWDATCVSTFASCHLPATQQSAGAGAEAAARGKRYKYASLEPVYDFVPFAVETSGPWSSDAKQLVRDLGRRLRERGQDPRSGWFLAQRVSIAIQRGNAASVLGTFGPGATRGS

SEQ ID NO: 19226 - protein, 950 aa, Erannis defoliaria
MTNPARAPCPHCLDSVKLFSVPHGLRVHIGRKHKNIVRPATPPGPIFVASGAPTPLAPSPSPARDLPSFCLEDLPALRARVRVLRHIPKGARCLAAGKLATLINNAIKSNSACDWLEVLTFAYTALKVPVQGDKKTLTAKVKYNVEKAHLELPSEFVPSRSPSLYKSVQGKVFEGDLRGAARLLTSDCTFAPSGEETLASLKEKHPAPSGAPRIPPLPDSATPCLVVTLENVSAALQTFQRGSAAGIDGLRPDHLKELTSSSAGDCGLRLLEAITKLCNFLLEGNLSPEVCPLLYGGSLCALQKKDGGVRPIAVGSALRRLVAKLCCQAVRSSMAPYLQPHQVGFGTPLGCEAAIHATRSFVLREGSDDVLVKLDIRNAFNSIDRVLMLEEVKDLTPSIFRFLLQCYATPSYLSYDGSRILSQVGVQQGDPLGPLIFSMAIQKAIKALEAPLNIWYLDDGTIGGHPDVVARDIRMLFPALKDLGLEVNTAKCELYLCSPVAAESSATFESLIPGLRITNRDSLCLLGAPIFLDGVSDSLRLKTATLTSLSAHFHHLPAHVALTLLGTCFAMPKITYVIRTAPCWKFPEEVSRFDIALKQIVEETLNVCLSESQWSQASLPIRFGGLGVRRLHKTGPIAFLASAHGVADLVTRILRNGDIVRIPYAEEASARWSVMCPDAGLPLKPEWQRSWDNLLGKQLVTKWRSENTGVDLARINAVTTPESGAWLHALPSPHMGTLLDDDSLRVAAALRLGCPVCEPHTCICGARVEADGHHGLSCTRCAGRRPRHHAINDILKRAFVLAEVPCVLEPPGLSRTDGKRPDGLTLVPWQKGRCLVWDATCVSTFASCHLPATQQSAGAGAEAAARGKRLKYASLEPVYDFVPFAVETSGPWCSEAKQLVRNLGRRLKERGRDPRSGWFLAQQISIAVQRGNAASVLGTFGPGAARGSDP

SEQ ID NO: 19227 - protein, 1024 aa, Xanthogramma pedissequum
MATPHNTDNNATHWPCPKCGNVYASQTGAQQHFRRVCSKRPDDVNNCQICARFFPTYQGLRQHQRLAHPAEYNNMLEEDASNARRKWTIDEEKELAKIEAGMAGEPASKIMDVLAAKSSRTREAIKLRRRRESYKALVSSYLIPPTEPTPPAVPYGNEDTANLNLAIVSYLNSIPQNNWDADDFTLLSAINNDSNSTHEANIQYYENIVSRFGADPNTHHQNNTNLINALNNAPNNRKRKRICYKLTQKEYTSDKSRCANRILDNLPWTVLETTPPDAAILNQFRSTFGCYAETGLPDGHCSRYNNTVISHPFTREEVESHINSLKSNSPGPDGITKSKLKKVPMHKLTLLFNSLLLAEDLPDGLKRNNTTIIPKTNSQLENPKNWRPITISSIILRVFNRIITKRLNNIELQESQRGFTPIDGCFANSWSVESLIKYHRLKGKPLTLISLDLTAAFDSVPHNAILRALRRTKIDEKYINLVKASFEGSSTNITCNGRSVGSVPILRGVKQGDPASPVYFNIFMDELITLLDEDFAGININGFKICCLAYADDLILIAETPDDGKRMLKKTVDFLTAMRMSVNAKKCSTFVLKTVPAMKKVCVDTRTIFKVNSVPIPIIDTQGKFKYLGENFTYKGLSTATRGDLLEQLQRISRAPLKPHQKLSILKEYLIPRFIAYLQKPNITANVLKGADAKIRKATRNFLHLNSKCHCSIFHAPIKYGGLGIFNFTENIPIIMLERITKLRNVSPLLSATFQLANNRIDSIKNMVKPRSITKTEIHEKHKQDLQNSFSGNGLVQAQYSQASSQHLSNPPKCWNGEDYIRSIQLRYNLLPCAGMPSNPPEARYCRAGCQRKETNSHILQRCPIAHTNRIKRHNYIVKRLTNIAVKKSWSYQLEPHIRCRDGTLKKPDLILLKGNQLIICDVGVHWEGPNTLTSQYNTKVSIYSTPNFIDAIKERFPQYIISVLPFIVGARGIWCHENRFIAHHLKITKREAADIITTTIRGSIITHRNFMKFVWRTRPHQHQ

SEQ ID NO: 19228 - protein, 1026 aa, Platycheirus albimanus
MATPQDMNNSARQSWPCEKCGNIYATKAKARQHFNRYCSKRPDDISNCPYCTASFPTYAGLRLHQHSAHPVDYNDALEEEATVTKKRWTIDEEKELAKIEAGMVGRTVTAITDALVEKSGRTKDAIRSRRRLESYKALVSLYRASPTEPTPPPPPYGNEDISNLNAEILSYLNSLPQNIWDVDDSTLLNALNNDVSSRQDANTRYYENIVERFGCDRSISRQSNTTLINALNNAPSNRKRKRILYKLTQKEYTSNKSSCADRILDNLPWLVLETTPPSVEIVTHFQSTFGCHAETDLPDTQHPRYRKIVIAHPITKEEVEANIRSLTSNAPGPDGITKKQLQKVPSSKLILFLNALLIAEDFPAGLKSNITSLIPKSTIQLENPKNWRPITISSIILRVFNRIMAKRLNNIELQESQRGFTPIDGCFANTWSVQSLIKYHRLNGKPLTLISLDLAAAFDSVPHNAILRALNRTKIDQKYINLVQASFANSSTTIYCNGLHAGIVPILRGVKQGDPASPVHFNIFLDELITTLDEDFSGININGNKISCLAYADDLILVAETPDDGKRMLAKTIDFLTSMSMSVNANKCSTFVLKTVPAMKKVCVDTRTIFKVGSTAIPVLNIQGKLKYLGEHFTFTGLSPPGLGDLLEQLKRISRAPLKPQQKLSILKEYLVPRYIARLQMPNITAEVLNKADAKIRKATRSFLHLNSRCHNSIFHAPIRYGGLGLFNFTENIPIIISNRITRLRSASPLLNATFQLMNNRIDAINKMIKTGSTTKAEIQEKHHQLLQNSFSGNGLSQAQYSEASSIHLKNPPKCWNGEDYIRSIQLRFNLLPCMGIPSNPPEARNCRAGCNRKETNSHILQRCPIAHTTRITRHNFIVKRLTNIAARKNWTYQLEPHIRCRDGTLKKPDLLLIKGNLLIVCDVGVHWEGPLTLSSQYNTKTAIYSTPNFIDAIKERFPQYTILVLPLIMGARGIWCKENRFIQHHLSMSKREIADIVTTTIRGSYTIHRNFMKYVWRTRPPQQHH

SEQ ID NO: 19229 - protein, 1024 aa, Xanthogramma pedissequum
MATPHNTDNNATHWPCPKCGNVYASQTGAQQHFRRVCSKRPDDVNNCQICARFFPTYQGLRQHQRLAHPAEYNNMLEEDASNARRKWTIDEEKELAKIEAGMAGEPASKIMDVLAAKSSRTREAIKLRRRRESYKALVSSYLIPPTEPTPPAVPYGNEDTANLNLAIVSYLNSIPQNNWDADDFTLLSAINNDSNSTHEANIQYYENIVSRFGADPNTHHQNNTNLINALNNAPNNRKRKRICYKLTQKEYTSDKSRCANRILDNLPWTVLETTPPDAAILNQFRSTFGCYAETGLPDGHCSRYNNTVISHPFTREEVESHINSLKSNSPGPDGITKSKLKKVPMHKLTLLFNSLLLAEDLPDGLKRNNTTIIPKTISQLENPKNWRPITISSIILRVFNRIITKRLNNIELQESQRGFTPIDGCFANSWSVESLIKYHRLKGKPLTLISLDLTAAFDSVPHNAILRALRRTKIDEKYINLVKASFEGSSTNITCNGRSVGSVPILRGVKQGDPASPVYFNIFMDELITLLDEDFAGININGFKICCLAYADDLILIAETPDDGKRMLKKTVDFLTAMRMSVNAKKCSTFVLKTVPAMKKVCVDTRTIFKVNSVPIPIIDTQGKFKYLGENFTYKGLSTATRGDLLEQLQRISRAPLKPHQKLSILKEYLIPRFIAYLQKPNITANVLKGADAKIRKATRNFLHLNSKCHCSIFHAPIKYGGLGIFNFTENIPIIMLERITKLRNVSPLLSATFQLANNRIDSIKNMVKPRSITKTEIHEKHKQDLQNSFSGNGLVQAQYSQASSQHLSNPPKCWNGEDYIRSIQLRYNLLPCAGMPSNPPEARYCRAGCQRKETNSHILQRCPIAHTNRIKRHNYIVKRLTNIAVKKSWSYQLEPHIRCRDGTLKKPDLILLKGNQLIICDVGVHWEGPNTLTSQYNTKVSIYSTPNFIDAIKERFPQYIISVLPFIVGARGIWCHENRFIAHHLKITKREAADIITTTIRGSIITHRNFMKFVWRTRPHQHQ

SEQ ID NO: 19230 - protein, 781 aa, Anoplius nigerrimus
MARRIAYAQTQRAWQRNPCNCLRKILNDKSTSSVPPKEVMVPLWKTVMTGGDVPNSLAASGKTQTKEIWAPVTADEIRKAFPSSSTAPGPDGLTTRQLRAVPMGVLIRIFNLFLITKRLPQHLLESKTTLIPKKDGAAEPGDFRPITVSSVITRTFHKVLARRLMRSVHLDSRQKAFAPVDGCSEHLFDLDMVLKYHRQNFKPIYVASLDMAKAFDSVSHNTLRDAMQVYGVPVQMVQYVADTYSRSVTRLACGGWVSDPIHPTCGVKQGDPLSPILFNMVFDRLLKLIPPEVGVEIGGRHIKVLAFADDLVCIASTSNDLQIMLDTASDYLSKCGLAINTAKSFTVALQNVPHVKKSVVDANVRFQCSGHTLPALKRTDEWKYLGVPFTPEGRSTDREIELLRKDLDCLSSAPLKPQQRLFALRVMVLPGLYHLLTLGNTTVSKLKKIDIQIREVVRKWMALPPDVPNAYIHANVKDGGLSISSMRWLMPLRRRERLEKYASKGNNTCSYLALEIQHTKRRLSVERDDFNSAERIEERWARLLHSSIDGRALKDWRNVAQQHSWLTDGNKCLSGRDFIFLSKLRTNALPTRSRTTRGRRVDRSCRAGCRAVETMNHIMQQCHRTHGARIERHNAIVAYVKRALGKSFQTIEEEPRFQTPEGIRKPDLVAIKRSEAIFINAQVVSEHTDLEEAHKKKVAYYRSLKDAIKTKYNVSSVRFTSATLSAKGLWSKSSVKDLVDENILRRTEMKIVSTRALVGGLSAFWKFSKMTSCAHYRRGVG

SEQ ID NO: 19231 - protein, 956 aa, Apotomis turbidana
MSCASTQFYECPICEDQKVYKGKKGLNIHLGKIHVPRIDSLPSSSSLNCPSGVTGPSISTSSTDLSARLATLKASTRLAKRIPKGARVAVARSLSDCISKVTSSNSFAAWEALLTFTYKNCHIPRDKSNRTLCAIIKENYLHPGFPTDLEQPITELCNSNTYSKIRAIESKISDGNVRSATKLLFSSDTLAPRTADVFTALKDKHPTPTATNPLPLPPSNVLQPLQVTEAATLQAIRSFPNGSAGGLDGLTPQHLQDLTDPLMGDAGESLLKELTGLINLMLSGKICSEIAPILYGANLIALKKKDGGIRPIAVGSSLRRLASKICCREYHTRLTDKFQPKQLGFGVRGGCEAAVHATRTFINKSNFEVLLKLDVKNAFNSIDRGTLLDEIQNELPEIYNYLLQCYGTPSKLMFGDKEISSSVGCQQGDSLGPVIFSLAIHSIISQLTSDLNILYLDDGTLGGSASSAFNDLNYVIKRFSEIGLSLNFDKCELFISEKLPDECRGNILSLFNRVTPNITLLNRESLTLLGAPIFEDAIPPTLNSKLNHFRDSSDLLFKISPHVAIYILRLCLFSPKFMFILRCCPVWKFPLLTTTIDDLLKTTTSKILNVSQNLSSWSQAILPIKYGGLGIRSTGDLALPAFLSSIHSTVTLISGILNISNPTDVEVSDLVDAESAWSARNPGESTPSEKASQAAWDHITVKSIHKFLLDSCLTATERARLLAVSEPESGHWLHALPSRNIGSVLDPSTLRIAICFCLGIKICEPHPCCRCGGSADTLGRHGLFCQSSAGRFYRHGALNDLVRRALGTASVPATLEPVGLSAEDGKRPDGCTLVPWHLGRPLAWDVTCVDTLAPSHVQRSARKPGMAAEDAQIVKRRKYANKNYEFAALAVETFGPWSSDAKKIVKEISQKLIGVSGNIRAVSFFAQRLSLAIQRGNAASVLGTMPQTASILGDSF

SEQ ID NO: 19232 - protein, 958 aa, Apotomis turbidana
MSCASTQFYECPICEDQKVYKGKKGLNIHLGKIHVPRIDSLPSSSSLNCPSGVTGPSISTSSTDLSARLATLKASTRLAKRIPKGARVAVARSLSDCISKVTSSNSFAAWEALLTFTYKYCHIPRDKSNRTLCAIIKENVLHPGFPTDLEQPITERCNSNTYSKIRAIESKISDGNVRSATKLLFSSDTLAPRTADVFTALKDKHPTPTATNPLPLPPSNVLQPLQVTEAATLQAIRSFPNGSAGGLDGLTPQHLQDLTDPLMSDAGESLLKELTGLINLMLSGKICSEIAPILYGANLIALKKKDGGICPIAVGSSLSRLASKICCREYHTRLTDKFQPKQLGFGVRGGCEAAVHATRTFINKSSFEVLLKLDVKNAFNSIDRGTLLDEIQNELPEIYNYLLQCYGTPSKLMFGDKEISSSVGCQQGDPLGPVIFSLAIHSIISQLTSDLNIWYLDDGTLGGSASSAFNDLNYVIKRFYEIGLSLNFDKCELFISEKLPDECRGKILSLFNRVTPNITLLNRESLTLLGAPIFEDAIPPTINSKLNHLRDSSDLLFKISPHVAIYILRLCLFSPKFMFILRCCPVWKFPFLTTTIDDLLKTTTSKILNVSQNLSSWSQAILPIKYGGLGIRSTGDLALPAFLSSIHSTVTLISGILNISNPTDVEVSDLVDAESAWSARNPGESAPSEKASQAAWDHITVKSIHKFLLDSCLTATERARLLAVSEPESGHWLHALPSRNIGSVLDPSTLRIEICLRLGIKICEPHHCCRCGGSADTLGRHGLFCQSSAGRFYRHGALNDLVRRALGTASVPATLEPVGLSAEDGKRQDGCTLVPWHLGRPLAWDVTCVDTLAPSHVQRSARKPGMAAEDAQIVKRRKYAFLNKNYEFAALAVETFGPWSSDAKKIVKEISQKLIGVSGNMRAGSFFAQRLSLAIQRGNAASVLGTMPQTASVLGESF

SEQ ID NO: 19233 - protein, 930 aa, Notocelia uddmanniana
MHQIKTHIPRIDLPPIVPAHINRGGAHIPCTITQLTDLSARLAALKSSTKIAKRIPKGARVAVARSLTECVAKVVSDNNLSAWEALLMFIYKNCHIPRDKSNRTLSAIIKDNVLHPDFPADLWMPSFRDYCNTNLNYKIRAIGSEISDGNIRSATKLLFSSDTLAPRSEEVLAALKDKHPSPSTPLQLPASPATATQPLQVTEIATSLAIRSFPNRSAGGLDGITPQHLKDLTNPLLGDAGESLLKELTALINLMLSGKICSEIAPILYGANLIALKKKDGGIRPIAVGSSLRRLASKLCCHEFHTRLTDKFKPKQLGFGVRGGCEAPVHATRTFLENSNFEVLLKLDVRNAFNSIDRSTLLLEIQNELPEISEYLTQCYGTHSKLMFGEHEIASSVGCQRGDPLGPIFFSLAIHPIITQLTSDLNLWYLDDGTLGGTALSVLNDLNTIKRRFSEIGLTLNFNKCEVYISEKLPACTRSDILQNFNQVTPNFTLLSRSSLILLGAPIYEDAIAPTINSKLVNFHNCLDLLFKIDAHIAIYILRLCLFSPKFLYILRCSPIWKFPHLTSSISIDTVLKESIEIFLNISLNCQSWSQVTLPIKYGGLGIRSTGDLALPAFHSSVHSTVALIGGIFHVTNPTDVVVSGLADAESTWRAGFPSVALPSEKTSQAAWDLVKVKTTYDSLSANCPNSTERARLLAISEPESGHWLHALPSRNIGSLLDPVSLRVAICLRLGLKICEPHPCCRCGNPVDDLGRHGLYCQSSAGRYYRHTTLNDLIRRALGTANIPSTLEPAGLSAADGKRPDGCTLVPWFLGRPLAWDVTCVDTLAPSHVRHSAQKPGSAADDAQLVKCRKYAFLKTNYIFAALAVETLEPWSSDTKGIVKDLSKKLVSVQAGSYFAQRLSMAIEQGNAAGVLGTMPRATLSFIQCI

SEQ ID NO: 19234 - protein, 959 aa, Pammene fasciana
MFSTLAQLVECPICGDQKLYKGDRGLKIHLIKKHVPRIDPSLTVSSLTNRLGAPIPSTAASSTDLSARLAALKANTKIAKRIPKGARVAVARSLTECLAKVVSNNDFSAWEALLTFIYRNCHIPRDKTNRLLSTIIKENVLHPDFPPDSAEPPIIDHCNTNLNYKIKAIENKISDGNIKSATKILFSSDTLASRSDEVFAALQDKHPSASTPLQLPIPLATATQPLQVTEAATLQAISSFPNGSAGGLDGLTPQHLKDLTSPLMGDAGESLLKELTALINLMLSGKICNEIVPILYGANLIALKKKDGGVRPIAVGSSLRRLASKLCCREFHTRLTDKFKPKQLGFGVRGGCEAAVHATRSFMTNSNFEVLVKLDVRNAFNSIDRSTLLQEIQKEIPETFDYITQCYGTPTKLMFGEKEITSSVGCQQGDPLGPAMFSLAIHPIISQLTSELNIWYFDDGTLGGMASSVLSDLNTITQRFSEIGLVLNFNKCEVFISEKLSASARADIIQHFDRVTPNFTLQTRESLILLGAPIYEDGISPAINSKLNNFHDVSSLLFKISAHIALYILRLCLFSPKFLYILRCCPIWKFPNLTSTIDNTLKDSVCKILNISLNPQSWSQANLPIKYGGLGIRSTGDLALPAFLSSVHSTVTLISDILNVTNPTDVVVAGLAEAESAWGARFPGESPPSEKTSQAAWDSVNIKSTHKTLLNSSYSPIERARLLAVSEPESGHWLHALPSRNIGSLLDPASLRVAICLRLGLKVCEPHPCCRCGNPVDDLGRHGLYCQSSAGRYYRHTTLNDLIRRALGTANIPSTLEPVGLSAADGKRPDGCTLVPWFLGRPLAWDVTCVDTLAPSHVRRSAQRPGTAADDAQLLKCRKYAFLKNNYIFAALAVETFGPWSSDTKNIVKDLSKKLIGVSGDLRAGSYFAQRLSLAIQLGNAASVLGTMPRTSLSFIDSM

SEQ ID NO: 19235 - protein, 957 aa, Cydia splendana
MYSASTQLTECPICQDQKPYKGAHGLKIHLSKKHVPRIDLPPTDSSHVDSSGATVPNTAAPSADLCSRLAVLKAQTKIAKRIPKGARVAVARSLSECVAKVVSNNNVPAWEALLTFTYKNIHIPKDQSNRTLSAIIKENILHPDFPVDPAQSSILNICNTHINYKIKTIENKVSDGNIRGATKLLFSSDTLAARSDEVFSSLKEKHPISTTPVQLPVQPQISPQPLQVTERATLHAISSFPNGSAGGLDGITPQHLKDLTSPLMGDAGETLLKELTALLNLMLSGKICSDITPILYGANLIALKKKDGGIRPIAVGSTLRRLASKLCCREFHDRLTDKFKPKQLGFGVRGGCEAAVHATRTFLENSNFEIMVKVDVRNAFNSIDRSTLLDEIQKEIPEIFEYLKQCYGNPSKLMFGEKEIASCVGCQQGDPLGPVIFSLAIHPIITQLKSKLNVWYLDDGTLAGTASSVLNDLNIISRQFAEIGLTLNFNKCEVFISDKLSASARAALTLSLNSVAPNFTFVTRDSLVLLGAPIFEDAIPLAINSKLDNFHNCSDLLYKINAHMAIYILRLCLFSPKFLYVLRCSPVWKFSNLTSSIDNILKNSVCKILNVSFSPQSWSQATLPINYGGLGIRSTGDLALPAFLSSVHSVAHLIRGILNVTNPTGVVVASLADAESTWSAGNPGESPPTEKASQAAWDLIKIKTTHKSLLDNNSNPRDRARLLAVSEPESGHWLRALPSRNIGSLLDPASLRVAVCLRLGLKACEPHACSRCGNHVDAYGHHGLHCQSSAGRFYRHTALNDIIRRALGTASIPATLEPVGLSAADGKRPDGCSLVPWFLGRPLAWDVTCVDTLAPSHVLGSARRPGTAADDAQITKCRKYAFLKPNYVFAALAIETLGPWSSDTKKLVKEISTKLVWVSGDLRAAPFLAQKLSLTVQRGNAAGVLGTMPQANLGLDL

SEQ ID NO: 19236 - protein, 957 aa, Cydia splendana
MYSASTQLTECPICQDQKPYKGAHGLKIHLSKKHVPRIDLPPTDSSHVDSSGATVPNTAVPSVDLCSRLAVLKAQTKIAKRIPKGARVAVARSLSECVAKVVSNNNVPAWEALLTFTYKNIHIPKDQSNRTLSAIIKENILHPDFPVDPAEPSILNICNTHINYKIKTIENKVSDGNIRGATKLLFSSDTLAARSDEVFSSLKEKHPISTTPVQLPVQPQISPQPLQVTERATLHAISSFPNGSAGGLDGITPQHLKDLTSPLMGDAGETLLKELTALLNLMLSGKICSDITPILYGANLIALKKKDGGIRPIAVGSTLRRLASKLCCREFHDRLTDKFKPKQLGFGVRGGCEAAVHATRTFLENSNFEIMVKVDVRNAFNSIDRSTLLDEIQKEIPEIFEYLKQCYGNPSKLMFGEKEIASCVGCQQGDPLGPVIFSLAIHPIITQLKSKLNVWYLDDGTLAGTASSVLNDLNIISRQFAEIGLTLNFNKCEVFISDKLSASARADLTLSLNSVAPNFTFVTRDSLVLLGAPIFEDAIPLAINSKLDNFHNCSDLLYKINAHMAIYILRLCLFSPKFLYVLRCSPVWKFSNLTSSIDNILKNSVCKILNVSFSPQSWCQATLPINYGGLGIRSTGDLALPAFLSSVHSVAHLIRGILNVTNPTGVVVASLADAESTWSAGNPGESPPTEKASQAAWDLIKIKTTHKSLLDNNSNPRDRARLLAVSEPESGHWLRALPSRNIGSLLDPASLRVAVCLRLGLKACEPHACSRCGNHVDAYGHHGLHCQSSAGRFYRHTALNDIIRRALGTASIPATLEPVGLSAADGKRPDGCSLVPWFLGRPLAWDVTCVDTLAPSHVLGSARRPGTAADDAQITKCRKYAFLKPNYVFAALAIETLGPWSSDTKKLVKEISTKLVWVSGDLRAAPFFAQKLSLTVQRGNAASVLGTMPQANLGLDL

SEQ ID NO: 19237 - protein, 957 aa, Cydia splendana
MYSASTQLTECPICQDQKPYKGAHGLKIHLSKKHVPRIDLPPTDSSHVDSSGATVPNTAAPSADLCSRLAVLKAQTKIAKRIPKGARVAVARSLSECVAKVVSNNNVPAWEALLTFTYKNIHIPKDQSNRTLSAIIKENILHPDFPVDPAQSSILNICNTHINYKIKTIENKVSDGNIRGATKLLFSSDTLAARSDEVFSSLKEKHPISTTPVQLPVQPQISPQPLQVTERATLHAISSFPNGSAGGLDGITPQHLKDLTSPLMGDAGETLLKELTALLNLMLSGKICSDITPILYGANLIALKKKDGGIRPIAVGSTLRRLASKLCCREFHDRLTDKFKPKQLGFGVRGGCEAAVHATRTFLENSNFEIMVKVDVRNAFNSIDRSTLLDEIQKEIPEIFEYLKQCYGNPSKLMFGEKEIASCVGCQQGDPLGPVIFSLAIHPIITQLKSKLNVWYLDDGTLAGTASSVLNDLNIISRQFAEIGLTLNFNKCEVFISDKLSASARAALTLSLNSVAPNFTFVTRDSLVLLGAPIFEDAIPLAINSKLDNFHNCSDLLYKINAHMAIYILRLCLFSPKFLYVLRCSPVWKFSNLTSSIDNILKNSVCKILNVSFSPQSWSQATLPINYGGLGIRSTGDLALPAFLSSVHSVAHLIRGILNVTNPTGVVVASLADAESTWSAGNPGESPPTEKASQAAWDLIKIKTTHKSLLDNNSNPRDRARLLAVSEPESGHWLRALPSRNIGSLLDPASLRVAVCLRLGLKACEPHACSRCGNHVDAYGHHGLHCQSSAGRFYRHMALNDIIRRALGTASIPATLEPVGLSAADGKRPDGCSLVPWFLGRPLAWDVTCVDTLAPSHVLGSARRPGTAADDAQITKCRKYAFLKPNYVFAALAIETLGPWSSDTKKLVKEISTKLVWVSGDLRAAPFLAQKLSLTVQRGNAAGVLGTMPQANLGLDL

SEQ ID NO: 19238 - protein, 957 aa, Cydia splendana
MYSASTQLTECPICQDQKPYKGAHGLKIHLSKKHVPRIDLPPTDSSHVDSSGATVPNTAAPSADLCSRLAVLKAQTKIAKRIPKGARVAVARSLSECVAKVVSNNNVPAWEALLTFTYKNIHIPKDQSNRTLSAIIKENILHPDFPVDPAQSSILNICNTHINYKIKTIENKVSDGNIRGATKLLFSSDTLAARSDEVFSSLKEKHPISTTPVQLPVQPQISPQPLQVTERATLHAISSFPNGSAGGLDGITPQHLKDLTSPLMGDAGETLLKELTALLNLMLSGKICSDITPILYGANLIALKKKDGGIRPIAVGSTLRRLASKLCCREFHDRLTDKFKPKQLGFGVRGGCEAAVHATRTFLENSNFEIMVKVDVRNAFNSIDRSTLLDEIQKEIPEIFEYLKQCYGNPSKLMFGEKEIASCVGCQQGDPLGPVIFSLAIHPIITQLKSKLNVWYLDDGTLAGTASSVLNDLNIISRQFAEIGLTLNFNKCEVFISDKLSASARAALTLSLNSVAPNFTFVTRDSLVLLGAPIFEDAIPLAINSKLDNFHNCSDLLYKINAHMAIYILRLCLFSPKFLYVLRCSPVWKFSNLTSSIDNILKNSVCKILNVSFSPQSWSQATLPINYGGLGIRSTGDLALPAFLSSVHSVAHLIRGILNVTNPTGVVVASLADAESTWSAGNPGESPPTEKASQAAWDLIKIKTTHKSLLDNNSNPRDRARLLAVSEPESGHWLRALPSRNIGSLLDPASLRVAVCLRLGLKACEPHACSRCGNHVDAYGHHGLHCQSSAGRFYRHTALNDIIRRALGTASIPATLEPVGLSAADGKRPDGCSLVPWFLGRPLAWDVTCVDTLAPSHVLGSARRPGTAADDAQITKCRKYAFLKPNYVFAALAIETLGPWSSDTKKLVKEISTKLVWVSGDLRAAPFLAQKLSLTVQRGNAASVLGTMPQANLGLDL

SEQ ID NO: 19239 - protein, 957 aa, Cydia splendana
MYSASTQLTECPICQDQKPYKGAHGLKIHLSKKHVPRIDLPPTDSSHVDSSGATVPNTAAPSADLCSRLAVLKAQTKIAKRIPKGARVAVARSLSECVAKVVSNNNVPAWEALLTFTYKNIHIPKDQSNRTLSAIIKENILHPDFPVDPAQSSILNICNTHINYKIKTIENKVSDGNIRGATKLLFSSDTLAARSDEVFSSLKEKHPISTTPVQLPVQPQISPQPLQVTERATLHAISSFPNGSAGGLDGITPQHLKDLTSPLMGDAGETLLKELTALLNLMLSGKICSDITPILYGANLIALKKKDGGIRPIAVGSTLRRLASKLCCREFHDRLTDKFKPKQLGFGVRGGCEAAVHATRTFLENSNFEIMVKVDVRNAFNSIDRSTLLDEIQKEIPEIFEYLKQCYGNPSKLMFGEKEIASCVGCQQGDPLGPVIFSLAIHPIITQLKSKLNVWYLDDGTLAGTASSVLNDLNIISRQFAEIGLTLNFNKCEVFISDKLSASARAALTLSLNSVAPNFTFVTRDSLVLLGAPIFEDAIPLAINSKLGNFHNCSDLLYKINAHMAIYILRLCLFSPKFLYVLRCSPVWKFSNLTSSIDNILKNSVCKILNVSFSPQSWSQATLPINYGGLGIRSTGDLALPAFLSSVHSVAHLIRGILNVTNPTGVVVASLADAESTWSAGNPGESPPTEKASQAAWDLIKIKTTHKSLLDNNSNPRDRARLLAVSEPESGHWLRALPSRNIGSLLDPASLRVAVCLRLGLKACEPHACSRCGNHVDAYGHHGLHCQSSAGRFYRHTALNDIIRRALGTASIPATLEPVGLSAADGKRPDGCSLVPWFLGRPLAWDVTCVDTLAPSHVLGSARRPGTAADDAQITKCRKYAFLKPNYVFAALAIETLGPWSSDTKKLVKEISTKLVWVSGDLRAAPFLAQKLSLTVQRGNAAGVLGTMPQANLGLDL

SEQ ID NO: 19240 - protein, 909 aa, Oikopleura vanhoeffeni
MPVKDKNSLVGLTPPALEINRNGGSFLPLRNANNARGSAHELGVTQQLSMSSSDRQNHSTGELNVRVPIEGPSEFFGNREYHDLVRIIRREHGSSHKKKVKPGSLNELFQVNPTRAASRIFGQSKGNAQPDPRKTFLFYKQLWSESDRPTTHTPLEGQSHTDEPAPISEKELKTAIRKTKANTATGPDGLTRGMIQGFMAKNPAVILSIFNRILKTGRFPTALKRGKVTLLPKTSGASRDPSHYRPLTIFSILYRLFWKITHSRLKREVKGKLSPSQFGLIEGSSGTHAAVSLVKTTIAYARIRERSIHLASLDVSKAFDSVKHVAIQRALEEFEISPPLSRLICNSLKSSERVLTLGKTKAYLKQTKGVPQGLATSGLLFALVTNTTVKNFDVGTSGLDITPIRSKPKIGTVAGLAYWDDLLMIDSCKVELGRRVRRVTADLLKVGLEVNTAKCHYLGQSVARDKTKRRSVETTPLEAGSLNITCCSEFKYLGAKISLAREKNTSHIERLKVLCAKTHTARLSTRSKIQLLKSHVFSKLIYSVTLHATKSVWSKGPSYHPNNSRLYEQMDLAMRTAVKRALGIGIGESGSMRLMYLKVRDGGLGFPRFTASIPAARMNAHAHLPPTIKSLVETFNKADLREMRDQQSRPKDPIREWKSLADGSHNWHHPALKIYPTLSRFASGDRLRKTFRLRSGFLPLGGYSRSDPCRFCRNAKESSVHIQTGACSLETKNLQITRHDRVVSAVFGYLSKMKGDGNITIYKEFECGDSRPDIVVINKESLEVGVIEVAVAYETKRVNGATIEKISDVWQLKNNKYGAGTSKGAAIRRRATIELKGREPAKILIFPIVVGAHGSYDGRRKRVCQNSLNIETAKLERLAAAAALNSNATLIGALLMTDNSQPRELQVEI

SEQ ID NO: 19241 - protein, 1068 aa, Dendronephthya gigantea
MIRSSLVVLLILCAVCSFCGKEFVTLGRHSWRCKQKLNQNSGNTVNQMPVIHSPVRISNTKDVKCYCGKSCKGNRGLKMHQRSCRVIHGLKYELLTDLEQQSRENSNVSFNSSTVEEINEIAGNGSKQNLPVLKKGIKLPKSDAEWATANDYFKLSLDLNAPIRAQDLSFSITQLNNVVYNYFADNFGHVEKIPDKALVDKYKDKTVKELKKSLKQLKILNAEPHEIKYVSRLLREKLRNSSQNILNDQTTQNQNKEFNHDNYIAKNLWGYIKNIFNQKTSLLPTFPVTDCLSYFKKNLSAINANKLFCIPSWIPKLSDPVINFDLEPPTYSQVTNIIRRMKACGSPCPLDQLSIICFKRCPFLRTYLTEVIRCVWSVKSVPTEWKKACSILIHKKGSTSDPANFRPITLQSIPLKVFTSYLRNAMFAYLTANNFIEQKIQKGFTPNLSGTLEHTAQMTNIINQARIKQRSVVITLLDLKNAFGEVHHNLIQSVLNYHHIPNHISEIIKSLYTDFNITIITAEYSTPFITVGRGVLQGDCLSPLLFNLCFNTFIQHIKTDKYRQFGFMTKFLNPVHWFQFADDAVVISGQESENQHLLNRFSIWCQWSNMIPRVDKCSTFGIKKVLTKSIQYLPRLLIDNKLIPATQIGDSFRYLGKYFDFNMSDKDHKKELITLLEDIMKEIDLKPLHPKNKILLYSRYLLSKLSWHFTVSTLSKTWVVENMDSVANKFIRKWLEIPVSGTLSNVFLTRNKFGLNICPPSVKFTQCQTVARRALKTSPNDCIKYLWKSTSDNVNIQYDVYNSTKEVLKRFNSEQQEKLQNHLPLQGAFFSNVIKFSLSTLNNLWSKAQSGMPKNIYNFSIRYINNTLPTRKNLTKWGILSNSDCSYCLSPETLMHVVAGCQSYLPRFTWRHDSVLNFIAKTFQPIQNSNLFVDLPGYKSPSIITGETYRPDLLLSISNDCLYILELSVGYESNLKNNVDRKKERYKDLISQQRDHFKTVRFINLSVSALGVFSKECSTFMKMLNEVGLDKKEQNFCVKKITSIAIRTTYYIFCCRNKVWSDPDLMNI

SEQ ID NO: 19242 - protein, 1070 aa, Dendronephthya gigantea
MIRSSFIYMLLIFVVCSFCGEDFVTLGRHSWRCKQRVHRAEQQYFSDYPTKQAPAINSPNIVISSRTVLKCCCGKICKGARGLKMHQRSCRVIDGLNSELSADLEEQELQDRLDSENICELTTNNETFIVDEEEFPVLKKGIKLPKSDSEWSTANEYFKFALQFNEPITSQDLDSNIKVLNNTIYEYFAQNFGYIKSKPCESLVNKYRGYTVKDLKKALKILKSTNEEPDEIRYVSHILRDKIRHNNQSTESCLDSRQSLNHDKYIKKNFWGYVKNILNKKDVLLPSFSMTECLSYFSKTLSAIHPNKLFNIPSWIPVLSQPEVQFDLDPPTYQQVTNIIRKMKASGSPSPLDQLSIICFKRCPFLRSHLTELIHNVWSSKTIPSEWKKACTILIHKKGDNNNPSNFRPITLQSIPLKVFTSCLRNAIYSFLTANNFIEHNIQKGFTPNLSGNLEHTAQMANIINTARIKQRSVIVTLLDLKNAFGEVHHNLITSILDYHHIPQHIKLIITSLYTNFKTSVITQEYQTPFISVGRGVLQGDCLSPLLFNMCFNTFIQHINAEKYRQFGFSFQLLNPIHWFQFADDAAVITSNESENQHLLNRFSIWCLWSDMVIRVDKCSTFGIKKSMTKSIQYLPKLFINNKLIPATKVGASFQYLGRYFNFNMSDEQHKSELISLVEDLMSVIDSKPLHPRNKLLLYSRYVLSKLSWHFTVTDLSKTWVIENIDSKINNYIRTWLELPISGTLSTVFLTRNKFGLSISPPSIKFTQCQTVRRNALKTSPNTVISKLWKSTSNSKNIQYDVYTSTKQIIKEFRSRQEDKLRKQLTCQGSFFRNVSKFCHSELTRMWCASQTNLPRNIFNFTIRYINNSLPTRQNLARWGLSATSDCSNCLSPETLLHVVAGCKSYLERFTWRHDSILNLLAANLQTINGATLFADLPNYKSPSIITGNSHRPDLLLLTSKECLYIVELTVGFESNLENNVKRKKCKYLELIREQRKHYQAVKFINLSISSLGVFSKECSTFLEMLKDIGFERNHHEYLIKRMTTIAIRTTYYIFCCRNKDWSNPELLTF

SEQ ID NO: 19243 - protein, 781 aa, Dendronephthya gigantea
MTECLSYFSKTLSAIHPNKLFNIPSWIPVLSQPEVQFDLDPPTYQQVTNIIRKMKASGSPSPLDQLSIICFKRCPFLRSHLTELIHNVWSSKTIPSEWKKACTILIHKKGDNNNPSNFRPITLQSIPLKVFTSCLRNAIYSFLTANNFIEHNIQKGFTPNLSGNLEHTAQMANIINTARIKQRSVIVTLLDLKNAFGEVHHNLITSILDYHHIPQHIKLIITSLYTNFKTSVITQEYQTPFISVGRGVLQGDCLSPLLFNMCFNTFIQHINAEKYRQFGFSFQLLNPIHWFQFADDAAVITSNESENQHLLNRFSIWCLWSDMVIRVDKCSTFGIKKSMTKSIQYLPKLFINNKLIPATKVGASFQYLGRYFNFNMSDEQHKSELISLVEDLMSVIDSKPLHPRNKLLLYSRYVLSKLSWHFTVTDLSKTWVIENIDSKINNYIRTWLELPISGTLSTVFLTRNKFGLSISPPSIKFTQCQTVRRNALKTSPNTVISKLWKSTSNSKNIQYDVYTSTKQIIKEFRSRQEDKLRKQLTCQGSFFRNVSKFCHSELTRMWCASQTNLPRNIFNFTIRYINNSLPTRQNLARWGLSATSDCSNCLSPETLLHVVAGCKSYLERFTWRHDSILNLLAANLQTINGATLFADLPNYKSPSIITGNSHRPDLLLLTSKECLYIVELTVGFESNLENNVKRKKCKYLELIREQRKHYQAVKFINLSISSLGVFSKECSTFLEMLKDIGFERNHHEYLIKRMTTIAIRTTYYIFCCRNKDWSNPELLTF

SEQ ID NO: 19244 - protein, 783 aa, Trachythela sp.
MAECVDYFSKTLAAIHPNKLFHIPSWIPKLSDPQVRFDLDPPSYQQITAVIRKMKASGSPCPLDQISIICFKRCPYLRTYLTELIRAVWLSGSIPSEWKRACTILIYKKGNRNIPSNFRPITLESIPLKVFTSCLRNVMYSFLTATGNNFIEHNIQKGFTPNLSGTLEHTAQMAYIINKARLKQRSLVVTLLDLKNAFGEVHHNLIQSVLGYHHIPNHINNIIKSLYTDFKTSIITSEFRTPFMPVGRGVLQSDCLSSLLFNMCFNTYIQHIKDEKYRQFGFSLQFLNPIHWFQFADDAAVITGQESENQHLLNRFSIWCQWSNMFIRVEKCSTFGIKKVLTKSVQYLPKLLINKHVIPTTKIGESFEYLGRFFDFDMSNQEHKSKLLSLIQELMSDIDLKPLHPKNKLLLYRRYVLSKLSWHFTVAAISKTWVIENVDSLVNNYIRKWLEVPISGTLTNVYLTRNKFGLNILPASVKFIQCQTVLRNTLKTSPNDSIKQLWKSTNTHTNIQYDSYNSIKEVLKKFHSVQEDKLRDHLTCQGSFFTNVSKFSLSQLNAIWSLSQSKLPKNIFNFTIRYINNTLPTRKNLNRWGISSSPDCSFCLQPETLLHVVAGCQQYLERFTWRHDSVLNFIAKTFQTINACKLFVDLPGFDSPSIITGDEYRPDLLLSTSDKHLYIVELTVGFESNLSNNVKRKKAKYKDLIREQNRNFSTVKFVNLSISSLGVFDKECHTFIEMLNDLGLDKQHQQYCIRRMISIAIRTSYYIFCCRNKEWTNPELMNI

SEQ ID NO: 19245 - protein, 753 aa, Alatina alata
MWRRKEVAERWCIAEGIYLPKEENSRSLNQCRPISLLNIDGKIMFGIMANRIIKFVQENGYVNESVQKAGIPGIPGCIEHAYGIWDSIQKVKKEKTDLVLVWLDLANAYESVPHKIIQMAMDFFWIPKSVQNFIMKYYGKFRMRFTTESFTTDWQQLEVGIAAGCTISVILFVLVMEMLLRSTKCEGTLVKTPLRAFMDDITVKSKGAVGMEEVLTQLDSLIIWSRMNFKAKKSRSLTYVKGKQKEVRFTIGGESIPTVKEQPVKSLGRWYKGNLSDRHQGKVLLQEAESGLKAIDKTELPGKFKCWCLQFGLYPRLLWPLQIYEIPLTCVERIEQRCAVHIRKWLGLPKMLNTTALFGKTGQLQLPIASIVEEYKAAKVRTVMMLRYSNDTEIKEDPPEVRTGRKWKAEEATDEAIKILEHADIVGAVQDSNEGLGKQNFKPFCMSNAREKRDAIVKEIRKEVQQSRYLHLVECSQQGQCVRWEECVVERKIGWKEIWAWERARTSFLIRATYDTMPTPVNLVRWMIDDNEKCRCGKRGTLRHILSNCNMALERYTWRHNQVLAVIKSLLQGKIKKFNEGDLPKVVKIRKMAFHKEGATSLVKSHAKTMMSDERWSGQWRIVADLEQVLVVPVVQTQQRPDIIMWSDEKKECIVMELTVPWEENFCSAEERKATRYEELIKECEGNGWKVEYYHLAIGVRGFVEKKFVNLFRHRFCCTNTEIRKFVKDLQETAERASYWIWLKREDHFWLDN

SEQ ID NO: 19246 - protein, 861 aa, Alatina alata
MTDPYNFAKKLFDEKKGGKLDCTKEDLQEHLKKTYTDPRRNTELPLINGLKKPTTPGKKFNLDDLKMKEADAFVKKARAKAAPGNDGVSYKVYKYCSKLRIRLFLLLKEMWKKKDVAERWAIAEGIYLPKEGDSKEIGQFRPVSLLNIDGKIMFGIIAKRIIDFATENGYIDESNQKAGVPGIPGCVEHAFSIWEEIQQAKETKSDLTVIWLDLANAYGSVPHVLIEQALEFFWVPEQVRSMVRKYYDMFRMRFTTGSFTTDWQRLEVGIAAGCTISVILFVLVMEMLLKACRCDGAKTITPLRSFMDDITTLVRGEKVTREVLERLDELIEWSRMKFKAKKSRSLTLRKGKQKEVRFFIGGEPIPTVKEKPVKSLGRLYQKSLSDRRQGTELQKTAEKGMKAIDNTSLPGKFKCWCLQFVLYPRLLWPMMMYDITVSRIERIEKRSNCYIRKWLGLPKMLTTSALYGKSLPLKLPLASITEEYKAGKVRTIMTLRYSKDVKIRDNPPEVRTGKKWNAEEDVNRLIERLEHKDIVGAVQTNREGLGSRAFKPFRASNQVEKRKAVVNEMRTNEDEKRRVELVQCSVQGQCLRWESIVIERKISWKDIWEWETARTAFLIKATYDVLPSPANLKRWKQSQNEMCKCGKIGTMKHILSHCPLGLDRRTWRHNQVLKVLEKGFREKVKGVNEGRGPKIEKLERINFVKQGKKPSARNEKKMKPDSRWDGSWKIAVDLETPLVFPVVATAQRPDIVIWSDDQKKVVIMELTVSWEDNIKAAEERKNERYKELIERCEEDGWEVEYHHIGIGARGFIEKGFIHLLKNRFGFNQTEENKLVSEIQKTAEKASMWLWLKRNDTSWNEN

SEQ ID NO: 19247 - protein, 1046 aa, Colletes gigas
MVTGGERTQRACVGLRHGPARSTDAIAERTGRGRGPPRGERTPMAVPRRRGGAEDASERARIVAVAEAVVTAEGLEALAVLVADFFGERSSARGRGGAARATGRGGGRPDAADGLGGRPRRDASCNGATEAPLTRTEHVREATRIQRLFRANRKRAVQEVLAGQSPHCQVPKDIVQGHFSSIYAVRDRSEHFPALHHDQPDEGTSEALERPFGAAEVSTRLRRMKNSSPGPDGITYADLRGADPGAEVLTAAYNACRRVESIPSLWKESNTILLHKKGERDDLSNWRPIAMGDVIPKLFAAVMADRLTRWAVQNRRLSPAQKGFLPYEGCLEHNFVLQGALADAKRRRREMVVAWLDLSNAFGSVPHATILGALAGAGAPRATVNLVRCLYTDCTTRVRTAEGFTDRIPMRSGVRQGCPLSPILFNLAIEPVVRQATESGAGYEMAGFRVAALAYADDIALIATSPESMRGLLGAAEATARGLGLAFNPGKCATLHVLGSGAVARTEFGLNEGLVPALGDGDAYEHLGVPTGVRIDQTPYSAIRDVLRDLGAVDRSLLAPWQKVETLRSVIIPRLDFLLRGASLRKSALAEVDKAVRRAVKGWLNLPQRASAEVVYIPPSRGGCGILPLADLADVTTVAHAFRLLNAGDPVVASVAGASLDTAARDKLRRPPTEGDLAEYLSGRLTGDFALPTTGCSSFWSRVRSAALRSAARFGFQWRWDDGRAELSVEIASRGEPVVVSPGAKAEIIRRMRAAVTGHYMETLVRKPDQGKVFGVTSRHAVSNHFMRGGSFTRFADWRFIHRARLDVLPLNGAIRWGGGDKRCRRCGYKLESLPHVLGHCGVHSAARQLRHHGLVRRLATATRLPGDIRVDRRVPGAPDELAALRPDIVVTHEPSRTVHLVDVAVPFENTSVAFEEAKAEKLRKYAPLACALRRRGYTVHVDAFIVGALGAWCPENEALLKTLRVSWFYARIMRRLMVSETIAWSRDMYVEHVSGIRQYPAPTSAPDANDNAAAQRGLNNINDDRGGQGAVHIGTIGLPRAREDE

SEQ ID NO: 19248 - protein, 1379 aa, Colletes gigas
MTTATTTTSVVRGSIPAPVVTPPPTRGPTPSPRGTAGGNSTSPPALAPRTRARARRAATEPPRTTPGTPGRRKRTSGTPLAVVPVATGRRTPPTTSPAAVGCPTPRRGRSARATSLPPGGQTEGGNTTTPISPDVGTIRRRRGRKLPAIEESSSGEEKEAAAVPSSSSDEDWRVAASRRGRKRAGLRTPVPGEHRKGTGRRGRPPGSARAVGPPVEAERGQNMDRGPHSNNNNNNNNNNNNRTKDNGCKRFCDRATSPINFCSRDNDNIVDASRGSPINTPGSNRGSVFRRSAAPRGATPAVISRDAAVDRRRTATRGCGSAANPRAAARRDPMVTGGERTQRACVGLRHGPARSTDAIAERTGRGRGPPRGERTPMAVPRRRGGAEDASERARIVAVAEAVVTAEGLEALAVLVADFFGERSSARGRGGAARATGRGGGRPDAADGLGGRPRRDASCNGATEAPLTRTEHVREATRIQRLFRANRKRAVQEVLAGQSPHCQVPKDIVQGHFSSIYAVRDRSEHFPALHHDQPDEGTSEALERPFGAAEVSTRLRRMKNSSPGPDGITYADLRGADPGAEVLTAAYNACRRVESIPSLWKESNTILLHKKGERDDLSNWRPIAMGDVIPKLFAAVMADRLTRWAVQNRRLSPAQKGFLPYEGCLEHNFVLQGALADAKRRRREMVVAWLDLSNAFGSVPHATILGALAGAGAPRATVNLVRCLYTDCTTRVRTAEGFTDRIPMRSGVRQGCPLSPILFNLAIEPVVRQATESGAGYEMAGFRVAALAYADDIALIATSPESMRGLLGAAEATARGLGLAFNPGKCATLHVLGSGAVARTEFGLNEGLVPALGDGDAYEHLGVPTGVRIDQTPYSAIRDVLRDLGAVDRSLLAPWQKVETLRSVIIPRLDFLLRGASLRKSALAEVDKAVRRAVKGWLNLPQRASAEVVYIPPSRGGCGILPLADLADVTTVAHAFRLLNAGDPVVASVARASLDTAARDKLRRPPTEGDLAEYLSGRLTGDFALPTTGCSSFWSRVRSAALRSAARFGFQWRWGGGRAELSVEIASRGEPVVVSPGAKAEIIRRMRAAVTGHYMETLVRKPDQGKVFGVTSRHAVSNHFMRGGSFTRFADWRFIHRARLDVLPLNGAIRWGGGDKRCRRCGYKLESLPHVLGHCGVHSAARQLRHHGLVRRLATATRLPGDIRVDRRVPGAPDELAALRPDIVVTHEPSRTVHLVDVAVPFENTSVAFEEAKAEKLRKYAPLACALRRRGYTVHVDAFIVGALGAWCPENEALLKTLRVSWFYARIMRRLMVSETIAWSRDMYVEHVSGIRQYPAPTSAPDANDNAAAQRGLHNINDDRGGQGAVHIGTIGLPRAREDE

SEQ ID NO: 19249 - protein, 1821 aa, Ectemnius lituratus
MQPALDGEILVQRYPFPSEFRCPICYTGTINISQKSNGVFQRHEDLRKHVKLHHKNVTGHVWECASCGLRDKSAYAVKRIKSHFEKIHPGVTVTAGARAAAAGDQSVGLSAVAEERNCSIYSNNNSNTTTNSYRTSFNASDNATVRTTATSAISNVTGRTTALGTPADPLTSGGTPTVRAPTIPARTTAAASTSMNNAAKKRTSAAVSTRSTAWTKAAPPSRNASGSTTKQASITGFVARGRQSKGNDSAVASPSGPAAAAATTTTSLTATGARRTSSGATSTFAPRTTISPAPHPPVVGVRTRSARAASEPPQAGPPNKGTSTTRTTLRVTPTTTTTSAPKPTKGVTGRSAPNSASAAAPARAARATSLPPAPQYTVKTRSAAKAAAAASGGASTTSAPPITCSVAATLTTTTTTTSVCGTPVSSVAATSAVATGTVARLSTISEPSPTVPRRRRSSTERRLSDQLLSTPVATRDRAAASATDIATSTPIETARAEKRTPEPTRISPRSTRGEVGDANSTIASPRVEASAGNTPGSSRRSYASVLATPSQRSLGVIEESSDEAEDPDYESGSSEGRLSPGDEGWTTATSKKRRRGAGRRRIVDSSSSSSASGRTRQSPQQQQQRQQRQQQQQRGERDSPAPRSAQGSPVRVTQSPINYCSSISIRISNSVTGRGGSPAEDVNNNNSASNEPGASRVIMYVCCVCRTAGTGQRTTTTHTVEAGRVSQDGEEARESAAEGAPPTLRRAVDPVQVSARRDDARPADGGRARSSSVRHPRQLAAPRPRVNGGRRAVGERSGPARSPRQPARTPRPGHGEREALVAELAAVAAAVESRGQLEELATRVASFFGRHAEGARGAASVAPSGGGGGRRPASGQGARRPARVEASSGGDTGPRGNIPRAEQIREATRIQHLFRSNRRRAVREVLQGASLHCEVPKDIVQRHFATLYAGRQPTGDLPRLNPDEATPESNGALVSDYSAAEVGRRLKGMKNSAPGPDGLTYGDLRKSDPGAVLLTSFFNACRRVGCVPDGWKRSNTVLIHKKGDRDDLSNWRPLALGDVIPKLFAAVLADRLTRWAVMNQRLCPAQKGFLPHEGCLEHNFVLQEVLADARRRNREVVASWLDLSNAFGSVPHDAIMGALEDAGVPRETRAIVASLYDGCVTRVRTAEGFTGDIPMRSGVRQGCPLSPILFNLALEPVVRGATDSGEGYELAGHRVAALAYADDVALVATSPEGMGRLLQAAEGTARRLGLSFNPRKCASLHIKGNGGVEQTEFTLGGERISALAVGEAYLHLGVPTGVSVDQTPYSAIQGMLADLQAVDSSLLAPWQKIETVATFILPRLDFLLRGATLRKSVLTEADKTIRRTVKAWLNLPQRASAELVYIPPSRGGCGLLPLADLADVTTVAHAFRMLNSSDAVVAAIAKSSLGAAVRGKVVRTPDHGDLAKYLSGSLEGDLARASSGRASFWSRVREAGRRSGDRLGFRWRWGEERQELSVEVDSIRESGKIIIPPAAKGQIIGRMRAVVGEHYLRSLVAKPDQGKVYDATSRHALSNHFMRTGGHTRFADWRFVHRARLDVVPLNGNRRWAAGDKRCRRCGYELESLPHVLSHCGKHAAARQLRHHAIVDRLAKASRLPGEIRIDRRVPGVGGELAALRPDIVVTHEPSKTIVLVDVAVPFENAADALVEARRDKLSKYEPLAESLRGRGYTVEVGAFIVGSLGAWDGDNEGLLQRLRVSHRYAAVMRRLIISETIAWSRDMYVEHVTGVRQYSVANAGSGVATEAACPSDDPYRGVESRAENQEPHDHPGTCPVPAITSAEPEHAY

SEQ ID NO: 19250 - protein, 1821 aa, Ectemnius lituratus
MQPALDGEILVQRYPFPSEFRCPICYTGTINISQKSNGVFQRHEDLRKHVKLHHKNVTGHVWECASCGLRDKSAYAVKRIKSHFEKIHPGVTVTAGARAAAAGDQSVGLSAVAEERNCSIYSNNNSNTTTNSYRTSFNASDNATVRTTATSAISNVTGRTTALGTPADPLTSGGTPTVRAPTIPARTTAAASTSMNNAAKKRTSAAVSTRSTAWTKAAPPSRNASGSTTKQASITGFVARGRQSKGNDSAVASPSGPAAAAATTTTSLTATGARRTSSGATSTFAPRTTISPAPHPPVVGVRTRSARAASEPPQAGPPNKGTSTTRTTLRVTPTTTTTSAPKPTKGVTGRSAPNSASAAAPARAARATSLPPAPQYTVKTRSAAKAAAAASGGASTTSAPPITCSVAATLTTTTTTTSVCGTPVSSVAATSAVATGTVARLSTISEPSPTVPRRRRSSTERRLSDQLLSTPVATRDRAAASATDIATSTPIETARAEKRTPEPTRISPRSTRGEVGDANSTIASPRVEASAGNTPGSSRRSYASVLATPSQRSLGVIEESSDEAEDPDYESGSSEGRLSPGDEGWTTATSKKRRRGAGRRRIVDSSSSSSASGRTRQSPQQQQQRQQRQQQQQRGERDSPAPRSAQGSPVRVTQSPINYCSSISIRISNSVTGRGGSPAEDVNNNNSASNEPGASRVIMYVCCVCRTAGTGQRTTTTHTVEAGRVSQDGEEARESAAEGAPPTLRRAVDPVQVSARRDDARPADGGRARSSSVRHPRQLAAPRPRVNGGRRAVGERSGPARSPRQPARTPRPGHGEREALVAELAAVAAAVESRGQLEELATRVASFFGRHAEGARGAASVAPSGGGGGRRPASGQGARRPARVEASSGGDTGPRGNIPRAEQIREATRIQHLFRSNRRRAVREVLQGASLHCEVPKDIVQRHFATLYAGRQPTGDLPRLNPDEATPESNGALVSDYSAAEVGRRLKGMKNSAPGPDGLTYGDLRKSDPGAVLLTSFFNACRRVGCVPDGWKRSNTVLIHKKGDWDDLSNWRPLALGDVIPKLFAAVLADRLTRWAVMNQRLCPAQKGFLPHEGCLEHNFVLQEVLADARRRNREVVASWLDLSNAFGSVPHDAIMGALEDAGVPRETRAIVASLYDGCVTRVRTAEGFTGDIPMRSGVRQGCPLSPILFNLALEPVVRGATDSGEGYELAGHRVAALAYADDVALVATSPEGMGRLLQAAEGTARRLGLSFNPRKCASLHIKGNGGVEQTEFTLGGERISALAVGEAYLHLGVPTGVSVDQTPYSAIQGMLADLQAVDSSLLAPWQKIETVATFILPRLDFLLRGATLRKSVLTEADKTIRRTVKAWLNLPQRASAELVYIPPSRGGCGLLPLADLADVTTVAHAFRMLNSSDAVVAAIAKSSLGAAVRGKVVRTPDHGDLAKYLSGSLEGDLARASSGRASFWSRVREAGRRSGDRLGFRWRWGEERQELSVEVDSIRESGKIIIPPAAKGQIIGRMRAVVGEHYLRSLVAKPDQGKVYDATSRHALSNHFMRTGGHTRFADWRFVHRARLDVVPLNGNRRWAAGDKRCRRCGYELESLPHVLSHCGKHAAARQLRHHAIVDRLAKASRLPGEIRIDRRVPGVGGELAALRPDIVVTHEPSKTIVLVDVAVPFENAADALVEARRDKLSKYEPLAESLRGRGYTVEVGAFIVGSLGAWDGDNEGLLQRLRVSHRYAAVMRRLIISETIAWSRDMYVEHVTGVRQYSVANAGSGVATEAACPSDDPYRGVESRAENQEPHDHPGTCPVPAITSAEPEHAY

SEQ ID NO: 19251 - protein, 833 aa, Ectemnius lituratus
MKNSAPGPDGLTYGDLRKSDPGAVLLTSFFNACRRVGCVPDGWKRSNTVLIHKKGDRDDLSNWRPLALGDVIPKLFAAVLADRLTRWAVMNQRLCPAQKGFLPHEGCLEHNFVLQEVLADARRRNREVVASWLDLSNAFGSVPHDAIMGALEDAGVPRETRAIVASLYDGCVTRVRTAEGFTGDIPMRSGVRQGCPLSPILFNLALEPVVRGATDSGEGYELAGHRVAALAYADDVALVATSPEGMGRLLQAAEGTARRLGLSFNPRKCASLHIKGNGGVEQTEFTLGGERISALAVGEAYLHLGVPTGVSVDQTPYSAIQGMLADLQAVDSSLLAPWQKIETVATFILPRLDFLLRGATLRKSVLTEADKTIRRTVKAWLNLPQRASAELVYIPPSRGGYGLLPLADLADVTTVAHAFRMLNSSDAVVAAIAKSSLGAAVRGKVVRTPDHGDLAKYLSGSLEGDLARASSGRASFWSRVREAGRRSGDRLGFRWRWGEERQELSVEVDSIRESGKIIIPPAAKGQIIGRMRAVVGEHYLRSLVAKPDQGKVYDATSRHALSNHFMRTGGHTRFADWRFVHRARLDVVPLNGNRRWAAGDKRCRRCGYELESLPHVLSHCGKHAAARQLRHHAIVDRLAKASRLPGEIRIDRRVPGVGDELAALRPDIVVTHEPSKTIVLVDVAVPFENAADALVEARRDKLSKYEPLAESLRGRGYTVEVGAFIVGSLGAWDGDNEGLLQRLRVSHRYAAVMRRLIISETIAWSRDMYVEHVTGVRQYSVANAGSGVATEAACPSDDPYRGVESRAENQEPYDHPGTCPVPAITSAEPEHAY

SEQ ID NO: 19252 - protein, 1821 aa, Ectemnius lituratus
MQPALDGEILVQRYPFPSEFRCPICYTGTINISQKSNGVFQRHEDLRKHVKLHHKNVTGHVWECASCGLRDKSAYAVKRIKSHFEKIHPGVTVTAGARAAAAGDQSVGLSAVAEERNCSIYSNNNSNTTTNSYRTSFNASDNATVRTTATSAISNVTGRTTALGTPADPLTSGGTPTVRAPTIPARTTAAASTSMNNAAKKRTSAAVSTRSTAWTKAAPPSRNASGSTTKQASITGFVARGRQSKGNDSAVASPSGPAAAAATTTTSLTATGARRTSSGATSTFAPRTTISPAPHPPVVGVRTRSARAASEPPQAGPPNKGTSTTRTTLRVTPTTTTTSAPKPTKGVTGRSAPNSASAAAPARAARATSLPPAPQYTVKTRSAAKAAAAASGGASTTSAPPITCSVAATLTTTTTTTSVCGTPVSSVAATSAVATGTVARLSTIFEPSPTVPRRRRSSTERRLSDQLLSTPVATRDRAAASATDIATSTPIETARAEKRTPEPTRISPRSTRGEVGDANSTIASPRVEASAGNTPGSSRRSYASVLATPSQRSLGVIEESSDEAEDPDYESGSSEGRLSPGDEGWTTATSKKRRRGAGRRRIVDSSSSSSASGRTRQSPQQQQQRQQRQQQQQRGERDSPAPRSAQGSPVRVTQSPINYCSSISIRISNSVTGRGGSPAEDVNNNNSASNEPGASRVIMYVCCVCRTAGTGQRTTTTHTVEAGRVSQDGEEARESAAEGAPPTLRRAVDPVQVSARRDDARPADGGRARSSSVRHPRQLAAPRPRVNGGRRAVGERSGPARSPRQPARTPRPGHGEREALVAELAAVAAAVESRGQLEELATRVASFFGRHAEGARGAASVAPSGGGGGRRPASGQGARRPARAEASSGGDTGPRGNIPRAEQIREATRIQHLFRSNRRRAVREVLQGASLHCEVPKDIVQRHFATLYAGRQPTGDLPRLNPDEATPESNGALVSDYSAAEVGRRLKGMKNSAPGPDGLTYGDLRKSDPGAVLLTSFFNACRRVGCVPDGWKRSNTVLIHKKGDRDDLSNWRPLALGDVIPKLFAAVLADRLTRWAVMNQRLCPAQKGFLPHEGCLEHNFVLQEVLADARRRNREVVASWLDLSNAFGSVPHDAIMGALEDAGVPRETRAIVASLYDGCVTRVRTAEGFTGDIPMRSGVRQGCPLSPILFNLALEPVVRGATDSGEGYELAGHRVAALAYADDVALVATSPEGMGRLLQAAEGTARRLGLSFNPRKCASLHIKGNGGVEQTEFTLGGERISALAVGEAYLHLGVPTGVSVDQTPYSAIQGMLADLQAVDSSLLAPWQKIETVATFILPRLDFLLRGATLRKSVLTEADKTIRRTVKAWLNLPQRASAELVYIPPSRGGCGLLPLADLADVTTVAHAFRMLNSSDAVVAAIAKSSLGAAVRGKVVRTPDHGDLAKYLSGSLEGDLARASSGRASFWSRVREAGRRSGDRLGFRWRWGEERQELSVEVDSIRESGKIIIPPAAKGQIIGRMRAVVGEHYLRSLVAKPDQGKVYDATSRHALSNHFMRTGGHTRFADWRFVHRARLDVVPLNGNRRWAAGDKRCRRCGYELESLPHVLSHCGKHAAARQLRHHAIVDRLAKASRLPGEIRIDRRVPGVGGELAALRPDIVVTHEPSKTIVLVDVAVPFENAADALVEARRDKLSKYEPLAESLRGRGYTVEVGAFIVGSLGAWDGDNEGLLQRLRVSHRYAAVMRRLIISETIAWSRDMYVEHVTGVRQYSVANAGSGVATEAACPSDDPYRGVESRAENQEPYDHPGTCPVPAITSAEPEHAY

SEQ ID NO: 19253 - protein, 1045 aa, Rhopilema esculentum
MIVKLKRAIKSAIRGGKIFFVGTKFDSNFDCEEIYDDIRLLNGDEWGAFQDRERKFRALFASKRTNHGDFICRGIIGDWIKVAKILSGIFYQNNKFLAKRVNGSQWSVNFLKFVCRGLRLFPRDDNYCINNAVDRIEYISKQLKYINNTIIPFFSSKRRGNNNSDEVSKEKLTCLWLQRRKKAIAVIRNNGYWPNIENAIISVQRNEDYYAQSSKCADSNGFEGVVPPFFDREEALASVNYGHFFSYDEIESTVKGCPSGKSCGADGVTYEDMKEMFSENGYVFVNILNVVLVNLRIPTSWKKSIVQRIPKKNFSINDLSTLRDVSLLPTCYKVFSKAICKRITPHISNEIAFWQRAFLPDRDRQELIFSLKAAMDDFRHLSTKFCAVFVDFADAFGSIEHSFLFETLREFDIPLIYCCLVEDLYRYSSFSVICGFELSKEFNIIRGTKTGDPLSALLFILVIDRVCKPMVREAVIRQGIEDERRINPCPLQAFADDVVVVSYDVTIINEMFDIGQVAMKIAGLEVKPSKCAVMYARRSGNNWYKGKADKKPTVSIQGNAIEVYPRDKSYKYLGKSLSLSGEDAVQVYEVIESYKDLLEKITSCKLPLALKASALNNLALAKILHHFYNTRFTEEQLELMEKSLVKAVRNMYDLYETTTQLIIFLPREHGGIGVKRVSDVYRSTRVAFLIKMLNHPQLQFKNIARQSLNLDMEKRKVASTDNDMNFLGFEISEDGYLNSRTKFGCQSDWPDLLRYARKLDVSIEFRQGKAGVIINGEFFYEGAPLQKLLFKQTVNRDLQKAKQLSVQGPFLCMTDVQLKSSHSIFYNWKVSDLLVKFAIKARLSLLPTNFTKHVWNRDNDPSCPFCHQHTESVAHLMNGCREFHNFYSRRHNRIADKIFEVISGSISGFQFHANKLAESIITEYGDELQRITHRKPDIIIIDIQSRKCIILEVTVCYDLYFEQALNTKEKRYQPLCSLLQSLGWEVDLKVLCFGSLGCIKKDVWTVMRSLSVDKLIVKSTLQWCSVSNLIMANYIWRHRVKKLFM

SEQ ID NO: 19254 - protein, 964 aa, Rhopilema esculentum
MIVKLKRAIKSAIRGGKIFFVGTKFDSNFDCEEIYDDIRLLNGDELGAFQDRERKFRALFASKRTNHGDFICRGIIGDWIKVAKILSGIFYQNNKFLAKRVNGSQWSVNFLKFVCRGLRLFPRDDNYCINNAVDRIEYISKQLKYINNTIIPFFSSKRRGNNNSDEVSKEKLTCLWLQRRKKAIAVIRNNGYWPNIENAIISVQRNEDYYAQSSKCADSNGFEGVVPPFFDREEALASVNYGHFFSYDEIESTVKGCPSGKCCGADGVTYEDMKEMFSENGYVFVNILNVVLVNLRIPTSWKKSIVQRIPKKNFSINDLSTLRDVSLLPTCYKVFSKAICKRITPHISNEIAFWQRAFLPDRDRQELIFSLKAAMDDFRHLSTKFCAVFVDFADAFGSIEHSFLFKTLREFDIPLIYCCLVEDLYRYSSFSVICGFELSKEFNIIRGTKTGDPLSALLFILVIDRVCKPMVREAVIRQGIEDERRINPCPLQAFADDVVVVSYDVTIINEMFDIGQVAMKIAGLEVKPSKCAVMYARRSGNNWYKGKADKKPTVSIQGNVIEVYPRDKSYKYLGKSLSLSGEDAVQVYEVIESYKDLLEKITSCKLPLALKASALNNLALAKILHHFYNTRFTEEQLELMEKPLVKAVRNMYDLYETTTQLIIFLPREHGGIGVKRVSDVYRSTRVAFLIKMLNHPQLQFKNIARQSLNLDMEKRKVASTDNDMNFLGFEISEDGYLNSRTKFGCQSDWPDLLRYARKLDVSIEFRQGKAGVIINGEFFDEGAPLQKLLFKQTVNRDLQKAKQLSVQGPFLCMTDVQLKSSHSIFYNWKVSDLLVKFAIKARLSLLPTNFTKHVWNRDNDPSCPFCHQHTESVAHLMNGCREFHNFYSRRHNRIADKIFEVISGSIIGFQFHANKLAESIITEYGDKLQRITHRKPDIIIIDIQSRKCIILEVTVCSICILSKH

SEQ ID NO: 19255 - protein, 1045 aa, Aurelia aurita
MIVKLKRAIKSAIRGGKIYFVGTKFDSNFDCEEIYDDIRLLNGDEWAAFEGRERKFRALFASKRTNHGDFICRGIIGDWIKVAKILSGIFYQNNKFLAKKLNGAEWSVSFLKFVCRSLRLFPRDDNYCINNAVDRIEYISKQLNYVNTTIVPFFSSKRGGNDNRNEVSKEKLTCLWLERRKKAISIIKNSGYWPNIENAEISVQRNEDYYAQSSKFAESNGFGGIVPPFFDREEALASVNYGHFFSYDEIESTVKGCPNGKSCGADGVSYEDMKEMFIENGYAFVNILNVLLVNLRIPASWKKSIVQRIPKKNFSINDLSTLRDISLLPTCYKVFSKAICKRITPLISNEIAFWQRAFLPDRDRQELIFSLKAAMDDFRHLSTKFCAVFVDFADAFGSIEHSFLFDTLREFHIPLIYCCLVEDLYRYSSFSVICGFELSKEFNIIRGTKTGDPLSALLFILVIDRVCKPMVREAVIRRGIEDERRINPLPLQAFADDVVVVNYDATIINEMFDIGQVAMEIAGLEVKPSKCAIMYARRSGNNWYKGKADKKPTVSIQGNAIEVYPRDKSYKYLGKALSLSGEDAVQVYEVIESYKDLLEKITSCKLPLSLKASALNNMALAKILHHFYNTRFTEEQLELMDKSLVKAVRNMYDLYETTTQLIVFLPREHGGIGVKRVSDVYRSTRIAFLIKMLNHPQLQFKNIARQSLNLDMEKRKVVATDNDMNFLGFKISEDGYLNSRTNFGCQSDWPDLLRYARKLDVSIEFRQEKAGVIINGEFFDEGAPLQKLLFKQTINRDLQKAERLSIQGPFLCMTDVQLKSSHSIFYNWKVSDLLVKFTIKARLSLLPTNFTKHIWNRDNDPSCPFCHQHTESIAHLMNGCREFHNFYNRRHNRIADKIFEVISGNLNDFQFHANKLAESIITDCGDELQRITHRKPDILVIDNQSRKCIILEVTVCYDLYFEQALNTKQERYQPLCSLLQSLGWDVDLKVLCFGSLGCIKKDVWTVLRSLTVDRLIIKNTLQWCSVSNLIMANYIWRHRVKKLFG

SEQ ID NO: 19256 - protein, 1030 aa, Rhopilema esculentum
MIVKPKRAIKSAIRGGKIFFVGTKFDSNFDCEEIYDDIRLLNGDEWGAFQDRERKFRALFASKRTNHGDFICRGIIGDWIKVAKILSGIFYQNNKFLAKRVNGSQWSVNFLKFVCRGLRLFPRDDNYCINNAVDRIEYISKQLKYINNTIIPFLSSKRRENNNSDEVSKEKLTCLWLQRRKKAIAVIRNNGYWPNIENAIISVQRNEDYYAQSSKCADSNGFEGVVPPFFDREEALASVNYGHFFSYDEIESTVKGCPSGKSCGADGVTYEDMKEMFSENGYVFVNILNVVLVNLRIPTSWKKSIVQRIPKKNFSITDLSTLRDVSLLPTCYKVFSKAICKRITPHISNEIAFWQRAFLPDRDRQELIFSLKAAMDDFRHLSTKFCAVFVDFADAFGSIEHSFLFETLREFDIPLIYCCLVEDLYRYSSFSVICGFELSKEFNIIRGTKTGDPLSALLFILVIDRVCKPMVKEAVIRQGIEDERRINPCPLQAFADDVVVVSYDVTIINEMFDIGQVAMKIAGLEVKPSKCAVMYARRSGNNWYKGKADKKPTVSIQGNVIEVYPRDKSYKYLGKSLSLFGEDAVQVYKVIESYKDLLEKITSCKLPLALKASALNNLALAKILHHFYNTRFTEEQLELMEKSLVKAVRNMYDLYETTTQLIIFLPREHGGIGVKRVSDVYRSTRVAFLIKMLNHPQLHFKNIARQSLNLDMEKRKVASTDNDMNFLGFEISEDGYLNSRTKFGCQSDWPDLLRYARKLDVSIEFRQGKAGVIINGEFFDEGAPLQKLLFKQTVNRDLQKAKQLSVQGPFLCMTDVQLKSSHSIFYNWKVSDLLVKFAIKARLSLLPTNFTKHVWNRDNDPSCPFYHQHTESVAHLMNGCREFHNFYSRRHNRIADKIFEVISGSISGFQFHANKLAESIITEYGDELQRITHRKPDIIIIDNQSRKCIILEVTVCYDLYFEQALNTKEKRYQPLCSLLQSLGWEVDLKVLCFGSLGCIKKDVWTVMRSLSVDKLIVKSTLQWCSVSNLI

SEQ ID NO: 19257 - protein, 1181 aa, Rhagoletis pomonella
MVPNILREASDEHRNGQGRCGTLQPDQPDDEPDMNMILQPLLSVSPSQLVTTRAVSPGQRMKWTKEMNEHIMRSYYFVTRNETNKSGYRTRLHELFKQAYPNMNVSVQRIGDQRSAIIRNKYLSARRLNELKNEVENQLSTEIEIGRTQQNDDCMTPVNDIYQHDEHQAINALTNVDENENLTILRNEFNAAMIEFNGTDPLLRPFLPKQKATKSLAIATSIMNKEILPTFILNNNYTFEELQTAIYVAATAVIRFTGGKTVSRRIPPKKKSVDPPWKHRLASQIKELRATIGRLIQYMNGNRTKKMRNWYETFKLENKKHSKHDPSNETAEQYLDTIRQKLAVKSNRLRRYTLSEKRRTQNISFQRNERGFYRNLKRNKTEDITEVPSAEQIESFWKSIWSTSTKHATDSAWIHDEYKRTESIKAMEDATFSEADIKKAVESTQNWRAAGPDGIYNYWLKKFTCTHSMVAQHFTKFLKHESQVPNFLMKGCTYLLPKDPKDTKNPSKYRPITCLCTLYKILTSCLAEKICTHLDTHNILAIEQKGCVKNSKGCKEQLIIDTVIMEQAYHNQRNIYTSYIDFKKAFDTVPHSWLLEVLDIYKISPNIKRLMQQLMNSWKVTLKLFHNNGLIKTAPIPIKRGIFQGDSLSPIWFCLALNPLSSILNASNYGFSLKAPRVSQYRLSHLLYVDDIKLYAANERQMNTLLEQTEDFSNDIKMSFGVEKCRRLSVENGKLIRREFELMTHETVDSMTEDDTYKYLGILQARRMQHSEIVSAITSEYLQRVKSLLKSCLNGNNLFKAINAFAIPVLTYTFGVVKWSETELENVKRATRTLLTKYGTHHPKSAVERLYLPRRQGGRGMVDIKQLHNKCKQSLRLYFHNQENSLLQTVCKADLKYSPLNLSEFSAIELISGTQHIQSLMQDWKMKAVHGRYPHALDAPEVDNAASNEWLIHSGIYAETEGFMIAIQDQVIATRNYSKYIMRASVENDLCRRCQKQTETIHHITGACVTLAATEYLTRHNQVAKIVHQSLAIQHKLVTEELPYFKYTPDAVIENRTSKLYWDRSVLTDRPMPHNRPDIIVVEKEVNQAFLIDIGVPNTHNLQDCYMEKYRKYQSLAYEIKDLWKLEKVEVIPVIISTTGVIPKSLNTSLEKLNMVEKRRAIQKSVILSTSSIVRKFLNIN

SEQ ID NO: 19258 - protein, 899 aa, Rhagoletis pomonella
MTNTNALTNVDENENLTILRNEFNAAMIEFNGTDPLLRPFLPKQKATKSLAIATSIMNKEILPIFILNNNYTFEELQTAIYVAATAVIHFTGGKTVSRRIPPKKKSVDPPWKHRLASQIKELRATIGRLIQYMNGNRTKKMRNWYETFKLENKKHSKHDPSNQTVEQYLDTICQKLAVKSNRLRRYTLSEKRRRQNISFQRNEKGFYRNLKRNKSEDITEVPSAEQIESFWKSIWSTSTKHATDSAWIHDEYKRTESIKAMEDATFSEADIKKAVESTQNWRAAGPDGIYNYWLKKFTCTHSMVAQHFTKFLKHESQVPNFLMKGCTYLLPKDPKDTKNPSKYRPITCLCTLYKILTSCLAEKICTHLDTHNILAIEQKGCVKNSKGCKEQLIIDTVIMEQAYHNQRNIYTSYIDFKKAFDTVPHSWLLEVLDIYKISPNIKRLMQQLMNSWKVTLKLFHNNGLIKTAPIPIKRGIFQGDSLSPIWFCLALNPLSSILNASNYGFSLKAPRVSQYRLSHLLYVDDIKLYAANERQMNTLLEQTEDFSNDIKMSFGVEKCQRLSVENGKLIRREFELMTHESEDSMTEGDTYKYLGILQARRMQHSVIVSVVTSEYLQRVKSLLKSCLNGNNLFKAINAFAIPVLTYTFGVVKWSETELENVKRATRTLLTKYGTLHPKSAVERLYLPLRQGGRGMVDIKQLHNNCKQSLRLYFHNQKNSLLQTVCKADLKYSPLNLNEFSAIELISGTQHIQSLMQDWKMKAVHGRYPHALDAPEVDNAASNEWLIHSGIYAETEGFMIAIQDQVIATRNYSKYIMRTTVENDLCRRCQKQTETIHHITGACVTLAATEYLTRHNQVAKIVHQSLAIQHKLVTEELPYFKYTPDAVIENRTSKLYWDQF

SEQ ID NO: 19259 - protein, 1115 aa, Rhagoletis pomonella
MVPNILREASDEHRNGQGRCGTLQPDQPNDEPDMNMILQPLLSVSPSQLVTTRAVSPGQRMKWTKEMNEHIMRSYYFVTRNETNKSGYRTRLHELFKQAYPNMNVSVQRIGDQRSAIIRNKYLSARKLNELKNEVENQLSTEIEIGRTQQNDDCMTPVNDIYQHDEHQAINALTNVDENENLTILRNEFNAAMIEFNGTDPLLRPFLPKQKATKSLAIATSIMNKEILPTFILNNNYTFEELQTAIYVAATAVIRFTGGKTVSRRIPPKKKSVDPPWKHRLASQIKELRATIGRLIQYMNGNRTKKMRNWYETFKLENKKHSKHDPSNETAEQYLDTIRQKLAVKSNRLRRYTLSEKRRTQNISFQRNERGFYRNLKRKKTEDITEVPSAEQIESFWKSIWSTSTKHATDSAWIHDEAKRTESIKAMEDATFSEADIKKAVESTQNWRAAGPDGIYNYWLKKFTCTHSMVAQHFTKFLKHESQVPNFLMKGCTYLLPKDPKDTKNPSKYRPITCLCTLYKILTSCLAEKICTHLDTHNILAIEQKGCVKNSKGCKEQLIIDTVIMEQAYYNQRNIYTSYIDFKKAFDTVPHSWLLEVLDIYKISPNIKRLMQQLMNSWKVTLKLFHGLIKTAPIPIKRGIFQGDSLSPIWFCLALNPLSSILNASNYGFSLKAPRVSQYRLSHLLYVDDIKLYAANERQMNTLLEQTEDFSNDIKMSFGVEKCRRLSVENGKLIRREFELMTHETVDSMTEDDTYKYLGILQARRMQHSEIVSAITSEYLQRVKSLLKSCLNGNNLFKAINAFAIPVLTYTFGVVKWSETELENVKRATRTLLTKYGTHHPKSAVERLYLPRRQGGRGMVDIKQLHNKCKQSLRLYFHNQEDSLLQTVCKADLKYSPLNLSEFSAIELISGTQHIQSLMQDWKMKAVHGRYPHALDAPEVDNAASNEWLIHSGIYAETEGFMIAIQDQVIATRNYSKYIMRTSVENDLCRRCQKQTETIHHITGACVTLAATEYLTRHNQVAKIVHQSLAIQHKLVTEELPYFKYTPDAVIENRTSKLYWDRSVLTDRPMPHNRPDIIVVEKEVNQAFLIDIGVPNTHNLQDCYMEKYRKYQSLA

SEQ ID NO: 19260 - protein, 1181 aa, Rhagoletis pomonella
MVPNILREASDEHRNGQGRCGTLQPDQPNDEPDMNMILQPLLSVSPSQLVTTRAVSPGQRMKWTKEMNEHIMRSYYFVTRNETNKSGYRTRLHELFKQAYPNMNVSVQRIGDQRSAIIRNKYLSARRLNELKNEVENQLSTEIEIGRTQQNDDCMTPVNDIYQHDEHQAINALTNVDENENLTILRNEFNAAMIEFNGTDPLLRPFLPKQKATKSLAIATSIMNKEILPTFILNNNYTFEELQTAIYVAATAVIRFTGGKTVSRRIPPKKKSVDPPWKHRLASQIKELRATIGRLIQYMNGNRTKKMRNWYETFKLENKKHSKHDPSNETAEQYLDTIRQKLAVKSTRLRRYTLSEKRRTQNISFQRNERGFYRNLKRNKTEDITEVPSAEQIESFWKSIWSTSTKHATDSAWIHDEYKRTESIKAMEDATFSEADIKKAVESTQNWRAAGPDGIYNYWLKKFTCTHSMVAQHFTKFLKHESQVPNFLMKGCTYLLPKDPKDTKNPSKYRPITCLCTLYKILTSCLAEKICTHLDTHNILAIEQKGCVKNSKGCKEQLIIDTVIMEQAYHNQRNIYTSYIHFKKAFDTVPHSWLLEVLDIYKISPNIKRLMQQLMNSWKVTLKLFHNNGLIKTAPIPIKRGIFQGDSLSPIWFCLALNPLSSILNASNYGFSLKAPRVSQYRLSHLLYVDDIKLYAANERQMNTLLEQTEDFSNDIKMSFGVEKCRRLSVENGKLIRREFELMTHETVDSMTEDDTYKYLGILQARRMQHSEIVSAITSEYLQRVKSLLKSCLNGNNLFKAINAFAIPVLTYTFGVVKWSETELENVKRATRTLLTKYGTHHPKSAVERLYLPRRQGGRGMVDIKQLHNKCKQSLRLYFHNQENSLLQTVCKADLKYSPLNLSEFSAIELISGTQHIQSLMQDWKMKAVHGRYPHALDAPEVDNAASNEWLIHSGIYAETEGFMIAIQDQVIATRNYSKYIMRASVENDLCRRCQKQTETIHHITGACVTLAATEYLTRHNQVAKIVHQSLAIQHKLVTEELPYFKYTPDAVIENRTSKLYWDRSVLTDRPMPHNRPDIIVVEKEVNQAFLIDIGVPNTHNLQDCYMEKYRKYQSLAYEIKDLWKLEKVEVIPVIISTTGVIPKSLNTSLEKLNMVEKRRAIQKSVILSTSSIVRKFLNIN

SEQ ID NO: 19261 - protein, 989 aa, Rhagoletis pomonella
MIEFNGTDPLLRPFLPKQKATKSLAIATSIMNKEILPTFILNNNYTFEELQTAIYVAATAVIRFTGGKTVSRRIPPKKKSVDPPWKHRLASQIKELRATIGRLIQYMNGNRTKKMRNWYETFKLENKKHSKHDPSNETAEQYLDTIRQKLAVKSNRLRRYTLSEKRRTQNISFQRNERGFYRNLKRNKTEDITEVPSAEQIESFWKSIWSTSTKHATDSAWIHDEYKRTESIKAMEDATFSEADIKKAVESTQNWRAAGPDGIYNYWLKKFTCTHSMVAQHFTKFLKHESQVPNFLMKGCTYLLPKDPKDTKNPSKYRPITCLCTLYKILTSCLAEKICTHLDTHNILAIEQKGCVKNSKGCKEQLIIDTVIMEQAYHNQRNIYTSYIDFKKAFDTVPHSWLLEVLDIYKISPNIKRLMQQLMNSWKVTLKLFHNNGLIKTAPIPIKRGIFQGDSLSPIWFCLALNPLSSILNASNYGFSLKAPRVSQYRLSHLLYVDDIKLYAANERQMNTLLEQTEDFSNDIKMSFGVEKCRRLSVENGKLIRREFELMTHETVDSMTEDDTYKYLGILQARRMQHSEIVSAITSEYLQRVKSLLKSCLNGNNLFKAINAFAIPVLTYTFGVVKWSETELENVKRATRTLLTKYGTHHPKSAVERLYLPRRQGGRGMVDIKQLHNKCKQSLRLYFHNQENSLLQTVCKADLKYSPLNLSEFSAIELISGTQHIQSLMQDWKMKAVHGRYPHALDAPEVDNAASNEWLIHSGIYAETEGFMIAIQDQVIATRNYSKYIMRASVENDLCRRCQKQTETIHHITGACVTLAATEYLTRHNQVAKIVHQSLAIQHKLVTEELPYFKYTPDAVIENRTSKLYWDRSVLTDRPMPHNRPDIIVVEKEVNQAFLIDIGVPNTHNLQDCYMEKYRKYQSLAYEIKDLWKLEKVEVIPVIISTTGVIPKSLNTSLEKLNMVEKRRAIQKSVILSTSSIVRKFLNIN

SEQ ID NO: 19262 - protein, 1042 aa, Hycleus phaleratus
MMAGFVCTCGKTYRTNDHLKQHQRYYCRGACAADDGTCPICKREFRNYNGMRQHFRQAHPVQYNSECEASDTRKYTPWSAAETILLAQEELKYKGQHINKHLCTIFKDRTLESIKSHRKRDEFRRVLEEVKAGRLQVGSNIPSAPPSPPAPLNITSRGCDNVIWPPYPLSPEIHVINHGELSPASHDSYDDPSLRPDSCSSFPRPTPIQSHDPVLSYLNELLCSGAVPQNILDAVSPFILNNQRGPQVADSLCSIIIKACAAKPIQGSANTKQNNGKPIHLTRSYLFKTAQREYSKNRARLAGSIIDGSFGAAPSQRPSIEDVDSLYRNIFSTESGVDAEEYTAVDGERPNIYQPITAEQLDNVFSVRCSDSAGVDGVTFTSLKKFPRVSLLVLYNLMLYCSYVPPVIKTCRTTLIPKSVELDSSNPENYRPITVTSIVLRIFNKILAYRFRELQFHDSQRGFMSIDGCLANTLTLHYIIKECRRLSLPHVVVTLDVRKAFDSVSHHSFCRAMRRFGVDERIIDLIVDSYNGTFTRITCGRDTGAEIPILRGVRQGDPLSPYVFNMVMDELLRGLHQLDGGISIDGQRFVAQAYADDLMIFSSSVREAQGMIRFCERFFERRHMSLNASKSTALIVNSLPAVKKLYVSSRKHLVVSGSIIPNISVGEQFKYLGFRYSYMGTQPSNLSPLRDELERVRKAPLRPYQKFVIIGTYLLPKYIYCLQKPNVTSKVLEKADRLVRLFVKRILHLPIQSANSYLYAPQKSGGLGLLCFRTKIPSILLGRLGKIQSSGDAGMDGVINSQLCRRLQGRLEHMVRNSGIGKKAESIYWSNRFEMSVAGGGMSVMSHNSASSSWIHEPPSYWTGRDYVSSILLRGNVLPTVGGLHNPAGQRYCRAGCHRNETICHVLQRCPVTHFERIQRHDFIVALLAEFARRKGVACEVEPRFRNENGVLRKPDLLLYRDNQVIISDVGIHWESSTPLETCFQDKVSHYTDRSIINSIKTRFPNSKFSILPLILGARGGWCHLNSGLCAFLKTDRPFERR

SEQ ID NO: 19263 - protein, 1125 aa, Hycleus phaleratus
MDRFTCSCGRSYDAERKLKQHQRSYCRGDSGGGASSCPLCGRVFGSYSGMRQHMRLSHTAQYNSECEASDSRKYRQWSSAETQLLVQEELRYSGQHINKHLCSVFEDRTLESIKSHRKRAEYRRVFEEAKARFLEANGTVPVTPLLPSTPEGENGALSVPPSACVDHTEQPYPLSPPICVVAHGDLSSESSGSPASSETNVANLNINENSDGSKGPLCSQSPQVDVVKCGEVSKDSSISGDDPIVLPVLPSCGVRPARLNHDSVQSGDPVLAYLSELLCSGLVPQHIMEILSPFVLDHHRGKLVADVLCEHIITALAPKSTSGVTSKPKGGNREYTHFSRSYLFKRAQMQYTRNRSQLAGSIIDGSFGASTERCPRLEDIESSYRKVFSIESIPDDEPIETHHNGPTYLYEPITKKQLDDVFSVRCSDAAGVDGIVFSRIKKYSRVSLLILYNLMLYSSYIPVKIKQCRTTLIPKEVRSDLTDPDNWRPITVTSIILRLFNKILAARFKDLGYHHSQRGFVNIDGCLANTLSLQYIIKECRKRLLPHTIVTLDVRKAFDSVSLNSVYRAMRRFAIDERIIDLVADSYVGTSTRITCGHVTTQEIPILRGVRQGDPLSPYLFNLVLDELLCDLHRHDFGILLDGQRFAALAYADDLVLFSASLQEAQRMTRICQRFFEKRQMVINPKKSTALVVNLLPSIKKLYVSSKSRLAVSGTIIPNITVDQQFRYLGYRFTYMGAEPTDLSPLREELERVRRAPLRPYQKFVLIDTYLLPKFIYGLQRPNITLKVLERADRLVRLAVKSILHIPKQAANSFLYAPQRNGGLGLVCFRTKIPSILLGRLDKISNSGDAQLDSVCRSSFFDHLRGRLEGMVRESGMGRRAEALYWSNRFESCVSGGSNMSDMGNNYASSAWIKEPPKYWSGRDYISSILLRGNILPTVGGLHNPASQRGCRAGCRRNESVCHVLQKCPTTHFERIRRHDHVVNLLADYARKKGVLCEIEPRFRNVEGVLRKPDLLFHKDNTVILSDVGIHWESSTPLAECFQQKIAHYNDRSIVDAITSRFPNCDIAICPFILGARGAWCHLNRHLAKFLRTDRAFEQRIVTGVLKGGVAIHVAFSTRIWEALV

SEQ ID NO: 19264 - protein, 1113 aa, Hycleus cichorii
MEEFLCSCGKKYSSKDNLGHHQRYYCRGGSLDDPGSCPVCDKTFGSYKGMRQHMRRAHPAQYNSECESADVRRYRGWSDAETLLLVQEELKYEGQHINKHLCAVFSDRTLESIKAHRKRAEYRRVLEEVKSRRVSAGDNTPVAAPSSTTRGNMNSVSPTHSVPSNPPVIVRRELDECANKTIPSYPFSPQVLVTEHCGVSSASSSSESSPASLPGSPSFDFHFSLSQILESSDDDSVFVPGSPSADTDHTIIRRNDPVLAYLNELLCTDSVPQQIVEILSPFVVNHQRGPQVADALCEHIIAACSSQSVSGGAETRDGIRPGRAHMSRPYLFKMAQRQYARNRSQLAGSLIDGSFGKNVERFPSLADVESSYEKIFSTMSAEDDEPIETFHDGSTSIYAPVTAEQLNSIFSRKCSDAAGVDGVTFSKLKMYPRIGLLILYNLMIYSCYVPAKIKSCRTTLIPKAVRSDLTDPDNWRPITVTSIIFRTFNKILADRFKNLSYHSSQRGFSSIDGCLANTITLQYVIKECRKRLLPHTIVTLDVKKAFDSVSLNSVYRAMRRFSIDERIIRLVANSYVGTSTTIKCGSHKTREISILRGVRQGDPLSPYLFNLVLDELLCELHRHEFGITLDGRKFTTLAYADDLILFSPSAHEAQQMLLKCQRFFEKRQMELNASKSTSMVVNLLPSAKKLYVSTRSRLVASGSLIPNITVEQQFKYLGFRFTYMGAEPTDLSSLKDELDRVRRAPLRPFQKFVVIDTYLLPKYIYGLQRPNITKKALESADRMVRLTIKKILHIPKQAANSYLYAPQKSGGLGLICFRTKIPSILLGRLNKIQVSCDAQFDGVLRSQFVDHLRSRLEGMVRDSGIGGKAEALFWSRRYESSALGGNGMSVMGNNFASSSWIKEPPKYWSGRDYISAILLRGNLLPTVGGLHNPAGQRGCRAGCQRNETLCHVLQKCPTTHFERIRRHDFVVGLLADFARRKKILCEVEPHFRNVNGVLRKPDLLFYKNNAVILSDVGIHWESSTPLVECFQNKISHYNDESIISTIKRRFPDCEVAICPFILGARGGWCHLNNHISSFLGIDREFQRRIITSVLKGGTAIHMAFNTKIWEAVV

SEQ ID NO: 19265 - protein, 1201 aa, Hycleus cichorii
MNEYKCVCLKTYETEQALKRHRRYFCRGVPSYDDLICPECPREFNSYAGMRQHLKKAHPVEYNDEIEERDTRSDRPWSAMESLWMAQEELGFKGLHINKYLCTVFEDRTVDSIRGHRRTRQYRSLLERIRVDREEAGEDIPIGPPVGSDNIEVDKPIGMTAHSECLSEQPSATSLSAVLLGRSPSSSRVAGRRVDTGIVAGELVAVEGDNVIHSVSPPTGGSNPVRSLVDFCGEGPFSEFVCPAYPLTPQVHVVTHYAPSSPSNTSVSDCGDDPQVSFQPGNISNVRAGQADGFSVEPVPPAHPLTPEVNVVVHAALSPTSGVSGSPDADFSGGSGLLGGPRSNSDSVLTYINELLCSGKITQQTLEVVAPFILDNNRGPQVSDALCDLIIASCASKTAKGGITTGERERVPLNNSRPYMFKRAQREYTNNRSRLAGSIIDGSFGMGTTQQPSTEDIEALYREVFATESGSDGGEFQALGDGLSSIYLPITYKELDNAFSVRCSESAGLDKVTFTALKRFSRPCLLLLYNMMLFSSHIPPKLKACRTTLIPKSVGLDLSNPENWRPITVTSVVFRIFNKVLATRFRGLNFHNSQRGFMTIDGCLANTLSLQYVIKECRKLRLPHVVVTLDVRKAFDSVSHHSLCRAMRRFGIEEPIINLVLDSYKDTSTRITCGSRTTGEIPILRGVRQGDPLSPYLFNMVLDELLRELHQLDCGISLGGQKFIAQAYADDLMLFASSVREAQLMIRRCERFFERRHMTLNASKSSALIVNLLRSAKKLYVSTKARLVVSGSAIPNITVKQQFKYLGFRFSYMGTVPSDLTPLREELERVRRAPLRPFQKLDIICTYLLPKYIYSLQRPNVDSKTLEGADRLVRSFVKKILHLPQQSANAYLYAPQKSGGLGIMCFRTKIPSILLGRLGKIQCLGDAFMDGIVNSDFYQHIHDRLQHMVRLSGVGRKAELLYWANRFESSVAGIGMSSMSNNAASSAWIKEPPKCWSGRDYISSILLRGNVLPTVGGLHNPAGQRRCRAGCERNETLCHVLQGCPVTHFERIRRHDFVVGLLAEFARRKGMTCEVEPRFRNLNGVLRKPDLLLFKNNQVVISDVGIHWESSTPLDECFHNKIAHYNDESIINTIKNRFPNSNVSFMPLIVGARGGWCHLNRHVCRFMKTDRAFERRIITSVLKGGINIHAAFSTKTWEAVV

SEQ ID NO: 19266 - protein, 1036 aa, Caligus rogercresseyi
MEIHPSPGHSEAPPVMDVPQVLEDALIIEAPMSSTMVQSPSATSSPNPPAPPRPTPLEPVVREAPFPRMDDIRDLKLLASEKAAGLGMDSILCFLKQAAKEPTAPKREGVKALTERQANWLKAIQARKMSDYARVLLVRNDKVLESSALEALKATIRQADIITPKDIMRCLFRVAFNPANHENYNPLPKRMRSLLGAQFNYRCDANLSQCILALGTDGQGVTVNKIISDLIDNAVLGYRERNGLIKTSPRASRHSRKRIAVELKKDFSGTMRAIADGKLSKHLSSQPIPTEVTRAWEATMSKPSLEDKRVVPPRDEPIYSAMFPITEEEVKKALPKEDAGEDPLGMDGRSFRSLQPAFLARYYNAMVAGEKPPQELYKCRTSLLPKVECPTLPSHYRPITVLPHYTRVFHRILARRLEAVEINGAQRGFRKINGCLENNTILKAVLTKASSRGGDGNKVHGVFLDFSKAFDSVSHQSVRWACRRLGIPDPLTDYFTEVLNMATTVLGRNAPVSINSGVLQGDPLSSLLFNFVLDGVLEEAIDQQGSRMDLYKLDGVPASALLYADDAVLLSRSKEGLQNFLDAFGLAAGKVGLKLNPAKCRYFAAGRGTRSSRSTLGLGGSQLRQMSPDETQKYLGLLYSDEGVRTSNVTAALRKGLDNISDANVSLQHKYWCVRDFLLPKFIYELSLGKVNSRDIETADHLVREYVRSLGRLPRCTPIEFFHAPTSMGGLGLLQFRSRAVVAKNGAAKAAAKSLDPLVQAAVRARPAELALSSCLIGGRPVTDKQSAKGQLAEELYRKIDTAGLASCKKGYRNSQFLTGGRFLIEDREFIAALQILGGAPFVKSKKARFTPFTFGNKCEACPETVKNLDHILQMCPRSRADRIKRHDDVQSILEKDLSKRKVRFNKDNVIPVGNTVRKPDLVVLRGDKILVVDPTIISDKRDFGAAWEEKLSKYGNDEFKDALLKSLGRPPKDKANIYVIPFVCNWRGIIYRDSFLEINRRLGTPQSIIPTLQIRIIKGSYQVYRKERALSDRED

SEQ ID NO: 19267 - protein, 1070 aa, Caligus rogercresseyi
MDVPQVLEDALIIEAPMSSTMVQSPSATSSPNPPAPPRPTPLEPVVREAPFPRMDDIRDLKLLASEKAAGLGMDSILCFLKQAAKEPTAPKREGVKALTERQANWLKAIQARKMSDYARVLLVRNDKVLESSALEALKAAIRQADIITPKDIMRCLFRVAFNPANHENYNPLPKRMRSLLGAQFNYRCDANLSQCILALGTDGQGVTVNKIISDLIDNAVLGYRERNGLIKTSPRASRHSRKRIAVELKKDFSGTMRAIADGKLSKHLSSQPIPTEVTRAWEATMSKPSLEDKRVVPPRDEPIYSAMFPITEEEVKKALPKEDAGEDPLGMDGRSFRSLQPAFLARYYNAMVAGEKPPQELYKCRTSLLPKVECPTLPSHYRPITVLPHYTRVFHRILARRLEAVEINGAQRGFRKINGCLENNTILKAVLTKASSRGGDGNKVHGVFLDFSKAFDSVSHQSVRWACRRLGIPDPLTDYFTEVLNMATTVLGRNAPVSINSGVLQGDPLSSLLFNFVLDGVLEEAMDQQGSRMDLYKLDGVPASALLYADDAVLLSRSKEGLQNFLDAFGLAAGKVGLKLNPAKCRYFAAGRGTRSSRSTLGLGGSQLRQMSPDETQKYLGLLYSDEGVRTSNVTAGLRKGLDNISDANVSLQHKYWCVRDFLLPKFIYELSLGKVNSRDIETADHLVREYVRSLGRLPRCTPIEFFHAPTSMGGLGLLQFRSRAVVAKNGAAKAAAKSLDPLVQAAVRARPAELALSSCLIGGRPVTDKQSAKGQLAEELYRKIDTAGLASCKKGYRNSQFLTGGRFLIEDREFIAALQILGGAPFVKSKKARFTPFTFGNKCEACPDTVKNLDHILQMCPRSRADRIKRHDDVQSILEKDLSKRKVKFNKNNVIPVGNTVRKPDLVVLRGDKILVVDPTIISDKRDFGAAWEEKLSKYGNDEFKDALLKSLAELRAQALAVAAPARQAESFSGEDQQMLAKVSPPQSAMQGEQLTLSNTQHKKFLAALKGFVELRQYVSADCSAAAELDSFAYQMKQRKDTRQQNVPFQETPFQKKEIMDANDHIVPD

SEQ ID NO: 19268 - protein, 1004 aa, Ancistrocerus nigricornis
MSSNSTGGPSGSTGPVSDEVNRSVTYSCRKPGCDRSFPTSRGRGVHEQRAHKNWHDDRQVGMIDFKKAPWSTEELALLARQEAHLTLRGVRFINQELVQSFNRRTLESIKGQRKNQRHKDLVLKIIQELTEEHNVEPGPSHDTPRESLEVSISALFDQLEPLAGPLYNADQLRRICNNVTVWSTDKVFEELEIYLLQAFPVKSRVKKSVSNNVARRPLSKRKERRIEYARTQKAWTKNPCKCAKIILEGKSQAQPPEKKDMVSFWRTIMTNGSNESPEREDKRSVVEDLWCPVVPSEISKSFPELNTCPGPDGLTSKQLREIPLNILCRIFNLLLLCGKLPKHLLQARTVLIPKKDGVLKPEDYRPITVQSILTRAFHKTLARRLALHVELDKRQKAFIPTDGCASNIFDLDMILRYHRQHFKPLYLASIDLAKAFDSVSMNTIRDTLEIMGLPDPMTSYIMNSYDRSSTVLSCNGWETESIKPTCGVKQGDPLSPNIFNMVIDRLLKRLPPEVGVRIGNATFNALMFADDMIFMASTPQGLQNIIDVASDFLAKCGLYVNAAKSFTVALRNVPHVKKSVVDSKTQFVCRGTKLPAIKRESEWRYLGVPFTPEGLTVAKPEADLQKAIERLTKAPLKPQQRLFALRVLVLPRLYHLLTLGNTTLSRLKKIDLLVRAALRKWLGLPKDVPNAYFHANTKDGGLSVQSVRWLMPLHRRLRLLNYDKEAQGASPYITSELQRTERRLTENRLIYDTASKLEKRWAMLLHGTVDGKGLRESRKVPQQHQWVLEYNRLLSGKDFINANKLRINALPTRTRTARGRIADRRCRGGCNTTETLYHVLQQCHRTHEARIERHDAIVKHLRKTLDAKFEKVEVEPHLRSRAGLKKPDLIAVRDARALVIDAQVVTDGIDLDVVHKAKAEKYRCLDDEIKNRYEVSHVSYTTATLSYRGVWSEASAREPLEEDAVQKQELKIYSTRVLTGGLHCFWRFNRTTTVRRTVPRAGVG

SEQ ID NO: 19269 - protein, 1036 aa, Sacculina carcini
MPDHKRHPAELECAVCTATVQRAQQTGPVVCPACRQFFSRQQHDIRLNRRCARDGNCPITRSTRSCVPCRLTKCLAVGLQPAQPTGVATSDTGEPHEQPSSPACPVCLSCNSRKRTITCAICDRPHHNSCVGVTRAQAEALPVWGCNDCLRYRSENYNIDAPDEIDSNTPADLTAALSELRLRSSVRQHVPRALRHRVAAELAQRITAALEERSSSAWWRLLSYAATGPLSRTNPATADIQRRTTPRAESEDEARSRCVRNKCADGDIAGALRLLTSSDSVVGYSEEVTRELEEKHPAALDDEQPPPRRDCPELRVEKQEVQKAINSLPKGSSGGLDGLRPLHLRQLDSQQTAEAGQQLLAALTALSNCAIAGRIPDCARPAFYSARLIALRKKSGGLRPIAVGSVFRRLASKILAGKMSASVAHELQPVQLGVATPLGCEAAVHATRAFIADHEDCSGHILLKLDMSNAFNCVSRTHILAEIYRRFPAALPLTPQAYGQPTPLYHGPNRVWSCRGVQQGDPLGPLLFALAVDSIAQSMESPLNVWYLDDATLAGPRHMVLADVGRLLPALHNIGLDINANKCEVTLLGPPDDKSDGQDNAAALLNEAAETHLEELQLLGAPVRSGGIGRALDIISDATDLLIERSGYIGSHPALFFLSKCASVPRAVYLMRAAPCYRAKDQLRIIDERLRSAISACCNVQLNDDRWIQASLPVRMGGIGARRLEDVALPAHIASLVSAEDLVCQIIRRSSDDRPGPPVAVIEEYVGRQCPDFGADEPHNQRHLDERASRVRLNNMLDRADQVDRARLKAAAAPHSGAWLGAVPVANLGLLLPDEAVRIGVALRLGAAVQQPHRCRCGKTSDGWGHHSLSCDRSAGRLPRHKALNDVIYRSLASAGVGAVLEPRGLDRGDGRRPDGVAILPFRLGKSLLWDATCVNTFGATHLVECAVVPGAAAKSAEERKRRRYAELSQRYDFVPLAVETTGVLGEAFEELIKCLGRRMSSRSGEPRETAWLRQRIGLAVVRGNTAAICQLGDCT

SEQ ID NO: 19270 - protein, 1014 aa, Platorchestia sp.
MDPMLNPAAAAAGAGGDEEPAPGHSCPECQRSFGTSRGLNLHRRRAHANVYHAEVEGRRNRGATRWLDEEKKRMALVEATLIYEDELRPTMANQQIAELSLDRTLQAIKGRRRTPEHRTMVETLVEEMRSRVVQDARNPSWAQNGEAQDHLDELARYARTLVADNGLDGLRWKVPSLLACIDTIVTEWPCLMISLETKEALDQHLHELVGSLHIPNDGAPMVRRNGRGPGVGRHVRPAQDVPVGRRQLRRQAHKRLQALYDRDRRRAAQAVLTGQWRDLVPPVAPEGMAAYWTELFQRPSPVDDRPYKVPADYKRGTIIPITVDEVAGALRLSRDTACGPDGVTLRDLRVATPSILAACFNVWLMTGYLPKALRTGRTTLIPKVAEPAAPGDFRPITVTSHIARLFGKILAARLIADVPISQRQKAFLPVDGCAENLAVLDGVLSIACDQTAPIHLAFLDLAKAFDSVSQQSIRRILQVNGIPKCLGDLVMSCYDEAWTTLTCNGEELGRALQTRGVRQGDPLSPVLFNLVLNEAIVEVEGRPCGVNLGDTLVNVMAYADDLVLVASSESGLQELTDAALEMLSGAGLEPNPRKCATLSLCLRKKEKMWFVAQTDFLEVTGERIRAMSPEDTYKYLGIRVDAGGRSASYGQLLEDGIEAITRAPLKPQQRIEIATKFLVPQLLHRLVLGPVYRTQLQRMDRRLRVALRSWLKLPADTPDAMIHAQTKAGGLGFVSLNTEIPLLKQKRLERLLNSTDPTVRATMQSSPLIKDQRYWSGPVKIAGRECRSKTECKTAWSVALAGKVDGVGIVPQAGEHPQAHGWLTGQGPDMEGRDFVDAVAVRCATLKTPLRESRGRQGAPRMCTSCNVVASLGHMSQVCPRTHGLRVRRHDNIVAFVEERLKGKGWQAAREPVVPYGGTYRKPDLVVWKQTEGKAAIVDIQIVSDRFSLGMAHDRKVGKYNEPEIVQGVSRLTGVPGANCSVTSVTVSWRGCISGAAASDLLRLGLTKLDLRIV

SEQ ID NO: 19271 - protein, 1187 aa, Cnaphalocrocis medinalis
MRWGHDINTFIMRTYYYITKLETDRTMYCRNLYDQFKQNYPDLNVTEQRVADQYRVILRNKLLSDDELTQIKLEVREKLNAERESETLHNPLPTEISQRYPNSSPVSQSLESIDEDNLPLSSLILNANHTPSLSITTSDSQVPHESPPSPQVNTEPVPDLFILELAEKLQTALTEYTGTDPTSRPKLPRLRENKKLYQLVNIFNNHILGEFSTMDSDITQIHTLIYCSALVISKQLGYTIGSQNKNCSINKSRHNTKPAWQIRLEKDIEKLRKSIGKITQYIQNKNRSNKLVKQVEQIFNMNKVHSTHERDNKRPEEFLDTLKQKLSLKAQRLRRYKKALQRKEDNKMFARNEKVFYRGLGKNESEQSNEASNERRFPTALSLEEYWTDIWKKHNDYNYQAAWIKEEEDKWKGIEEMEFTEINREDIEIATRKMKNWKAAGVDGIHSFWYKKLFILHDALGKAISEVIKGENDMPKFLTNGITYMLPKCEQTSDPSQYRPITCLPTLYKLITSCITNTLNSHIERNNILAEEQKGCRRNHMGCKEQLIIDSTILKHAHKHRRNINITYIDYKKAFDSVPHAWLVRVLQIYKVNPTLITFLENAMIDWRTTLLLHTDRNNTISTDEIPIENGIFQGDSLSPLWFCLALNPLSNLLNKTGNGYKLSNSTSISHLMYMDDIKLFSATDKEMKNLIKITEKFSTDINMSFGLEKCRILRICKGKVKGNNMDMGEQFNFKLMEPTETYKYLGIQQAKGIHHIKIKQALTQEYFRRVNLICKRQLYSKNLFKAINTFAVPILTYSFGIIKWTKTDIAKLEMKTRTTLTKHSYLHPKSAIERASIKRDKGGRGLIDITFMWRDQIRSFRKFFYDKTLTSTLHSTIVDTDDNYTPLNLQNKDIEFNTRLEHENQKMAAWRRKELHGRHIQDLEQPHIDTIASNKWLKLGSLFPETEGFIIAIQDQVINTRNYKKYILKDRHLITDKCRKCNRVSETIQHITSACPNLTQTDYTHRHNQVCNIIHQKLAFKHKLTTGKPVPYYQYSPKPVLESANYKMYYDRAILTDKTVHNNRPDITLINKNQNTVYLIDVAVPNTHNLHKTITEKIHKYIELKEEIIKIWKVNKVYIVPLVLSSTGVIPKHLLSSLRNLDLPENTFMTMQKAAILNTCRIVRKFLQDDAHLTSPLPQPTATHLA

SEQ ID NO: 19272 - protein, 975 aa, Marasmia exigua
MPSAASKPTGYHIAADAPSQCPYYQIDTMIYCTALVISQQLGYKIERPLQRTYTNKQTQYTKPSWQIRLERDIEKLRKCIGKVTQYISNTNISEKLTREVEQIFSNNQVHSTHERDNRSPEEFLDTLKQKLSLKALRLRRYKKALHRKEDNKLFLRNEKLFYRNLGKNEGEQSDANNVSPPTCETLKDYWAGIWKKHKEYNFEATWIKEEETRWEGIEEMEFTDINCEDIERVSRKMKNWKAAGIDGVHSFWYKKLFILHEALSIAISEVIKGEVELPKFLTKGLTYMLPKSKTLADPSQYRPITCLPTLYKLITSCITDLLNSHIEKNNILAEEQKGCRQNHMGCKEQLIIDSTILKHAHKHRRNINVTYIDYKKAFDSVPHAWLIRVLQIYKVNPTIITFLENAILEWRTTLLLYLEGDNSIRTDEIPIENGIFQGDSLSPLWFCLALNPLSNLLNRTDNGYPLSNTTSITHLMYMDDIKLFSASDKDMKNLIKTTEQFSTDINMSFGLEKCRTLRIVKGKVKNSNFDTGEQFNFKLMEASDTYKYLGIQQSKGIHHTKIKKTLTQEYFRRLNSICKKQLYSKNLIKAINTFAVPVLTYSFGVIKWTKTDINKLEIKTRTTLTKHNYLHPKSAIERSNTKREKGGRGLIDISFMWKDQIQHFRRFFYDKTSTSTIHSTVVETDDNFTPLNLNNKDIQFSNRQEHENLKMNSWRRKELHGRHIHDLEQPHIDPTASNKWLKLGSLFPETEGFIIAIQDQVINTRNYKKFILKDRNLISDKCRKCHRQSETIQHITSACSSLTQTDYTHRHNQICNIIHQKLALKHKLTTGKALPYYQYNPKPVLESNSHKMYYDRAILTDRTVHNNRPDITLIDKNKNTVYLIDISIPNTHNLHKTITDKIHKYTELKEEIVKIWKMNKVYIVPLVLSSTGVIPKHLLTSLRNLDLPESTYMMMQKAAILNTCRIVRKFLQDDS

SEQ ID NO: 19273 - protein, 756 aa, Marasmia exigua
MEFTDINCEDIERVSRKMKNWKAAGIDGVHSFWYKKLFILHDALSIAISEVIKGEVDLPKFLTKGVTYMLPKSKTLADPSHYRPITCLPTLYKLITSCITDLLNSHIEKNNILAEEQKGCRRNHMGCKEQLIIDSTILKHAHKHRRNINVTYIDYKKAFDSVPHAWLIRVLQIYKVNPTIITFLENAILEWRTTLLLYLEGDNSIRTDEIPIENGIFQGDSLSPLWFCLALNLLSNLLNRTDNGYPLSNTTSITHLMYMDDIKLFSASDKDMKNLIKTTEQFSTDINMSFGLEKCRTLRIVKGKVKNSSFDTGEQFNFKLMEASDTYKYLGTQQSKGIHHTKIKKTLTQEYFRRLNSICKKQLYSKNLIKAINTFAVPVLTYSFGVIKWTKTDINKLEIKTRTTLTKHNYLHPKSAIERSNTKREKGGRGLIDISFMWKDQIQHFRRFFYDKTSTSTIHSTVVETDDNFTPLNLNNKDMQFSNRQEHENLKMNSWRRKELHGRHIHDLEQPHIDPTASNKWLKLGSLFPETEGFIIAIQDQVINTRNYKKFILKDRNLISDKCRKCHRQSETIQHITSACSSLTQTDYTHRHNQICNIIHQKLALKHKLTTGKALPYYQYNPKPVLESNSHKMYYDRAILTDRTVHNNRPDITLIDKNKNTVYLIDISIPNTHNLHKTITDKIHKYTELKEEIVKIWKMNKVYIVPLVLSSTGVIPKHLLASLRNLDLPESTYMTMQKAAILNTCRIVRKFLQDDS

SEQ ID NO: 19274 - protein, 1256 aa, Marasmia exigua
MELRNRKLRKLPLPGGDRRGAPGADAGRHSIRAIGGEGLGGRPSAGGPALSGNPEQSELTLTNIPYSSTATPILAVSQEARAANPATTKAGKPRVRMRWGEEINTFIMRTYYYVTKLETDRTMYCRNLFEQFKLKYPDINVTEQRIADQYRVILRNKLLSGDVLEQIKLEVREQLSTERETETQLNMTQTSQTQTLDSSCEDNLPLSSLRNTISTNQTLLSNFTTQRSQIPAPSREFNTAEPESDVFIQELKDKLQTALTEYTGTDPTSRPKLPRLREDKKLYQLLNIFNNHILGELLSADLDIHDIHTMIYCTALVISQQLGYKIERPLQRTYTNKQTQYTKPSWQIRLERDIEKLRKCIGKVTQYISNTNISEKLTREVEQIFSKNQVHSTHERDNRSPEEFLDTLKQKLSLKAQRLRRYKKALHRKEDNKLFLRNEKLFYRNLGKNEGEQSDANNVSPPTCETLKDYWAGIWKKHKEYNFEATWIKEEETRWEGIEEMEFTDINCEDIERVSRKMKNWKAAGIDGVHSFWYKKLFILHDALSIAISKVIKGEVELPKFLTKGVTYMLPKSKTLADPSQYRPITCLPTLYKLITSCITDLLNSHIEKNNILAEEQKGCRRNHMGCKEQLIIDSTILKHAHKHRRNINVTYIDYKKAFDSVPHAWLIRVLQIYKVNPTIITFLENAILEWRTTLLLYLEGDNSIRTDEIPIENGIFQGDSLSPLWFCLALNPLSNLLNRTDNGYPLSNTTSITHLMYMDDIKLFSASDKDMKNLIKTTEQFSTDINMSFGLEKCRTLRIVKGKVKNSNFDTGEQFNFKLMEASDTYKYLGIQQSKGIHHTKIKKTLTQEYFRRLNSICKKQLYSKNLIKAINTFAVPVLTYSFGVIKWTKTDINKLEIKTRTTLTKHNYLHPKSAIERSNTKREKGGRGLIDISFMWKDQIQHFRRFFYDKTSTSTIHSTVVETDDNFTPLNLNNKDIQFSNRQEHENLKMNSWRRKELHGRHIHDLEQPHIDPTASNKWLKLGSLFPETEGFIIAIQDQVISTRNYKKFILKDRNLISDKCRKCHRQSETIQHITSACSSLTQTDYTHRHNQICNIIHQKLALKHKLTTGKALPYYQYNPKPVLESNSHKMYYDRAILTDRTVHNNRPDITLIDKNKNTVYLIDISIPNTHNLHKTITDKIHKYTELKEEIVKIWKMNKVYIVPLVLSSTGVIPKHLLASLRNLDLPESTYMTMQKAAILNTCRIVRKFLQDDS

SEQ ID NO: 19275 - protein, 1256 aa, Marasmia exigua
MELRNRKLRKLPLPGGDRRGAPGADAGRHSIRAIGGEGLGGRPSAGGPALSGNPEQSELTLTNIPDSSTATPILAVSQEARAANPATTKAGKPRVRMRWGEEINTFIMRTYYYVTKLETDRTMYCRNLFEQFKLKYPDINVTEQRIADQYRVILRNKLLSGDVLEQIKLEVREQLSTERETETQLNMTQTSQTQTLDSSCEDNLPLSSLRNTISTNQTLLSNFTTQRSQIPAPSREFNTAEPESDVFIQELKDKLQTALTEYTGTDPTSRPKLPRLREDKKLYQLLNIFNNHILGELLSADLDIHDIHTMIYCTALVISQQLGYKIERPLQRTYTNKQTQYTKPSWQIRLERDIEKLRKCIGKVTQYISNTNISEKLTREVEQIFSKNQVHSTHERDNRSPEEFLDTLKQKLSLKAQRLRRYKKALHRKEDNKLFLRNEKLFYRNLGKNEGEQSDANNVSPPTCETLKDYWAGIWKKHKEYNFEATWIKEEETRWEGIEEMEFTDINCEDIERVSRKMKNWKAAGIDGVHSFWYKKLFILHDALSIAISEVIKGEVELPKFLTKGVTYMLPKSKTLADPSQYRPITCLPTLYKLITSCITDLLNSHIEKNNILAEEQKGCRRNHMGCKEQLIIDSTILKHAHKHRRNINVTYIDYKKAFDSVPHAWLIRVLQIYKVNPTIITFLENAILEWRTTLLLYLEGDNSIRTDEIPIENGIFQGDSLSPLWFCLALNPLSNLLNRTDNGYPLSNTTSITHLMYMDDIKLFSASDKDMKNLIKTTEQFSTDINMSFGLEKCRTLRIVKGKVKNSNFDTGEQFNFKLMEASDTYKYLGIQQSKGIHHTKIKKTLTQEYFRRLNSICKKQLYSKNLIKAINTFAVPVLTYSFGVIKWTKTDINKLEIKTRTTLTKHNYLHPKSAIERSNTKREKGGRGLIDISFMWKDQIQHFRRFFYDKTSTSTIHSTVVETDDNFTPLNLNNKDIQFSNRQEHENLKMNSWRRKELHGRHIHDLEQPHIDPTASNKWLKLGSLFPETEGFIIAIQDQVINTRNYKKFILKDRNLISDKCRKCHRQSETIQHITSACSSLTQTDYTHRHNQICNIIHQKLALKHKLTTGKALPYYQYNPKPVLESNSHKMYYDRAILTDRTVHNNRPDITLIDKNKNTVYLIDISIPNTHNLHKTITDKIHKYTELKEEIVKIWKMNKVYIVPLVLSSTGVIPKHLLASLRNLDLPESTYMTMQKAAILNTCRIVRKFLQDDS

SEQ ID NO: 19276 - protein, 1263 aa, Ostrinia furnacalis
MELRSKGKRIMPLPGGDRRGAPEADAGRHSIRAIGGGGLGGRPSAGGPALSGEPEQCEFTQLSNSTNPTASPAEDVSQEAPAIMPATTKAGKPRVRMRWNDEINTFIIRTYYYITKLEKDRTMYCKNLFDRFKLQYPELNISSQRIADQRRVILRNKLLPDSVIENIKKEVAEQLKQEDDTTLHSSGINPNTSSPDPHDSSFEDNLPLNSLLSQSQSLPTLTQDSTQTSTNASSSNTRTGSDDSSDTYIQTVTEMLHTALTEYSGTDPITRPRLPKLRENKNLYRLLDLFNTKILKSFVSEETDIDQVHTLIYCSALVICKQLGYNIEPHQLNRRSTTRNNKKPAWQTRLEKDIEKLMKDIARVTQYISNNNVSNRLRDSVEAIFRKNQIHSTHERNNRKPEEFLDTLKQKLSLKAQRLRRYKKALHRKEDNKLFTKNERIFYRNLGQNEADSEQMDKEAPTTEDLQNYWADIWEKHSNYNYQAQWIKDEEIKWQNINEMEFNNIDQDDIQNVTSKMKNWKAAGLDGLHCFWLKKFYILHDTLGRVITDVIQGNANLPQFLTKGVTYMLPKSKNTMDPSQYRPITCLPTLYKLITSCITNKLNAHIENNNILAEAQKGCRRNHLGCKEQLVIDSIILKHAHKHKRNINVTYIDYKKAFDSVPHSWLIRVLQIYKVNPTLITFLENTMADWKTTLILNQIRTEEIPIRNGIFQGDSLSPLWFCLALNPLSTLLDSDSRNGYKLTESTPITHLMYMDDIKLYSKSEQAMKKLIEITETFSTDINMTFGLDKCRTLRIVKGKVKSTLNANEIHSFQLMDSNDTYKYLGIQQDKGIHHIKIKKDLTQEYFRRVNLICKKQLYSKNLIKAINTFAVPILTYSFGIIKWTKTDINKLEIKTRTTLTKHNYLHPKSAIQRTTVTRDKGGRGLIDLKLLWEGQIQNIRKFFYEKSTTSNLHLASIETDDSYTPLDLKNRQIVFKSKEQHETEKFETWRRKELHGRHLHDLEQIHIDTTASNKFLKLGSFFPETEGFIIAIQDQVINTRNYKKIILKDSHLPTDKCRKCNRQSETIQHITSACPSLTQTDYTHRHNQICNIIHQKLAHKHKLLSGKTLPYYQYKPQPVLESSSHKMYFDRAILTDRTVHNNRPDITLIDKQNKTVHIIDVAVPNTHNLHKTITEKIHKYTELKDEILKIWNIDKVYIVPLVLSSTGIIPKHLLSALRNLDIQENTYMTMQKAAILNTCRIVRKFLQDDNSQYPNPANAAHLA

SEQ ID NO: 19277 - protein, 1160 aa, Marasmia exigua
MELRNRKLRILPLPGGDRRGAPGAGAGRHSIRAIGGEGLGGRPSAGGPALSGNPEQSELTLTNSPDSFTATPTLAVSQEAPATNPATTKAGKPRVRMRWGDEINTFIMRTYYYITKLDTDRTMYCKNLYDQFRQKYPEINVTEQRVADQYRVILRNKLLSDDTLNRIKLEVREQLNIDAAEDMRLQTSHHSQPTLLTHTYNSSSEENLPLSSLRLTITTTNESPELLTPFDHTTQTSSTSHIPTLSIPRVNTSEPQSDLFIQELTEQLQTALTEYTGTDPSTRPRLPRLREDKKLHQIISIFNNNILGQVVTDKSDITYIHTLIYCSALVICKQLGHKIEPQAKPNNNKNQKCKKPAWQIRIEKDIEKLRKDIGRVTQYISNNNRSEKLTRKVEEIFKKNQIHSTHEKCNRRPEEYLDTLKQKLSLKTQRLRRYKKALQRKEDNTLFLKNEKLFYRNLGKPECTNQSEIKERITPTADALKDYWTNIWKKHADYNHQATWIKEEEIKWEHINEMEFTEISREDVEKVTRKMKNWKAAGIDGVHNFWLKKLFILHDRLSTAISEVIKGEVELPKFLTKGVTFMIPKCENSTDPSKYRPITCLPTLYKLITACIANKLNLHLEANQVLAEEQKGCRRNHMGCKEQLIIDSTILQHAHKRSKNINITYIDYQKAFDSLPHSWLIRVLQLYKVNPTLITFLENAMVDWRTTLLLTCDSDTISTDEIPIENGIFQGDSLSPIWFCLALNPLSHLLNESDSGYKLSSSTCISHLMYMDDIKLFASKEKEMKELIKITKHFSTDINMTFGLDKCRTLRIYKGKVNGTNTEENEEFNFRLMEPTDTYKYLGVQQAKRIRHIQIKKKLTQEYFRRVNLICKKQLYSKNLFKAINTYAVPILTYSFGVIKWTKTDINKLERTTRTTLTKHNYLHPKSAIERATVKREKGGRGLIDLKLMLMEQIKHFRSFFYAKSSTSNIHSTVVDVDDNYTPLNLKNKDKQFISREEHEIQKAAAWRRKELHGRHYHDLAQPHVDSIASNKFLKLGSLFPETEGFIIAIQDQIINTRNYKKYILKDRTLITDKCRKCNRQSETIQHITSACPNLTQTDYTHRHNQVCNIIHQKLAFKHKLTSGKPIPYYQYTPKPVLESNQLQDVLRQSNIDRQNYTQQ

SEQ ID NO: 19278 - protein, 1288 aa, Marasmia exigua
MELRNRKLRILPLPGGDRRGAPGAGAGRHSIRAIGGEGLGGRPSAGGPALSGNPEQSELTLTNSPDSFTATPTLAVSQEAPATKPATTKAGKPRVRMRWGDEINTFIMRTYYYITKLDTDRTMYCKNLYDQFRQKYPDINVTEQRVADQYRVILRNKLLSDDTLNRIKLEVREQLNIDAAEDMRLQTSHHSQPTLLTHTYNSSSEENLPLSSLRRTITSTNESPELLTPFDHTTQTSSTSHIPTLSIPRVNTSEPQSDLFIQELTEQLQTALTEYTGTDPSTRPRLPRLREDKKLHQIISIFNNNILGQVVTDKSDITYIHTLIYCSALVICKQLGHKIEPQAKPNNNKNQKYKKPAWQIRIEKDIEKLRKDIGRVTQYISNNNRSEKLTRKVEEIFKKNQIHSTHEKCNRRPEEYLDTLKQKLSLKTQRLRRYKKALQRKEDNTLFLKNEKLFYRNLGKPECTNQSEPNPNVKIKERITPTADALEDYWTNIWKKHADYNHQATWIKEEEIKWEHINEMEFTEISREDVEKVTRKMKNWKAAGIDGVHNFWLKKLFILHDRLSTAISEVIKGEVELPKFLTKGVTFMIPKCENSTDPSKYRPITCLPTLYKLITACIANKLNLHLEANQVLAEEQKGCRRNHMGCKEQLIIDSTILQHAHKRSKNINITYIDYQKAFDSLPHSWLIRVLQLYKVNPTLITFLENAMIDWRTTLLLTCDSDTISTDEIPIENGIFQGDSLSPIWFCLALNPLSHLLNESDSGYKLSSSTCISHLMYMDDIKLFASKEKEMKELIKITEQFSTDINMTFGLDKCRTLRIYKGKVKGTNTEESEEFNFRLMEPTDTYKYLGVQQAKRIRHIQIKKKLTQEYFRRVNLICKKQLYSKNLFKAINTYAVPILTYSFGVIKWTKTDINKLERTTRTTLTKHNYLHPKSAIERATAKREKGGRGLIDLKLMLMEQTKHFRSFFYAKSSTSNIHSTVVDVDDNYTPLNLKNKDEQFISREEYEIQKAAAWRRKELHGRHYHDLAQPHVDSIASNKFLKLGSLFPETEGFIIAIQDQIINTRNYKKYILKDRTLITDKCRKCNRQSETIQHITSACPNLTQTDYTHRHNQVCNIIHQKLAFKHKLTSGKPIPYYQYTPKPVLESNSYKMYYDRAILTDRTIHNNRPDITLIDKQKNTVYLIDVAVPNTHNLHKTITEKIQKYTELKEEIIKIWNMNKVYILPLVLSSTGIIPKHLLTALRMLDVPENIYMTMQKAAILNTCRIVRKFLQDDANHMNPIIEAAAHLA

SEQ ID NO: 19279 - protein, 1186 aa, Marasmia exigua
MRWGDEINTFIMRTYYYITKLDTDRTMYCKNLYDQFRQKYPEINVTEQRVADQYRVILRNKLLSDDTLNRIKLEVREQLNIDAAEDMRLQTSHHSQPTLLTHTYNSSSEENLPLSSLRLTITTTNESPELLTPFDHTTQTSSTSHIPTLSIPRVNTSEPQSDLFIQELTEQLQTALTEYTGTDPSTRPRLPRLREDKKLHQIISIFNNNILGQVVTDKSDITYIHTLIYCSALVICKQLGHKIEPQAKPNNNKNQKCKKPAWQIRIEKDIEKLRKDIGRVTQYISNNNRSEKLTRKVEEIFKKNQIHSTHEKCNRRPEEYLDTLKQKLSLKTQRLRRYKKALQRKEDNTLFLKNEKLFYRNLGKPECINQSEIKERITPTAEALEDYWTNIWKKHADYNHQATWIKEEEIKWEHINEMEFTEISREDVEKVTRKMKNWKAAGIDGVHNFWLKKLFILHDRLSTAISEVIKGEVELPKFLTKGVTFMIPKCENSTDPSKYRPITCLPTLYKLITACIANKLNLHLEANQVLAEEQKGCRRNHMGCKEQLIIDSTILQHAHKRSKNINITYIDYQKAFDSLPHSWLIRVLQLYKVNPTLITFLENAMVDWRTTLLLTCDSDTISTDEIPIENGIFQGDSLSPIWFCLALNPLSHLLNESDSGYKLSSSTCISHLMYMDDIKLFASKEKEMKELIKITKHFSTDINMTFGLDKCRTLRIYKGKVNGTNTEENEEFNFRLMEPTDTYKYLGVQQAKRIRHIQIKKKLTQEYFRRVNLICKKQLYSKNLFKAINTYAVPILTYSFGVIKWTKTDINKLERTTRTTLTKHNYLHPKSAIERATVKREKGGRGLIDLKLMLMEQIKHFRSFFYAKSSTSNIHSTVVEVDDNYTPLNLKNKDKQFISREEHEIQKAAAWRRKELHGRHYHDLAQPHVDSIASNKFLKLGSLFPETEGFIIAIQDQIINTRNYKKYILKDRTLITDKCRKCNRQSETIQHITSACPNLTQTDYTHRHNQVCNIIHQKLAFKHKLTSGKPIPYYQYTPKPVLESISYKMYYDRAILTDRTIHNNRPDITLIDKQKKTVYLIDVAVPNTHNLHKTITEKIQKYTELKEEIIKIWNMNKVYILPLVLSSTGVIPKHLLTALRMLDVPENIYMTMQKAAILNTCRIVRKFLQDDANHMNPITEAAAHLA

SEQ ID NO: 19280 - protein, 1295 aa, Cnaphalocrocis medinalis
MMMELRNRKLRILPLPGGDRRGAPGADAGRHSIRAIGGEGLGGRPSAGGPALSGNPEQSELTHSSNRTDSSSVTPTLAVSQEAPATNPATTKAGKPRVRMRWGDEINTFIMRTYYHVTKLETDRTMYCRNLYDRFRQKYPNINVTEQRVADQYRVILRNKLLSDDALNQIKQEVRELINTEEEAEIRGCTSHNHLQTPLLQPQDSHTQDSSFEDNLPLSSLTHNNIASTQLSPRSLTLTDHNITLTSASSSHIPPFTTTRGMNTAEPESDALIQELTDNIQTALTEYTGTDPTTRPRLPRLRENKQLYQLIYIFNNHILPQLLTDDSDITHIHTLVYCSALVICKKLGYKIETQSTHNTYKKLQHNKPAWQIRIEKDIIKLRKDIGRLTQYILNSNRSEKLSKQVEHIFTKNQIHSTHEKSNRRPEEFLDTLKQKLSLKAQRLKRYKKALQRKENNKLFLKNEKVFYRSLGKQESADKNEVRDRDTPTAEALEDYWTNIWKKHADYKHQAPWIREEERKWEHIDEMEFSDISREEIETVTRKMKNWKAAGIDGIHSFWFKKLFILHERLSAAISEVIKGEDELPKFLTKGVTYMLPKGESSSDPSKYRPITCLPTLYKLITSCITNRLNSHLEANNILAEEQKGCRRNHMGCKEQLIIDSTILQHAQKRGKNINVTYIDYKKAFDSVPHAWLIRILQIYKVNPSLITFLENAMIDWRTTLILSCDSNTIRTDEILIENGIFQGDSLSPLWFCLALNPLSRLLNNADNGYKLSTSTSISHLMYMDDIKIFSRTEAGMKNLIKITENFSGDINMSFGLDKCRTLRISKGKIKGINLNEDEEFNFKLMEPSDTYKYLGIQQAKGIQHIQIKKQLTQEYFRRINLICKKQLYSKNLFKAINTFAVPILTYSFGVIKWTKTDIIKLERSTRTTLTKHNFLHPKSAIERATIKREKGGRGLIDLKLMWMEQRQNFRIFFYSKISTSNIHSTVAETDDNFTPLNLKNKDIEFVSRQEHETQKAATWRGKELHGRHCHDLEQPHIDATASNKFLKLGSLFPETEGFIIAIQDQIINTRNYKKYILKDRTLITDKCRKCNRQSETIQHITSACPNLTQTDYTHRHNQICNIIHQKLSTKHKLTSGKPLPYYQYSPKPVLENNSFKMYYDRAILTDKTVHNNRPDITLIDKKNSIVYLIDIAVPNTHNLHKTITEKIHKYTELKDEVIRIWNMKKVYILPLVLSSTGVIPKHLLTALRTLDLPESLYMTMQKAAILNTCRIVRKFLQDDATCTNTNTTVTEAHLV

SEQ ID NO: 19281 - protein, 848 aa, Apodemia mejicanus
MERKEDNKLFINNEKIFYRNLKQDEVKGTLQASETASEIETPTSEALKNYWTDIWKKESDHNHTAIWIKEEEEKWQDIDEMEFKDISREEIQSATRNMKNWKAAGIDGVHSFWYKKLYKLHDILGTAITDIIKGTVNMPSFLTKGITFMIPKSANRSDPSQYRPITCLPTLYKLITSCITNQLNKHIEDNNILTEEQKGCRRNHMGCKEQLIIDSVVLKHVHKHNRNLHIAYIDYKKAFDSVPHSWLIHILKIYKVNPTIVAFLEKVMINWRTTLLLTNKLNLIRTDEISIENGIFQGDSLSPLWFCLALNPLSNQLNKLDSGYKLSSETSISHLMYMDDIKLFSRSEKGLQTLLKVTDKFSMDINMSFGLDKCKILKIIKGKIKGQNSDIIGHINFKLMEPHETYKYLGIQQNAGIQHTKIKADLGVEFFRRLNLLCNKQLNSRNLFKAINTYAIPILTYSFGVIKWTKTDINKIEIKTRTTLTKHNYLHPKSAIERATISREKGGRGLIDLKLLWEGQIQGLRRFFYVKSTHSAIHSAIVDSDDNYTPLYLKSKEQDVRNIQQRENEKLSIWRGKELHGRHLHDLEQPHIDMEASNKWLKFGTLFPETEGFLMAIQDQVINTRNYKKFIIKDPNILTDKCRKCNRQSETIQHITSACSCLTQTDYTHRHNQICNIIHQRLAIKYNLITTKPLPYYQYNPKPVLESTNCKIYSDRAILTDRTVHHNRPDITLIDKKNSIVYIIDVAIPNTHNILKTIAEKIHKYTDLKEEIIKIWKMEKVYIVPLVLSSTGVIPKHLISALHTLDLPENTYMIMQKAAILNTCRIVRKFLQDDTPLTNTTVIPSSLG

SEQ ID NO: 19282 - protein, 1185 aa, Apodemia mormo
MKWSNEVNIFIMRTYYLITKLETDLTLYRKSLHEHFMKQYPGVNISEQRLSDQRRAIIRNKMISDEDLSKIKDDVLLELEQSQQEHVQSQLRISDCILRDTTTEVTRSQHVLPPQECVLATNNDQSTQYSPNFSDASTQTQKAPSIIPVTNLFESAPPIIVQELLDKLQASLLEYTGTDPTTRPRLPKLKYSKRLTQLISIFNEEILGNFFSIDYDIIQVHTLVYCSALVICRELGYNVKTQNPYNNSKKRFKEKPPWQIRLERDIEKLRKNIGRVTQYMQNTNRSVKLTRKVDKIFKDYEKHSTHEQNNKRPEEVLDTLKQKLSLKANRLRRYKKSMERKEDNKLFINNEKIFYRNLKQDEVKGTLQASETASEIETPTSEALKNYWTDIWKKEIDHNHTAIWIKEEEEKWQDIDEMEFKDISREEIQSATRNMKNWKAAGIDGVHSFWYKKLYKLHDILGTAITDIIKGTVNMPSFLTKGITFMIPKSANRSDPSQYRPITCLPTLYKLITSCITNQLNKHIEDNNILNEEQKGCRRNHMGCKEQLIIDSVVLKHVHKHNRNLHIAYIDYKKAFDSVPHSWLIHILKIYKVNPTIVAFLEKVMINWRTTLLLTNKSNLIRTDEISIENGIFQGDSLSPLWFCLALNPLSNQLNKLDSGYKLSSETSISHLMYMDDVKLFSRSEKGLQTLLKVTDKFSVDINMSFGLDKCKILKIIKGKIKGQNSDIIGHINFKLMEPHETYKYLGIQQNAGIQHTKIKADLGVEFFRRLNLLCNKQLNSRNLFKAINTYAIPILTYSFGVIKWTKTDINKIEIKTRTTLTKHNYLHPKSAIERATISREKGGRGLIDLKLLWEGQIQGLRRFFYVKSTHSAIHSAIVDSDDNYTPLYLKSKEQDVRNIQQRENEKLSIWRGKELHGRHLHDLEQPHIDMEASNKWLKFGTLFPETEGFLMAIQDQVINTRNYKKFIIKDPNILTDKCRKCNRQSETIQHITSACSCLTQTDYTHRHNQICNIIHQRLAIKYNLIATKPLPYYQYNPKPVLENTNCKIYSDRAILTDRTVHHNRPDITLIDKKNSIVYIIDVAIPNTHNILKTIAEKIHKYTDLKEEIIKIWKMEKVYIVPLVLSSTGVIPKHLISALHTLDLPENTYMMMQKAAILNTCRIVRKFLQDDTPLTNTTVIPSSLG

SEQ ID NO: 19283 - protein, 765 aa, Emesis poeas
MEFNDIDRKEIEKVIMKMKNWKAAGIDGVHSFWYKKLYKLHNILGTAITDIIKGIVDIPSFLTKGITFMVPKSNNTGDPSQYRPITCLPTLYKLITSCITSQLNDHIEKHNILSEEQKGCRRNHMGCKEQLIIDSVVLKHAHRHNRNLNIAYIDYKKAFDSVPHSWLIRILQIYKVNPTVITFLRNAMRSWRTTLLLTNNSNTIKTDEIPIENGIFQGDSLSPLWFCLALNPLSTQLNQLDLGYKLSTSTPISHLMYMDDIKLFSRTEKSLTTLLNTTEKFSTDVNMSFGLDKCKLLKINKGKIKERDGSNIDQFNFKLMEPNETYKYLGTQQNSGINHTKIKSDLSTEYYRRLNLLCKKQLHSKNLFKAINTYAIPVLTYSFGVIKWTKTDINRIEIKTRTSLTKHNYLHPKSAIERTTIPREKGGRGLIDLKLLWQGQIQGLKKFFYNKSPSSIIHSSIIDSDDNYTPLNLKSRQIEFSNRQQLEIEKLNIWRGKELHGRHIHELEQPHIDMEASNKWLSLGTLFPETEGFIMAIQDQVINTRNYRKYIIKDPNLVTDKCRKCNRQSETIQHITSACPYLTQTDYTHRHNQICNIIHQRLAIQYNNIAKKPLPYYQYNPKPVLENTNCKIYFDRAILTDRTVHHNRPDITLIDKKNNTVYIIDVAIPNTHNILKTITEKIHKYTDLKEEIINIWKTEKVYIIPLVLSSTGVIPKHLLSALHTLNLPKNTYMTMQKAAILNTCRIVRKFLQDDTLHTTDLTLQS

SEQ ID NO: 19284 - protein, 1183 aa, Curvie emesia
MKWTNDVNIFIMRTYYIVTKLETDLTCYRKSLHEQFMKQYPDVNVSEQRLSDQRRVIVRNKMISDENLAKLKEEVRLQLEQSNIQYQDRMMDDMSISRTINFTNIHHISLGEEPTTLTNITHRVSASPNFSDATTQTLFTSTITQETNATPPLFETTQPIIIQQLTDKLQATLIGYTGTDPISRPRLPRLKSSKKLTQLLNIFNEQILGGFLSVDSDIIQIHTLIYCTALIICKEIGYKIETNNSYKNFRKTVVSEKPSWQIRLEKDIEDLRRNIGRMTQYIKNTNRHVKLTRQVNSIFQKYEKHSTHEQNNKRPEDVLDTLKQKLALKANRLRRYKKAKERKEHNQLFINNEKIFYRNLKQNEALTVSSTATQKENETPSSEALKNYWSNVWKKGADCNQNASWIREEEEKWQDIDEMKFIDIDGKEIENITRKMKNWKAAGIDGVYGFWYKKLYILHDRLGTAITDVIKCTVDLPSFLTKGITFMVPKSTSTSDPSQFRPITCLPTLYKLITSCITSQLNRHIEENNILSEEQKGCRRKHMGCKEQLIIDSVILKHAHRNNRNLNIAYIDYKKAFDSVPHSWLIRILQIYKVNPNIITFLRSAMLNWKTTLLHTKNSRTIRCDEIPIENGIFQGDSLSPLWFCLALNPLSNQLNKLDLGYKLSTHTSISHLMYMDDIKLFSRSDNSLQTLLKTTGKLSRDVNMSFGLDKCRILKIRKGKISIHGDSNIRQLNFKLMEPNEIYKYLGTQQNTIINHTKMKTDLTLEYFRRLNLLCKKQLYSKNLFKAINTYAIPILTYSFGVIKWTKTDLNNIEIKTRTTLTRHNYLHPKSAIERTTTSREKGGRGLIDIKLLWQAQIQGLREFFYMKSTTSPIHSTVIDSDDNYTPLNLKSRQLEFSSRQQIENEKLRNWRSKELHGRHLHDLEQSHIDTEASNKWLKLGILFPETEGFLIAIQDQVINTRNYKKFIIKDPNLITDKCRKCNRQSETIQHITSACPYLTQTDYTHRHNQICNIIHQKLAIKHNLITTKLLPYYQYNPKPVLENTNYKLYFDRAILTDRTVHHNRPDITLIDKKNSKVYIIDVAIPNTHNLIKTITEKNHKYTDLKEEIINLWKMEKVYIVPLVLSSTGVIPKHLLSALRTIDLPESTYMTMQKAAILNTCRIVRKFLQDDTLHTTYPTHES

SEQ ID NO: 19285 - protein, 1282 aa, Apodemia zela
METRSKIKRKKSLPGGDRRGAPGADAGCLSMRTVSGEELNRRAPTGSSEHVTADDNDEYDRQMDIYTPTSNSMDSTQFSRPSSVVPASSVTQEANAFQPVSTKVGKPRVRMKWNTDVNIFIMRTYYLVTKLETDLTCYRKSLHEQFVKQYPGVNVTEQRLSDQKRVIIRNKMISDEDLTKIREDVRLELEQTHTHSQARISDYVLRNTTTHLTGSQFIPLQEESILSTNNTQRTSNSPDFSDATTQTLITPSIIPETTVSETTSPTIVQELSNKLQTALTEYSGTDPTARPRLPRLKSSKRLTQFINIFNEEILGSFFSIDSDIIQVHTLIYCCALIISKELGYKIETKNLHHCSKKIIKEKPAWQIRLERDIEELRRNIGRVTQYIGNINRSTKLTREVNKIFKKYEKHSTHEQNNRRPSEVLDTLKQKLSLKANRLRRYKKALQRKEDNKLFANNEKIFYRYLKQNESTALQYTEAEREKEIPTSEALKNYWTDIWKKETEHNHNASWIKAEEEKWQDIDEMEFRDIDRKEIENVIKKMKNWKAAGIDGVYGFWYKKLHRLHDILGTAITDIIRSTVDMPRFLTKGVTFMVPKSTNTGDPSQYRPITCLPTLYKLITSCITNQLNRHIEENNILSEEQKGCRRNHMGCKEQLIIDSVILKHAHRHKRNLNIAYIDYKKAFDSVPHSWLIRILQIYKVNPTIITFLGSAMVNWRTTLLLTNNSSTIRSDEIPIENGIFQGDSLSPLWFCLALNPLSNQLNKLDSGYKLSTSTSISHLMYMDDIKLFSRSEKALQTLLQTTDKFSIDINMSFGLDKCRILKINKGNIKGHSDSSITQPNFNLMEPNETYKYLGTQQNAGINHTKIKADLTLEYFRRLNLLCKKQLHSKNLFKAINTYAIPILTYSFGVIKWTRTDINKIETKTRTTLTKHNYLHPKSAIERAMIPREKGGRGLIDLNLLWQGQIQGLRRFFYDKSTYSAIHSTVIDSDDNYTPLHLKSREQEFSNRQQRENEKLHIWRGKELHGRHLHDLEQPHVDMEASNKWLRLGTLFPETEGFLLAIQDQVINTRNYKKFIIKDPNLITDKCRKCNRQSETIQHITSACPNLTQTDYTHRHNQICNIIHQKLAIKHNLITTKPLPYYQYNPKPVLENTDCKIYFDRAILTDRTVHHNRPDITLIDKKNSIVYIIDIAIPNTHNILKTVTEKIHKYTDLKEEILNMWKMEKVYIVPLVLSSTGVIPKQLLSALRTIDLPENTYIMMQKAAILNTCRIVRKFLQDDTPLIK

SEQ ID NO: 19286 - protein, 1563 aa, Brachyptera putata
MDQISAYYYLPHSQNHWLCQFCDLKLESAPAILKHLRVSHFRILFFKCSLCPHTPKFDTPAKASAHFGFAHRSVVCFPTKTTVAPERPVTSGPPPHTSDREAAGAVTPSTAETIGEEGRAVRPTTRLRQQQQNVVAIPSNTITRLSLSSSSSSRTSTDSDRLVIDLDSSAESPNNRLIIDLDTNELMDGKGRPLEPPVPPRPTESVIVSASPMASTPNPAPKQQSPSLTRAGRLIRPIPYIRPFKIRDAFGSPEPSPVTRAVSPVQAPIPPIEDLNKTRKPYPIRSFSRGPRLNLYPDPPASTGTRDSPKPGSTRTGQVSLPVQAQYSDVVSDRRLFTNASLVWENKHLDDINSFVPRQDPQIEVLGSPPNIDVTPPPNSLETEHLTPGQNMARSHQPKSGRSPRKLDSSSNIRRARETGVDGYQLVQYRHKLNPRVAKADTTILAAAQRLDVTVTHAETPRTRQPPIPQPRQPPRLRTPVTPPRPPPVIPITPPPPQVNPPVHPRSPRPNRDFEARKKAARKERNAQWSLRLTNAVDVSWDSFEEALAAITVEMKDSLKRQDRVLDGNQANVYNPHLEQNQQPGNDRVLGTGAQRGRGGHRGRGLPRAADNNRPALHQQPMQAPDEPGANGAGGNRGRGGAARGRRPRGGRGGRGGRGRANGPPAAGVEPAPRNLPLHDRPAGMRPRYSAVEASKAQKQYNASKKTAFQEIMGGQSPFCQLEPEVVFNHFQQVFGENGYEWTEPPGIIGDLTTIVERDDILLKEISAIEIAKRLGKAKNTAPGPDYIKYKDLKSIDPDCDLLSDIFNICLDNKRIPASWKESRTVLIYKKGERDDLTNWRPLTLGCTMAKLYAGVTADRLTLWSKHNGIISPMQKGFMEFEGCLEHNFVIQQMLDSTRRRGTSELCLAWLDLANAFGSVPHEHIQGTLRTFNVPEEIRDIVADMYRGASTKVRTNSGYTENIEMKAGVKQGCPLSPILFNIAMEPLIRSITIRAERLGADLLGTKIGILAYADDLVLSTKDDVTMTAALAIVSEVAGWAGLRFKPPKCATLHIKRKRVLPSVFQIQEEDMVALADGEHYQHLGVPTGVRVAQTPVAEVEKMIADLVKVDDSLLTPWQKLDAVRTFLLPRLEFIMRGGAMQKTLLRPFDNAVKRKAKKWLHLPNRASPEVVFLPTYEGGAGILPICDSADVLAVTHPFRLLTCIDPFCRDLAEKSLRDVVSRKLTTEATPQECCKYLSGCEEGRYGRADGQISSIWTRARTASRRLAKKIRCEEDLWEFNAERGGYHMRIPLPGKPVDPAILAPRDRGLVAKLLRQSVRLSYKASLLAKPDQGKAWILTSKWDASNHFMGTGRNTRFADWRFIHRARLDCVPLNATKRFGRGAKACRICQFNLETLPHVLGHCWHHSTAIQHRHNNIQDRLVKAIPSFVKNLGAIQVNKRTPENIDQLRPDIILRNERDRTVHIIDITCPFENGANAFVAARNHKLAKYQGTADGFRARGYTVKVDAFIVGALGGWDPLNEGVLRALSISPKYASKMRCFMVSDTIKWSRDIYVEHVTGRRQY

SEQ ID NO: 19287 - protein, 978 aa, Brachyptera putata
MKDSLKRQDRVLDGNQANVYNPHLEQNQQPGNDRVLGTGAQRGRRGHRGRGLPRAADNNRPALHQQPMQAPDEPGANGAGGNRGRGGAARGRRPRGGRGGRGRANGPPAAGVEPAPRNLPLHDRPAGMRPRYSAVEASKAQKQYNASKKTAFQEIMGGQSLFCQLEPEVVFNHFQQVFGEKGYEWTELPGIIGDLTTIVERDDILLKEMSANEIAKRLGKAKNTAPGPDFIEYKDLKSIDFDCDLLSDIFNICLDNKRIPASWKESRTVLIYKKGERDDLTNWRPLTLGCTMAKLYAGVTADRLTLWSKHNGIISPMQKGFMEFEGCLEHNFVIQQMLDSTRRRGTFELCLAWLDLANAFGSVPHEHIQGTLRTFNVPEEIRDIVADMYRGASTKVRTNSGYTENIEMKAGVKQGCPLSPILFNIAMRPLIRSITIRAERLGADLLGTKIGILAYADDLVLSTKDDVTMTAALAIVSEVAGWAGLRFKPPKCATLHIKRKRVLPSVFQIQEEDMVALADGEHYQHLGVPTGVRVAQTPVAEVEKMIADLVKVDDSLLTPWQKLDAVRTFLLPRLEFIMRGGAMQKTLLRPFDNAVKRKAKKWLHLPNRASPEVVFLPTYEGGAGILPICDSADVLAVTHPFRLLTCIDPFCRDLAEKSLRDVVSRKLTTEATPQECCKYLSGCEEGRYGRADGQISSIWTRARTASRRLAKKIRCEEDLWEFNAERGGYHMRISLPGKPVDPAILAPRDRGLVAKLLRQSVRLSYKASLLAKPDQGKAWILTSKWDASNHFMGTGRNTRFADWRFIHRARLDCVPLNATKRFGRGAKACRICQFNLETLPHVLGHCWHHSTAIQHRHNNIQDRLVKAIPSFVKNLGAIQVNKRTPENIDQLRPDIILRNERDRTVHIIDITCPFENGANAFVAARNHKLAKYQGTADGCDDPIFDHPTTICSWYEILFALLYSVKTFRQNMNRSLYLC

SEQ ID NO: 19288 - protein, 1023 aa, Nomada fabriciana
MEQQGGEPSGSAVPTLSSSSSRSGHVGLLDPIRPPEAEVICRFPGCGRCFGKAAGRSLHERRAHPDFYDQLVRKDVVKARWNTEENSLLARKEAELQLLGTRFINQELIKFFPQRTVDSIKSHRKQQQYKLLVQQYISESTSSERVEVSTVQTGIAGIDYDGLIVEHLESLEPLNTRAFGAATLIGICESLRHTTKQGVIERLALYLRGVFLCMRPLRRDRDPIPVDQPRSSRRNERRAEYARTQDLWRRNPMRCLRALLKDHQLSSTPSKEAMVPYWEELLARTSDACPDAAECVPVKSCLWAPICANEVKSAFPGLNTATGPDGITVRLLRSVPFGILERILNILLWCGKLPEHLKESTSSLIPKKADPEGPGDFRPISVSSVLVRVFHKILARRLMANIPLDLRQRAFRQTDGCSDNIFLLDLVLRFHHANKKPLYMASLDVAKAFDSVSHLAIGQTLELYGAPGPLTEYIRDLYATSATRLVCGSWSSHLIRPRRGVKQGDPLSPFLFNLVIDRLWKRIPSEIGVDIGGLCINGAAYADDLFLLASTRVGLQELLNITTQYLSECGMDVNISKSMTVSIIPVPHEKKVTVDSNSTFECGGLSILALKRSDEWRYLGIPFTPEGRLAVDMVGKLTSMLEGLTKAPLKPQQRLFGLRVMVLPSLYHLLSLGAVRIGVLNKVDRTVRKHVRKWLCLPHDASNAYFHAAIGDGGLGIPSMRWEIPRQRLARLARLPLSVEAQRTATAHYLAKEVAQAEGRLNIDGVVLRTTEALKRLWAFRLYKSVDGAALRESGKTPQQHRWVADGSRFLSGRDFINLCRLRINALPTRSRTARGRMQDRRCRAGCLEQETLNHVLQVCHRTHAARIRRHNAIGSYIAKKMKENCSQVDEEPRFQTADGLRKPDIIAKTSTGEAIVVDVQVVSEQTDLNRAHKRKADYYRMNRSLRNEILHRYNATTVVFETVTVSCRGVWSSHSAEGLMLRKIIKTSELKVISTRAMIGGLLAFRMFNATTNMLWRRTGIG

SEQ ID NO: 19289 - protein, 1123 aa, Coccinella septempunctata
MGNGRRSLGVSVNHPAPRLRQDGRTRWTRDENYTVMRAHYIAMDLAERTDKTYRQLLVDVWHDMRPDRQVYAQLISNRVRWILNGQKFSAAELETIRATCSPCVQTGEQMTQQDETRRSSPRVRRSLLFTERRPTHELEESFLENLLKYSGVEPSSRPRIPRLKYSREAMWSVQSLNSVLPRHLENVSNLEGLVDIVYAGAVTISEMNGNKVGPSPEVRMRKQLSIPPWKDRLQKKISNMRKKIGIMHTYLNTPNPSTKVIRAVRRIASEFHIRRRDPSFRDKVHLRCDCLKQKIKVLGSRIHRYNERVKRYASNRLFYTNQKQFFRSLEGNEDTDLAHLEVKQAHQYWSNIWSEKTTHDAKAYWIDEARSKIPGARMPDIVIEVADIVDALRRSKNWAAPGVDKIQNYWYKYFTSIHQPLQQFFRSALADPSIIPTFFTKGITHLISKGDDPADPKNYRPITCLPTVYKIFTSILTKYTNEHLRRHGLMAREQNGCRARSKGCKELLVSDCILTKQARKRLRNISVAWVDYQKAFDSVPHSWLLEVLRMHGVAENIIKILSHLMKSWRTTLLVKDGSHTEESEMVYIYRGIFQGDSFSPLWFCLALNPLSLLLNNTKYGYVINKRRKITITHYLYMDDLKLYAANQDELRGLLETVRAFSDSIGMKMGTDKCAVLEVRRGKIQNAGQATTLMTNLAIPNLNTNDTYKYLGIRQALEIDVSAMKRSFKEKLLGRINLLLKSGLNSKSLFTAINIWAMPCMTYSFGVLTWSTTELRDLDRAVRSALTRCGILHPHSSTIKLYLPRHQGGRGLLNIEATHRRDVESLRKYFYKNNSPLSQALCEADENISARQLPPIKTTEELISEWKSKALHGRYPSHLENTNVNKLETMEYLRAGYLFPETEGRIIAIQDQVMPTRMYLKHIAKKDIPSDRCRKCLQAPESIQHMTSSCSIMAPREYLERHNAMAKLYHQQIALRYGLIQDEVEQHLYLPKTLLENDKFKLYWDATMITSQGVAHNRPDITIFDKEKNLCLMLDVTIPADENIARAYTEKLSKYGDLAFQLKELHKLKSVSVLPLIISTNGLVEKHLVENTERLGLNKKLVSHAQKQVILQTVRIVRKFLQSS

SEQ ID NO: 19290 - protein, 1190 aa, Adalia bipunctata
MDYLLYYAPITRSRYQGSEESQAGSSRNCQDDRPVGGTCGASGAPLRDGTVRPTPVPVIGNGRRSLGVSETHSAPRPRQDGRTRWTRNENYTVMRAHYIAVDLAERTDKTYRQLLVDIWHDMRPDRPVYAQLISNRVRWILRGQKFTTAELETIKTTCSPCIVTDEQVNVSQRDESRRSSPRVRRSLLFAERRPTDELEESFVVNLLKYSGVDPASRPRIPRLRGSRDVMTSVQSLDSVLPVHLGNVINLEGLVDVVYAGAITICEMNGHKIGPSPENCMKTQHSIPAWKNRLQNKISDMRKKIGIMHTYLNTPDPSRKVIKAVRRIASEFRIRRRDPSFREKVHVSCDYLKQKIKVLGSRIHRYNERVKRSTNNRLFFINQKQFFRNLEGSENTELAQLKVKHAHQYWSNIWSEKTTHDVKACWIDEARSKIPRVQMADIVIDVADIVEAVKKSKNWAAPGVDKIQNYWWKYFTSTHRPLQEFLQGALTDPSIIPEFFTRGLTHLIAKGDDLTNPKNYRPITCLPTVYKIFTSILTKHTNEHMRRHGLMAHEQGGCRVKTNGCKELLISDYILTKQARKRLRNISVAWVDYQKAFDSVPHSWLLEVMRMHGVAENIVEILKHLMRTWRTTLLVKNGSRTEESEQVSVRRGIFQGDSLSPLWFCLALNPLSIFLNNTNCGYVIDKRRKITITHHLYMDDLKLYAANQSELRGLLETVRAFSDSVGMRVGTDKCAVLEVRRGKIQNTGHQTTLMTNLTIRNLNNDDTYKYLGIRQALEINVPAMKQFFRERLLGRINLLLKSGLNSKSLFTAINILAIPCMTYSFGVLTWSTTELRELDRAVRAALTRRGTHHPHSSTIRLYLPRHQGGRGLLNIEATHLREIESLRRQFYKNNSPLFQALCEADGNISALNLAQRNQQLPPIKTTEELTSEWKSKALHGRYPGHLEKNDISKLETLEYLRAGYLFPETEGRLIAIQDQVMPTRMYLKHIAKKDLPSDRCRKCLTAPESIQHITSSCSIMAPRDYLERHNAMAKLYHQQLAIRFGLIHDEVEQHLYQPQTLLENDQFRLYWDAVMLTALGVTHNRPDITIFDKEKNTCLLLDVTIPADENIARAYTEKLSKYGDLAFQLKELHKLSSARILPLIISVNGLVERHLVENTERLGLDKKLVSHAQKQVILYTVRIVRKFLQSP

SEQ ID NO: 19291 - protein, 1190 aa, Adalia bipunctata
MDYLLYYAPITRSRYQGSGESRAGSSRNCQDDRPVGGTCGASGAPLRDGTVRPTPVPVIGNGRRSLGVSETHSAPRPRQDGRTRWTRNENYTVMRAHYIAVDLAERTDKTYRQLLVDIWHDMRPDRPVYAQLISNRVRWILRGQKFTTAELETIKTTCSPCIVSDEQVNVSQRDESRRSSPRVRRSLLFAERRPTDELEESFVVNLLKYSGVDPASRPRIPRLRGSRDVMTSVQSLDSVLPVHLGNVINLEGLVDVVYAGAITICEMNGHKIGPSPENCMKTQHSIPPWKNRLQNKISVMRKKIGIMHTYLNTPDPSRKVIKAVRRIASEFRIRRRDPSFREKVHVSCDYLKQKIKVLGSRIHSYNERVKRSTNNRLFFINQKQFFRNLEGSENTELAQLKVKHAHQYWSNIWSEKTTHDVKACWIDEARSKIPRVQMADIVIDVADIVEAVKKSKNWAAPGVDKIQNCWWKYFTSTHRPLQEFLQGALTDPSIIPEFFTRGLTHLIAKGDDLTNPKNYRPITCLPTVYKIFTSILTKHTNEHLRRHGLMAHEQGGCRVKTNGCKELLISDYILTKQARKRLRNISVAWVDYQKAFDSVPHSWLLEVLRMHGVAENIVEILKHLMRTWRTTLLVKNGSRTEESEQVSVCCGIFQGDSLSPLWFCLVLNPLSILLNNTNCGYVIDKRRKITITHHLYMDDLKLYAANQSELRGLLETVRAFSDSVGMRVGTDKCAVLEVRRGKIQNTGHQTTLMTNLTIRNLNNDDTYKYLGIRQALEINVPAMKQFFRERLLGRINLLLKSGLNSKSLFTAINIWAIPCMTYSFGVLTWSTTELRELDRAVRAALTRRGTHHPHSSTIRLYLPRHQGGRGLLNIEATHLREIESLRRQFYKNNSPLFQALCEADGNISALNLAQRNQQLPPIKTTEELTSEWKSKALHGRYPGHLEKNDISKLETLEYLRAGYLFPETEGRLIAIQDQVMPTRMYLKHIAKKDLPSDRCRKCLTAPESIQHITSSCSIMAPRDYLERHNAMAKLYHQQLAIRFGLIHDEVEQHLYQPQTLLENDQFRLYWDAAMLTALGVTHNRPDITIFDKEKNTCLLLDVTIPADENIARAYTEKLSKYGDLAFQLKELHKLSSARILPLIISVNGLVERHLVENTERLGLDKKLVSHAQKQVILHTVRIVRKFLQSP

SEQ ID NO: 19292 - protein, 1130 aa, Coccinella septempunctata
MGNGRRSLGVSVNHPAPRLRQDGRTRWTRDENYTVMRAHYIAMDLAERTDKTYRQLLVDVWHDMRPDRQVYAQLISNRVRWILNGQKFSAAELETIRATCSPCVQTGEQMTQQDETRRSSPRVRRSLLFTEGGPTDELEESFLENLLKYSGVEPSSRPRIPRLKYSREAMWSVQSLNSVLPRHLENVSNLEGLVDIVYAGAVTISEMNGSKVGPSPEVRMRKQLSIPPWKDRLQKKISNMRKKIGIMHTYLNTPNPSTKVIRAVRRIASEFHIRRRDPSFRDKVHLRCDCLKQKIKVLGSRIHRYNERVKRYASNRLFYTNQKQFFRSLEGNEDTELAHLEVKQAHQYWSSIWSEKTTHDAKAYWIDEARSKIPGARMPDIVIEVADIVDALRRSKNWAAPGVDKIQNYWYKYFTSIHQPLQQFFRSALADPSIIPTFFTKGITHLISKGDDPADPKNYRPITCLPTVYKIFTSILTKYTNEHLRRHGLMAREQNGCRARSKGCKELLVSDCILTKQARKRLRNISVAWVDYQKAFDSVPHSWLLEVLRMHGVAENIIKILSHLMKSWRTTLLVKDGSHTEESEMVYIYRGIFQGDSFSPLWFCLALNPLSLLLNNTKYGYVINKRRKITITHYLYMDDLKLYAANQDELRGLLETVRAFSDSIGMKMGTDKCAVLEVRRGKIQNAGQATTLMTNLAIPNLNTNDTYKYLGIRQALEIDVSAMKRSFKEKLLGRINLLLKSGLNSKSLFTAINIWAMPCMTYSFGVLTWSTTELRDLDRAVRSALTRCGIHHPHSSTIRLYLPRHQGGRGLLNIEATHRRDVESLRKYFYANNSPLSQALCEADENISALNLAQRDHQLPPIKTTEELISEWKSKALHGRYPSHLENTNVNKLETMEYLRAGYLFPETEGRIIAIQDQVMPTRMYLKHIAKKDIPSDRCRKCLQAPESIQHMTSSCSIMAPREYLERHNAMAKLYHQQIALRYGLIQDEVEQHLYLPKTLLENDKFKLYWDATMFTSQGVAHNRPDITIFDKEKNLCLMLDVTIPADENIARAYTEKLSKYGDLAFQLKELHKLKSVSVLPLIISTNGLVEKHLVENTERLGLNRKLVSHAQKQVILQTVRIVRKFLQSS

SEQ ID NO: 19293 - protein, 924 aa, Coccinella septempunctata
MNGNKVGPSPEVRMRKQLSIPPWKDRLQKKISNMRKKIGIMHTYLNTPNPSTKVIRAVRRIASEFHIRRRDPSFRDKVHLRCDCLKQKIKVLGSRIHRYNERVKRYASNRLFYTNQKQFFRSLEGNEDTDLAHLEVKQAHQYWSNIWSEKTTHDAKAYWIDEARSKIPGARMPDIVIEVADIVDALRRSKNWAAPGVDKIQNYWYKYFTSIHQPLQQFFRSALADPSIIPTFFTKGITHLISKGDDPADPKNYRPITCLPTVYKIFTSILTKYTNEHLGRHGLMAREQNGCRARSKGCKELLVSDCILTKQARKRLRNISVAWVDYQKAFDSVPHSWLLEVLRMHGVAENIIKILSHLMKSWRTTLLVKDGSHTEESEMVYIYRGIFQGDSFSPLWFCLALNPLSLLLNNTKYGYVINKRRKITITHYLYMDDLKLYAANQDELRGLLETVRAFSDSIGMKMGTDKCAVLEVRRGKIQNAGQATTLMTNLAIPNLNTNDTYKYLGIRQALEIDVSAMKRSFKEKLLGRINLLLKSGLNSKSLFTAINIWAMPCMTYSFGVLTWSTTELRDLDRAVRSALTRCGIHHPHSSTIRLYLPRHQGGRGLLNIEATHRRDVESLRKYFYKNNSPLSQALCEADENISALNLAQRDHQLPPIKTTEELISEWKSKALHGRYPSHLENTNVNKLETMEYLRAGYLFPETEGRIIAIQDQVMPTRMYLKHIAKKDIPSDRCRKCLQAPESIQHMTSSCSIMAPREYLERHNAMAKLYHQQIALRYGLIQDEVEQHLYLPKTLLENDKFKLYWDATMITSQGVAHNRPDITIFDKEKNLCLMLDVTIPADENIARAYTEKLSKYGDLAFQLKELHKLKSVSVLPLIISTNGLVEKHLVENTERLGLNKKLVSHAQKQVILQTVRIVRKFLQSS

SEQ ID NO: 19294 - protein, 1053 aa, Lophius piscatorius
MELHNSGELSSQHEIHKDIGRHYGEFAVFIKEKYSNWSKTEITDECLQEMSEFHIHDLFNNIEDTDMNDHLYTEEIQETSMSFLSQTIMENIKVNTAVEQDSSMLIREMIQPQEPTNSTEEEDEPNLTRTVPTADKTCLETIGEYLKKQWNDDRSINMEERYSNFILMAKEGAEQVNLLLKPRRIQRQESERHHLEPTDEEKARKLRSLYRLNRKRCYLNIVNEAPKWCQLTAEEIKSKFETPNMPATLPSEDQMINDRLIRFTIEDVSNTIKRSKMDGAPGTDGIYNKFWKKLPNAAGILTRVFNDILDNGKLPKDWTLCRLILLPKVDNPNKMSTDEYRPISVTQTLYRLFMSTLNRKIRPDVELSRNQKGFKESDGCTEHSFILQEVLDSIRRDCKPACLCWIDLKKAFDSIPHEVLFKKMVKKGINKQVIQMMQDLYSRNTTVFTDSNNDQTSFESGKKGVRQGCPLSPLMFNIVIDDFLQECDRRDEGFELNEEKFNILAFADDIILITKSSRECQSLIGRLEEFLSTTGLEVNIKKCASLCVSYRNKKRTIYPDPYLTIKGEEVPVMTEYYKYLGTLANLESFKEEHPSLGKFKVLFEKVSASPLFPFQKLDLLRTYLIPMLDYPLKSTMLRVKDLTALDSHIRSKIKEWLRLPNCTTNHFFYSPMKSGGFGIRSLRQDYFGLHLAGALNILNSFDERIKTVSQQSLEKIVVKRTGEKEKILEYINSECPGKGNKSEIRSFLSHMRQCCKNTDLRVAMYENNQERSIDINDETLRTPPVVQLQIGYMSRIKRIRMHIQASNLMKWGQQPDQGRSLSCFQNSPVSNHFIKAGNMRPKVYKFAIAGRLNVLATMQNLKRRNVVENSKCRRCPNNYETLGHIMGGCPFNQGLYRKRHNNIQDILAEEFEKTKRWQVTINRRYEDSVPNLRPDIILMHQRAKKAAIIEVAVRYEDSLSRMEDMRAQKEAKYRNVKQDLEEKGYEVLNTPFIVGSLGCQRLESMKTLLDVWIRSKKKVHNILKRITSEVLEYSQSIWANHVSETQIETIRRR

SEQ ID NO: 19295 - protein, 1008 aa, Limacina bulimoides
MKDPKPGRNKIDWPPANSKEWARFETDVAKLLSFLDGPPTKRAIQHPKIIFEMGKERFGYKITDRKKEQHSGPSRRQKKCIELRQSINKLKKAYYEAPAEEKKAIQELQQEQLKLLRLAKRAENLRKNRKKMTRNSNNFLRQPFQFAREIINPKPKGELESSQEEVQTYLENAHSDVQKNEPLKSLDCLWEFAEPETPLKDNPPTQREFTEKLKKTRSKSASGPNGVPYLVYKRCPEVAKIMYKYLRGLWIKNQISESWKEAEGVLIPKEDGAKDISKYRTISLLNVEGKLYFAFKAKRLLDFTLANRYIDTSIQKGGIPGVSGCLEHTALLSQLIHEAKSEKKNLVITWLDISNAYGSIPHKLIRKALESAHVSKEMIKLIDVYYDNPKIRFATKQFTTEWQKLDKGIITGCTLSFVLFTLTMTWLVLSAKKETKGPKTTSGQQQENSRLFMDDLTTTTETIVQSSYLLRKLEIIFDWAGLDFKQEKCRALIIIKGIVERKEILLNGKPITLIQDKPARYLGKAYNDSLTEKEQIKQFETEVKKALKNIDSCKLPGRYKGWMIQNMLLRRIMWPLSIYNVPYSKVEEIQRLITAKLKKWLGLPKSLTVDAIYSTSNKLQLPFSSLLEEVKVSKARNLISFQEANDPCVRNANIQVDGGRKANTKLDVEDARSRLRMKDIAGIANIGREGLDLNKRQYYCKSSKRDQRTMVTEEIRKKEEETRLVRMVGLGKQGASTRWEVPERHLSQGDMLKMPDAAFKFLVKAVYDLLPTPSNKNTWFGTEEKCALCGQEGTLNHILTGCKVALAQGRYKWRHDQVLRTIACAVEDKRLDKNNNFSKTKERMHFLKEGEKPKKEDKVQKKEDSYLDSANDWKLDVDLNGRLKVPTEITTTNLRPDMMLISRQTKQVGFIELTVPNEDRIEVSGEMKRAKYEAIAIDGRQKGWRVRIWAVEVGCRGFPASSMTSFMKEIGYRGKEGKRVIEGIGQTAESASHSIWKWSQIKNWGNQT

SEQ ID NO: 19296 - protein, 1164 aa, Anastatus disparis
MAQNLLNHKTRQQHTPCLEEDRRITRSRMRNETTNMGKSPPGSVVGHDCDQPTQGVTQRKRTKWTSEINQFIYKTFLEITKMETSKDAYSSQLHQHVIERFPELQNKTVQNILDQKRQIFIKNRIDPIICKQIRQQVAAQLGIVRNNYEVSLNDTAITQQGINRVEPYTQEIFEENYIKYFGMDPTARPTLQKVIFKPSTKQIIENVNHLLCIKLNARQDLLELNTMIYIGAITVLEINQKFKPTSETRNRVQYTPAWQRRLESDILSLRKSIGKLTQYINNNNSSKMKPGKLKQVINRHKNNSNNTPHEILDLLKQKLAVKAARLRRYKKSNKRRMENRMFEMSQKSYYRHIEGSQPTEHDEQPDIDIMTKYWESIWSTEITHNEKAKWINKEKEKACKIPMMYLDDITTDEIKEMVKTLANWKSPGPDKIHNFWLKKFTAVHEQLGLNFTELLNNTQQLPDFLATGITYLLPKTKPSSSNPQKYRPITCLSTTYKLFTLIISYRIYEHLESYNILSEEQKGCRKRSQGCKEQLIIDTIITEEARKKKKDLYIGYIDYKKAFDSIPHTWLIESLKIYKINPLIISLLESIMSKWETKLSMKGPNEMQVQTKPISIRRGIFQGDSLSALWFCIALNPISNILNRTNRNKTRGYILDEGDLTINHLIYMDDLKIFAGTQQDFKSLLRDVEIFTNDIRMEFGVEKCKTNAMCKGKWERAEAHNLKKNPEETIESMNKNELYKYLGVQQDIRTAHKVGKEIATEKFNKRIKKILRSELSGYNKVKAINTYAAPVITYTFGVINWTLAELQEINRNVRKIFTKFRCHHPNSCVERFHMPRSEGGRGIINFEEAYGNQIRNLRGFFKSKSDNSQFYKTLASNDKNFTPLHLDTNTLNMTITNIEHKKQKWLQKEIHGRYLNIILQPHIDYQASHIWLTKTNIFSETEGFIFAIQDKVVATRNYKKYIIKDKTISKDECRMCNKQSENIEHILSGCTTLAPKEYTQRHDYVGRIIHQQLALRMQVIDNLLPYYQYIPQIIHETPEGKLYWNRSILTDHTVEHNRPDITFHDYKNQTIYLIDIAIPNPINIDKKYKEKVSNYTPLAEDIKETWQARSVHIVPIILGATGEIPHSLHTSLRRLNIKKNTYIQLQKIVILETCNIVQKVLNQH

SEQ ID NO: 19297 - protein, 1194 aa, Anastatus disparis
MMEDNTKHCPESPADLRWSQGAKNHRVAQNLPLITTTRRAHQTPLTEDDKRTTRSTTRKHLTRTEKSPSSSVVDHLCDQPTLEVPQRTRTKWTCEINEFIYKTFLEITKMGTCKDAFSSELHQRVIERFPELRNKSVQNILDQKRQIFTKNRINPMICKQIRQQVATQLGMAKNNTEPEITDIAPTQQEINNHDLHTNVSFEENYIKYYGMDPIARPTLKKLIFKPNTTKIINNVNNIIRLKLNTQHDLLELNTIIYIGAVTVLEINQNFKTSPEPQKKTQYIPAWQRRLEKDILDLRKNIGILTQYVNNNRSNKVKEKLKLIINKNKNNDNNTIHEVLDLLKQKLAVKAARMRRYKKSNQRRIENKMFKRSQKSFYRYLEGPQLNDKDEHPNVEEMTEYWERMWSTERTHNGKAKWINLEKKKACKIPMMYLDDIDADEFKETAKTLANWKSPGPDKIHNYWLKKFTAVHNQMSLNFMELLNDNTQQVPDFLVTGTTYLLAKTKPSSPNPEKYRPITCLSTTYKLLTLIISNRIYEHLESYNILSEEQKGCKQGSQGCKEQLIIDTIITEEARKKKKDLYIGYIDYRKAFDNIPHTWLIEILEIHKINPLIINLLKSVMSNWKTKLSIRGPNEVQVQTRPIRVRRGIFQGDSLSALWFCIALNPISSILNNTKNNKIRGYTLNRGDLTINHLIYMDDIKIFSGNQHDFNNLLKDIETFTNDIRMEFGVEKCKTNAMRKGKWEQAITYKLKKDPVKSMESMSKNELYKYLGVQQDIRTAHKKAKEEATEKLNERLKKILRSELSGYNKVKAINTYAVPVITYTFGIINWTHTDLQELNRNIRRMYTKYRCHHPNSCTERFHLPRTEGGRGIIDFEEIYSNQIKNLRGFFKSKSRSSEFHKNLSSNDNNLTPLNLDSDTLIITTTSTVDKKQKWLQKEIYGRYLNNILQPHIDYQASHTWLTKTNIFSETEGFMFAIQDKVVATRNYRKYILKDNTTESDKCRICGEQTENIEHILDGCRILAPKEYMQRHDYVGRMIHQQLAFEIQAIDNFVPYYLYIPKNVHETSKGKLYWDRKILTDHTVEHNRPDITFHSYENQTIYLIDIAIPSPINIDKKYKEKVTKYTPLAEDMKETWQARKTRIIPIIIGATGEIPYSIYRSLSELGLKKEMYIQLQKIVILESCNIVRKVLNQNQS

SEQ ID NO: 19298 - protein, 1076 aa, Aleochara bilineata
MDGIPTPKPSCECGKSFGTVRGLNAHRLRFCSRRRNASSSAENCDLCNADFSTKEGLSQHLRLRHPAEYNQRCAAGTEHKHIRWSQMEIQYMALLEAQWDGQLGFINKYLFSKLDGRPIESIKKKRQAAEYKELVNRFKTERNEGHGEDNSNLIQIAVNPPTPPILTDNLELEEISIINLPKSAPPTLGNNFDFAEENMKEKFVESVAAYHSREVLDILFSSRSDGIRAIDLLVAEIIPAKKSSPTSVRFAATEPSNILHNGSLSKRGAKRKNRTRLYKLTQTLYNKDRARLARSILDDTPLIPDCFPSKDSIQSTYESIFNAPNPSPPSSPFSGKSEVLDHEILSKINGPINKEECDQALGSLKSKAKGPDNISLRDLMSWACEKRQLCLNLMFYWAYIPDALKECRTTLIPKSKTELHDVNNWRPITVGSLLLKIFSKILLRRLSSVKLHHSQKGFTTDDGVMYNNALLDSLIKSRRKSCRPYTIISLDLRKAFDTVDHSAIEGALKAKGINGFCSRFISESYKGCTTYISCGKITSQQIALKRGVKQGDPLSAALFNLVVDRFLKSIPNDCGLCMGSERIAVMAYADDILLLAPTKREARLLLDKAHLFFKNQGMSLNPSKCHSLIVETVPGAKKLVARPESYFTVCGANIAPVTTDYFKYLGGYYNCLGAQRPTLSLFQSEITRLKKAALKPHQKFVITRTYLLPRVLARLQHLRSSKRILKRADFITRGLIKNILHLPRTTSNAYLYAGQKDGGLGLPEFSCRIPAIMHKRLENCLISAGEREFAKHAFTNAQSYFMKLSNGTIESRDSVQRQYAESLENGYCGNGIWQVGNTKKSSNWIESPPSNWSGSTYVKAVQLRGNLLPTVGIPSNPADQRKCRGGCNKVESLSHVLQSCYITHAARIARHDHTCSLLTRFAKRNGWDVIKEPKIRLSNGLLQKPDLFIIKNNNIVVCDVAIHWEGRHNLEENFNKKLNKYNNLPFLEEVQRRYPGKEIIVHPFILGARGSSAKNNAPLIKLLSIHPRDCVKMIHDVIIGSISCHSFFMKQVWNDRRKARPPSTIDTRAIRQQLPT

SEQ ID NO: 19299 - protein, 1076 aa, Aleochara bilineata
MDRLPNQEQPSCECGKSFATLRGLNAHRLRFCSRRRTASSSAEKCDLCDADFSTKEGLSQHLRLRHPAEYNQRCALGTEHKHIRWSQMEIQYMALLEAQWDGQLGFINKYLFSKLDGRPIESIKKKRQAMEYKELVNRFKTERDEGDGEDNSNQIRISVNPPTPPLPTENVELEDISILNPPKSAPPTLDNNFDFAGDDFKEKFVDAVVAYHDREVLDILFSSRPDAIRAVDLLVAEIIPTKKSVSPSLRLAPTEASHSNVVNKPMSKRGAKRLNRTRDYKLTQTFYNKDRARLARSILDDTPLIPECFPSMDSIQETYESVFASPKRSAPSSSPTCKPEVLNHEVLSEINGPINKEECEQALNSLKSKAKGPDNISLRDLLGWPCEKRLLCLNLMLYWAYIPDVLKECRTTLIPKSKTDLHDVNNWRPITVGSLLLKIFSKILLRRLSSVKIHYSQKGFTSDDGVMYNNTLLDSIIKSRRKCCRPYTIISLDLRKAFDTVDHTAIEEALKTKGISGCCSRFISESYKGCSTYISCGKSTSRKIALKRGVKQGDPLSAALFNLVIDRFLKSIPKDCGLCMGSERIAAMAYADDILLLAPTKREARLLLDKAYLFFRNQGMSINPSKCRSLIVETVPGAKKLVARPEPFFTIAGTNITPVTTDYFKYLGGYYNCLGAQRPALSLFQSEVSRLKKAPLKPHQKLAIARTYLFPRVLARLQHLRTSKRILKRADFISRGLIKTILHLPRTTSNAYLYAGQKDGGLGLPEFSCRVPAIMHKRLENCLVSAGERDFAKHAFTTAQTYFRKLSNGTIESRDSVLRRYAASLESGFCGNGIWQIGNTKRASNWIEYPPSNWSGSTYIKAIQLRGNLLPTIGIPSNPVEHRKCRGGCNKVESLSHILQSCYITHAARIARHDHTCALITRFARRNGWDVIKEPKIRLSNGLLQKPDLFIVKNDHLLVCDVAIHWEGRPNLEENFNKKLNKYNNLPFLEEVQRRYPGKEIIVHPFILGARGSSAKNNESLIKLLSIAHRDYLKIIHDVIVGSIACHSFFMKQVWSDRRRARPHTYVNNRAISQQL

SEQ ID NO: 19300 - protein, 973 aa, Aleochara bilineata
MMDSTPTPTQPCCECGKSFATIRGLNAHRLRFCSRRRTASSSAEKCDLCDADFSTREGLSQHLRLKHPTQYNQRCALGTEHKHIRWSQMEINYMALLEAQWDGQLGFINKYLFSKLDGRPIESIKKKRQAMEYKELVNRLKAEREESLGEDNANTIQISVCPPTPPILTDSPELEEFSILNPPKSAPPSLGDNFEFVDESLKEKFIESVVGYHNREVLDILFSSRSDAMKAVDLLVAEILPTKKSSPTTLRFAATEVPNPPIIEPLSNRKAKRRNRTRDYKLTQTFYNKDRARLARSILDDTPLIPDSFPSLDSIQSTYESVFASSKPTASSSTFVDQSDVADPETLSKIDGPISKEECDQALQSLKSKAKGPDNISLRGLTNWACEKRQLCLNLMFYWSYIPCALKECRTTLIPKSKNDLHDVNNWRPITVGSLLLKIFSKILLRRFSAVQIHHSQKGFTLDDGVMYNNTLLDSIIKSRRKCCRPYTIFSLDLRKAFDTVEHTAIDNSLRAKGINGLCSRFVSESYKGCTTYISCGKTTTRQIPLNRGVKQGDPLSAVLFNLVVDRFLKSIPEDCGLCMGSERIAAMAYADDILLLAPTKREARLLLDKAFVFFRDQGMSLNPSKCRSLIVETVPGAKKLVARPEPFFTISGTNITPVTTDYFKYLGGYYNCFGGQRPALSTFQTESTRLKKAPLKPHQKLTIARTYLLPRVLAKLQHLRTSKRILNRADFICRGLIKTILHLPRTTSNAFLYAAQKDGGLGLPEFSCRIPAIMHNRLENCLVSAGEREFAKHAFTTAQSYFRKLSCGIIESRDSVLRRYAESLQNGYCGNGIWQVGNTKRASNWMEFPPSNWSGSTYLKAVQLRGNLLPTVGIPSNPTDHRKCRGGCNKVESLSHVLQNCYITHATRIARHDHTCSLISRFAKRNGWDVIKEPKIRLPNGVLQNPDLLIMKDHNLIVCDVAIHWEGRLSLE

SEQ ID NO: 19301 - protein, 765 aa, Aleochara bilineata
MECIQNTYESVFASSNNTISPSLPSCKSEVLDHEVLSEVNGPISKEEFDQALNSLKSKAKGPDDISLRSLTEWSCEKQILCFNLMYFWAYIPCALKECRTTLIPKSKTDLHNVDNWRPITVGSLLLKIFSKILLRRLSSVKIHYSQKGFTSDDGVMYNNTILDSLIKSRRKCCRPYTIISLDLRKAFDTVDHCAIEDALKAKGVTGLCSRFISETYKGCNTYISCGKATSRRIALRRGVKQGDPLSAALFNLVIDRFLKSIPTNCGLCMGSERIAAMAYADDILLLAPTKREARLLLDKAHVFFRNQGMSLNPSKCYSLVVETVPGAKKLVARPEPYFSISGTNITPVTTDYFKYLGGYYNCFGAQPPALSKFETEAARLKKAPLKPNQKFAIARTYLFPRVLAKLQHLRTSKRILKRADFISRRLIKTILHLPRTTSNSFLYAAQKDGGLGLPEFSCRIPAIMHTRLENCLVSAGEREFATEAFTTAQSYFRKMSNGTIESRDSVSRRFAASLESGYCGNGIWQVGNTKGASRWIESPPSNWTGSTYVKAVQLRGNLLPTVGIPSNPPEHRKCRGGCNKVESLSHILQSCYITHSARIARHDHTCSLITRFAKRNNWDVIKEPKIRLPNGVLQKPDLLIMKEHKLIVCDVAIHWEGRINLEENFIKKLNKYNNLPFLDEVRRRYPGKEIIVHPFILGARGTSAKNNALLINLLSIRFNDYLKILHDVIIGSLSCHSFFMKQVWNDRRRTRHPNNINMRAIREQL

SEQ ID NO: 19302 - protein, 1073 aa, Aleochara bilineata
MEGTSVSSQTSCECGKSFATVRGLNAHRLRFCARRRIASTSAEQCDLCDANFSTKEGLTQHVRLKHPAIYNQRCASGTEHKHIRWSQMEINYMALLEAQWDGQLGFINKYLVSKMDGRPLESIKKKRQTVDYKDLVNRLKTERAESHGEDNSNPIQISVNPPSPPILTDNPEFEEISIVSPPKSAPPALGDTFEFGDECLKEAFIEPLVQYHNREVLEILFRSRCDAIKAIDLLVAEIIPSKKSASKTPHSTEPPNSSAHGSLSKRGAKRLNRTRDYKLTQTLYVKDRARLARHILDDTPLIPECFPTSDAIQRTYESVFACPEHSVSSATTIPDSETLSNDILSNINGPISRDEYNQALNSLKSRSKGPDHISLRDLQNWACEKQQLCFNLMFYWAYVPSAIKECRTTLIPKSKTDLHDVNNWRPITVGSLLLKVFSKILVRRLSPVKIHHSQKGFTSDDGVMYNNTLLDSIIKSRRKCCRPYTIISLDLRKAFDTVDHTAIENALKAKGINGLCSRFINESYRGCATCVSCGKHSSQRIPLRRGVKQGDPLSAALFNLVIDRFLKTIPADCGLSMGSERIAAMAYADDILLLAPTKREARLLLDKAYFFFKDQGMSLNASKCHSLVVETVPGAKKLVARPDSYFSISGTNIAPVTTEYFKYLGGYYNCFGSRRPVLSTFETEATRLKKAPLKPYQKLTILRTYLFPRVLAQLQHLRVSKRILKRADYIGRGLIKTILHLPRTTSNSFLYAAQKDGGLGLPEFTCKIPAIMHKRLENCLVSAGDREFATHAFTTSQSYFRKMSNGTIESRDSVLRRYAASLESGYCGNGLWQVGNTKKASNWIEQPPSNWSGSTYIKAVQLRGNLLPSVGIPSNPAEYRKCRGGCNKVESLSHILQSCYVTHASRIARHDRTCALLTKFARRNGWEVIKEPKIRLPNGLLLKPDLFIIKNDNLIVCDVAIHWEGRLNLEVNFNKKLNKYNNLPFLDEVRRRHPGKEVVVHPFILGTRGSAAKNNAPLLNMLSIKPNDNLKILHDVIIGSIICHSFFMKQVWRGRRTTRLQQNIHILAIRQPL

SEQ ID NO: 19303 - protein, 988 aa, Blattella germanica
MILSTDEESITPINTSVSTNTEISSVASEVPCPHCGKFFVNSRGISIHISKSHPDLHRLKLVERQTTSSYTIWNSGESSSTCKTSINDTPSKSHPVSVNDPLSNYKQQLLTWTTKFDCDLTDIDFDTLTNNFLQFLSEAIYYLPGPKHPARKYYALRKKNKNFNCQQSYKNSSNPDRATKRDRAKRKQKYQYEQTQFDYYNQRRKAVRRVLTSDKPSCQIAVDKVYAHFNSYFSRPNNCIRPDYISHVTEVERVELNDSFPTHITKEEIKFAISRIAVDTAPGPDHVLMRVLKDDAATGVLSLLATRMLRTGHVPPCLLIARSILIHKSGDVNDITNYRPITICSVVRRVIERTLDRRLKEYVSFNRHQRGFTSSPGTLMNTSLLRSILTSAKTKKCNATLVFLDIRKAFDNVGHLHLQKTLESLPIPSLLSNLILNLQENNHTRFEINHHKTNLVPLARGVMQGSPLSPTLYNLSTDHILNELSEDGVAKAYGYQLVPGLKPVTVLGFADDTVIVANSTTSALELTKMAIERFRSIGLEINFSKSVAINISCGKLNPNYSLLVAENATIPCLGPNEFVRYLGVNFADACLFDSQVTLNDLKNKLDLLISSPLLNPDQKFCILNSSICPSLIYTFQTTPLNKIPNKFIEAADKIIKSGLKEILQLPADIPDSMIYTHRKFKGLGLFRVKWESALQHINSLRILHRANDAYISSTRNLYDESKHCLTELKLKFSDSLLNKHDNFLDSRKIRETLRDREFNTWCSLQSKGRGVILFKEFPPCNQWITNHEGLSSSEWKDAIKMVGGVAPVRAVPGRSRDTNRCRRCLNEIETLAHVLGSCPHGENLRNIRHHTIRSILAAALRDVGFIVHEEVQGLATQGSIRRIDIIAIRNNTAYILDPTIRTETHAEQPREVDMEKRAIYEPTIPYYKEKYHLSTIEVVGLMVGARGTIPSHFAEICKRLGLSSFIIKSIAVSALKGSILLLRHHLYG

SEQ ID NO: 19304 - protein, 949 aa, Periplaneta americana
MFLKFNIHISKSHPDIHRERLIRKQPRCSTTVWKNNSNNLTNNSENHSTANTSPLSFYKQNLSTWKDKFSAQLSDNVFDDVTQQFLIFLSEAIDYLPGPKHPTRKYYEARKLKKNLNNQRTYSRSTNPERATKRDRQKRKNRFLYEKTQFDYFNQRRKAIRTVLSQNKPTCKLDVSEMQQLYSSNFSQPNNNIRSEYPSHYTEAEILELDETFQKSITKSEVALSISRIAVDTAPGPDHVLMRVLKDDTAAEIISSIATRMLHIGHVPPCFQTARSVLLYNSGDENDFKNWRPITICSVLRRVIECVLDKCLREYIKFNPHQRGFTHSPGTIVNTSLLRSILMSAKSKKCDATLVFLDISKAFDNIGHLHLSNTLDSLLIPSLLKTLILNLQLNNSTRVEINHKKTNPIDLRKGVMQGSPLSPALYNLCTDHILNELSEDSIAAEYGFNLVSGLKPITVLGFADDTVIIAKNKNSALELTRMAIDRFKAIGLDINVNKSVAINISRGKLHPNQLNISDDTTVTCLTANEHVRYLGVNFSDVCIFDSQTVLNDLKTRLDLLISSPLLHPDQKFCILNSSICPSLIYTFQTMPLKTIPNTFLDNADKIIKSTLKEILQLPADTPDSMIYTHRKYKGLGLFRVRWESTLQHINGLRVLHKTNDPYITSTRDLIEESKTCLKSLKLTPANSFLNNRENFVDSRKVRDALREKEFENWCTLQQKGKGVILNKEFPPANSWIRNHKGLTLSEWIDALKMVGYVAPVRAVPGRSRDGTRCRRCLSEIETLPHILGFCPYSEALRNIRHHAVRSMLAEALKEVGFTVHQEVQGLATQGSVRRIDIIASKNNSAYILDPTIRFETHADQPHEVDSEKKRIYEPTIPFCKDKYSLSHIDVIGLMVGARGTISSFFANKCKNLGLTHSIVKEIAISGLKGSIQILRNHLYGSDNGNFKLS

SEQ ID NO: 19305 - protein, 1475 aa, Sardina pilchardus
MPFPTTVYDAFTDDWPNLPDPPTLSIKKEPDSQLINDFLAEQKDKTFQEPPPPNSLNEPIILDENYKSITPPHITPASPTFQLGPMDLNFLGIKDNENEPDVHIMGKALNSQDIIKIGEICERLAHQHSQTSQEPLPTINEAPNTILPQFIPEITILPPHKMLSPVESALKPKKTKKPTKQLPKNPSPIIIDDVDDSQQIIIDSLLKDALNKHVAPFKPPKRNLPKKAGTNVFKRPSPNVLNLSNPSQSGENIQKFNPKRAISKATSKSIPPSKSTPHSNDPSQQSPPTSQDFAKPPPRLKNCRVTEDEDILELNEDLEINPNQQNTETPPNNSTLDDDEASQQQPNYPDLYAEKEKFSEKASAMVDEQVAVLCKFNDAPLDELYDNFINLATTQAQSLKMFYIPKRNQQKFNPGAPNKNARSHRNTRNSQNPTLNPNYVPNPAQPTSNDPPENPDLIPINNFNPTHKSAQFYHQDTKDSEYHLQIDNPNPSNVPQNTNNNLPPTDANKANEEPITGFYSTEAKRLRSLYKLNRKACFRTITESKPVWCTLSANSVAESLTRPPPIIPDHFDYESTEIPYPETPEELPPVIPSQDSTFNLSQNSTISQSSLPTRPPETPQITHQTNNSTEILAPEPPIQGFATDSDEFEQNESDLVQDPPQQPSQQQQNQQPNIYQSTIPTNHFEISNGEILTVTARAKSDTSNGPDGIAMNFWKKIPNIDIPLRILFNKIIAAGRVPSKWLNSRLILIPKVDSPNTESTNDYRPICVTDCLYRIFMSVINMKVAPKIELSNDQKGFQMGEGCTEHSFLLQQALDNHRVNRKDLFVVWLDLQKAFDSVPHWALFRRLMYYNVDPKVVSIIHHLYRNAYNTITDGTGATARQPMNDRGVRQGCPLSPLLFNMVVEALLTLINQHEWGFNVGGDSKIAALAYADDLVLVADKHSDLQGMLDIVQQFLESFDMHANISKCRSLKATYKNGRRIMNNAKFQSPLTLNNYEIPNLQANQFYKYLGTDKNLSSFQNLSNHTTSFISCLEKLSDSHLLPYMKLNMLKIYIIPKLDYLLKTNQLRIESLKSLNNSMTAHVRKWFWLPKTANTAFMYTPTKLGGLGIRNLVKDYQALRIAGALKLLSSPDERVQTTSKSQLQKVFELRKSHPSQTPIDFLNSDGPLQNPVRDVRSIFTNLRKYRKNLQIQFQNPSNDPLNIRLNPNDLQSPPCLFSIPNTQVITNIKRLRWHLQSQSFQKWKSYLDQGKTVHSFSTDKCANAWISNGIIKASSARFALQARLNVTPCKLSLFKIKKSPDTTCRRCSATIESLGHILNGCTSNTRHITNRHNKVVNLITPKIKLGKDWTVVTEIPILTKTSKRRPDILLLNPSKKKAAIVDITVPFESSPDRLEEVRKGKVDKYLLEKELMQQEGFETTNYGLVFGSLGSHLHANNHVFKLLGISKRTGQLLKKSITKTILEESHAIFKVHTRSA

SEQ ID NO: 19306 - protein, 828 aa, Machilis hrabei
MDPLRTQVVDLFQNLSLERAYQFWLSLVPRHRDRRGIPRAQRQDLSPRRPPARRLERVRKYKAAQELYLKNRKALTAQILDDTLGRVPDCPSQQDIQDTFGAIFSSESPSDDEIASGARFGPTAQLSAITKGEVESHRQRMPDKASGPDGISTRKLKRVPSAALALLFNSFLLLGDLPVALKEARTTLIPKSGDLKRATNWRPITVSATVVRLFHRILATRLSVSAPLHPVQRAFVHTDGAAINVHSLQMAITDARKHCRALCVVSLDISKAFDTVSHHSISRALDRLAISKPLQSYIRNSYVGCSTSIHCESASIGHVAVTRGVRQGDPMSPYLFNAVVDELLVRLAKDHPEARVLAFADDLVLMSKDEWALRGALRATESFMRLRGLRLNPQKCCGLSIRKDGKRKRTYVATGSRFEVEGTPIPSLGPTELLKYLGVEFGSRGSRSAPSDKLANYLSRLKKSPLKPFQKVALLKGFVLPKFIYSLSLLPPSRGALLDLDVLVRNFLKSILRVSNCVPNACFHSDAASGGLGIMSFATDIPLIALRRIRNVERETDADARIVADSDYLSRARSKAERLALHASGGGSGRRNFWRTSLFATMCGGGLEAVSHPASRAWLENPFTTAKGRMWLKQVKLRWNALACRGGVVKVGGQNSCRFGCRRNETLSHILQTCPVSHRFRIQRHNDLADHLAKISKSSGWVVYEEPRVIGDLVYKPDIICVKGDDLWVIDFAVPWETPRTPDLCWGDKVAKYSSRDFLASLARMFPSKTISVGAVIVTARGGWCPLNDDVLRGLGVLSGHLQRVLVQRAMEGSIRTYEGFMRTVDGH

SEQ ID NO: 19307 - protein, 737 aa, Ixodes scapularis
MTGPLPPALVEPVARPDEEIDIFSPVTAKELREARLPLNSAPGPDGFTARLLRAVPSTILRVLLNLLMLLGRVPAALQAGRTVFIPKTSPATEAGHFRPITMAPVVQWLLHKVLARRLTAAVGLNFRQRAFQPVDGCAENVLLLATAIAEAKQRLRPLYMASIDLTKAFDRVSTEAIIRGAVRAGLADSFVAYVRDLYRTSQSILTYKGESLLVEPTTGVRQGDPLSPTMFNLVLDEYLSKTDPNVGFTSGEFRLDAMAFADDLLVFASTRRGLQERLDDLAGFLEPRGLRVNIAKSFTLVLQPSGREKKSKVETDSTYCIRNQPLPVATTATIWRYLGVQFSTKGRRRGGVDRDLRELLERVTRAPLKPQQRLFILRGFLLPRLHHRLVLGLWGIGTLSKLDRMTRAAIRKWLALPHDTPVGYFHAPVSEGGLGVTSLRMAIPGMTLARIQGLRFSDHPGCEAALRCRMLTDQVRRARQAANIDGVPLATKAGVHKYWADKLHGSYDGAALRETRHVPAAQSWVADGTRLLPGRHYVNVIKLRVNALPTLSRTKRGRPDDVSCRAGCRARESLGHVLQACHRGHRGRVKRHDNIARYIAMRLHQLEWNVLWEPHYTVQGKVMKPDLVATQGAQTIIIDVQVVGTGMELAVLHKQKATKYSVPDLLRQVQGQRREPPLVTTATMNLRGIWSRESARDLLSLGLTKSDLKLMTVRCLQGGLRCFWAHRRMTTVANNRG

SEQ ID NO: 19308 - protein, 862 aa, Dolichovespula media
MIALKKAIASVMSKLKPLKGSEFRAGKLGKIYSNVLSSTQNEIAAELNSYLLETFPPKPDKAGPQPAQTRERRLTKRQIRRAEYAITQKAWKKNPNKCLKHLLKSKSSSKIPCEETMVSYWRTIMSDNKNLSPWSRPTPEKELEILSPILPAEIILARPDISAAPGPDGLTPRQLRKVPINILVGIMNLLLIGGKTPEFLLESKTTLIPKKEEASNPEDFRPITVSSVLVRTYHKILANRLAKAINLDDRQRAFIPRDGTARNIFELDMILRYHRQNYKSLYLATIDLAKAFDSVSHKTIRDTLTTNGVPALLTEYISNVYERSNTRLACDGWISGKITPKCGVKQGDPLSPIIFNMVMDGLLRKIPQEIGVKIDEVHYNALAFADDLVFVASTPQGLQTTLDTAAEYLTKCGLAINAGKSFTVAIRNVPHIKKTVVDGKIIFNCLGSQLPALKRADEWKYLGVPFSPEGRSKGQEIELLKFGLQQLTRAPLKPQQRLFGLRVMVLPGLYHLLTLGGTTLSKLKKIDLMVRSYVRKWLDLPHDTVNAFFHANAKDGGLSIPSMRWLMPLHRWKRLTNLTTIITTSPFLEQETGRAKRRLQDGRHTIESREDLDKRWARVLYTTTDGHGLRESRETPQQHRWILEGSRLLSGKDFINANKLRINALPTRSRTARGRVKDRSCRAGCRAIETIDHVLQKCYRTHGARIKRHDAVVSYMRRALNKTYAVDEEPRFDTEDGLKKPDLIAVKGGKALVLDAQVVGANISLDLAHDTKTAKYRCLTDSIIKKYGVEQVSFNSITLSYRGIWSKTSAQYLLDNKILRADELKVVSTRVLVGGLAGFAQFMKATTTSIHPARIRQSTGVG

SEQ ID NO: 19309 - protein, 919 aa, Dolichovespula media
MNQALMPYFPNRTTEAIKGQRRYQRHKDAVQQFLAEFRKSPKMESQTEQAEAADVEPMIALKKAIASVMSKLKPLKGSEFRAGKLGKIYSNVLSSTQDEIAAELNSYLLETFPPKPDKAGPQPAQTRERRLTKRQIRRAEYAITQKAWKKNPNKCLKHLLKSKSSSKIPCEETMVSYWRTIMSDNKNLSPWSRPTPEKELEILSPILPAEIILARPDISAAPGPDGLTPRQLRKVPINILVGIMNLLLIGGKTPEFLLESKTTLIPKKEEASNPEDFRPITVSSVLVRTYHKILANRLAKAINLDDRQRAFIPRDGTARNIFELDMILRYHRQNYKSLYLASIDLAKAFDSVSHKTIRDTLTTNGVPALLTEYISNVYERSNTRLACDGWISGKITPKCGVKQGDPLSPIIFNMVMDGLLRKIPQEIGVKIDEVHYNALAFADDLVFVASTPQGLQTTLDTAAEYLTKCGLAINAGKSFTVAIRNVPHIKKTVVDGKIIFNCLGSQLPALKRADEWKYLGVPFSPEGRSKGQEIELLKFGLQQLTRAPLKPQQRLFGLRVMVLPGLYHLLTLGGTTLSKLKKIDLMVRSYVRKWLDLPHDTVNAFFHANAKDGGLSIPSMRWLMPLHRWKRLTNLTTIITTSPFLEQETGRAKRRLQDGRHTIESREDLDKRWARVLYTTTDGHGLRESRETPQQHRWILEGSRLLSGKDFINANKLRINALPTRSRTARGRVKDRSCRAGCRAIETIDHVLQKCYRTHGARIKRHDAVVSYMRRALNKTYAVDEEPRFDTEDGLKKPDLIAVKGGKALVLDAQVVGANISLDLAHDTKTAKYRCLTDSIIKKYGVEQVSFNSITLSYRGIWSKTSAQYLLDNKILRADELKVVSTRVLVGGLAGFAQFMKATTTSIHPARIRQSTGVG

SEQ ID NO: 19310 - protein, 1045 aa, Dolichovespula saxonica
MRLSPGWPRTASANVRVLGAATPLDRLLVGPNSINIASDGLNRVGGSTDPSGPTKSSNQFPCGVENCEKTFATVRGKSVHQQRAHKNWYDEMTANSINNSKAPWSTEETSLLARQEAVLVLGGAKYLNQALLPYFPNRTLEAIKGQRRYVKHKEAVQQFLAKLQEGPHKEPPKSESETEGVDSMNALKKAIINVMRGLSPLKGSEFRADKLGRILSNVLTSSNDEIAAELEAYLLEVFPPKPDNADPQPARSKERPLTRRQMRRVQYSKTQKAWRKSPNKCLKFLLKTKSSSQVPCKEQMVPYWRTTMTNKSDLSPWSGQTPERELEILSPIIPAEVTMAFPARSAAPGPDGLTPRQLRKVPLNILVGIMNLLLIGGKSPKFLLESKTTLIPKKEEASDPGDFRPITVSPVIIRTFHKIIANRVAKAITLDDRQRAFLPRDGTARNIFDLDVILHYHRQNFKPLYLASLDIAKAFDSVSKRTINDTLSIYGVPSQIVNYLSDVYKRSTTRLSCDGWTSDTITPECGVKQGDPLSPLIFNLVIDGLLRRIPQEIGVKIDDVHYNALAFADDLVFVASTPQGLQRTLDVAAEYLTKCGLAINAGKSFTVAIRSVPHMKKTVVDGGVAFKCAGSQLPALKRADEWKYLGVPFTPEGRSKGHEIELLKLGLQQLTQAPLKPQQRLFALRVMVLPGLYHLLTLGNTTLSKLKKIDLMVRSSVRKWLDLPHDTNNAYFHANFKDGGLSIPSMRWLMPLHRWRRLRSLTQENTASSFLNLELCRARRRLRDGHQTIETLEQLDKRWAEALHTSNDGHGLRESRGTPQQHRWILEGTRLLSGKDFLNANKLRINALPTRSRTARGRIKDRSCRAGCNTIETADHILQKCYRTHKARIERHNAVVSYIKRALEKSYAVEEEPRFDSVDGLKKPDLIAIKGETAEVLDAQVVGANICLDLAHDTKTAKYRCLAKSIKEKYGVKEVCFSSVTLSYRGIWSKRSAQYLLNKKILKSGELMVISTRVLVGGLMEFRHFNKATTTSAFLTRSKQRTGIG

SEQ ID NO: 19311 - protein, 895 aa, Dolichovespula saxonica
MSSTRRRQFLAKLQEGPHKEPPKSESETEGVESMNALKKAIINVMSGLSPLKSSEFRADKLGRILSNVLTSTKDEIATELETYLLEIFPPKPDNADPQPARSKERPLTRRQFRRVQYAKTQKAWRKSPNKCLRYLLKTKSSSQIPCKERMVPYWRTTMTNKCNLSPWSGPTPERELKILSPITPAEITMAFPARSAAPGPDGLTSRQLRKVPTNILVGIMNLLLIGGKSPKFLLESKTTLIPKKEEASDPGDFRPITVSSVLIRTYHKILANRVAKAITLDDRQRAFLPRDGTARNIFDLDVILHYHRQNFRPLYLASLDIAKAFDSVSKCTIIDTLTTYGVPTLIVNYLADVYKRSTTRLSCDGWTSEIITPECGVKQGDPLSPLIFNLVIDGLLRRIPQEIGVKIDDVHYNALAFADDLVFVASTPQGLQHTLDVAAEYLTKCGLAINAGKSFTVAIRNVPHMKKRVVDGKITFKCAGNQLPALKRADEWKYLGVPFTPEGRSKGHEIELLKLGLQQLTQAILKPQQRLFALRVMVLPGLYHLLTLGNTTLSKLKKIDLMVRSSIRKWLDLPHDTNNAYFHANGKDGGLSIPSMRWLMPLHRWRRLRSLTHEITASSFLNQELSRARRRLCDGHHTIETLEQLDKRWAKALHTSNDGHGLKESRGTPQQHRWILEGTRLLSGKDFLNANKLRINALPTRSRTARGRIKDRSCRAGCNTIETADHVLQKCYRTHKARIERHNAVVSYIKRALEKSYAVEEEPRFDSVDGLKKPDLIAIKGETAEVLDAQVVGANICLDLAHDTKTAKYLCLAESIKEKYGVKEVCFSSVTLSYRGIWSKRSAQYLLSKKILKSGELMVISTRVLVGGLMEFRHFNKATTTSAFLARSKQRTGIG

SEQ ID NO: 19312 - protein, 1045 aa, Dolichovespula saxonica
MRLSPGWPRIASANVRVLGAATPLDRNLVGPKTNKIASDEHKIVGGSTDPSGPTNSSNRFLCEVENCEKSFATARGKSVHQQRAHKNWYDEKAALSINNSKAPWSTEETSLLARQEAVLVLGGAKHLNQALLPYFPNRTLEAIKGQRRYVKHKEAVQQFLAKLQEGPHKEPPKSESETEGVDSMNALKKAIINVMRGLSPLKGSEFRADKLGRILSNVLTSSNDEIATELESYLLEIFPPKPDNADPQPARSKERPLTRRQFRRVQYAKTQKAWRKSPNKCLRFLLKTKSSSQIPCKERMVPYWRTTMTNKCSLSPWSGPTPERELEILSPITPAEVTSAFPARSAAPGPDGLTPRQLRKVPSNILVGIMNLLLIGGKSPKFLLESKTTLIPKKEEASDPGDFRPITVSSVLIRTYHKILANRIAKAITLDDRQRAFLPRDGTARNIFDLDVILHYHRQNFRPLYLASLDLAKAFDSVSKCTIIDTLTTYGVPTPIVNYLADVYKRSTTRLSCDGWTSDIITPECGVKQGDPLSPLIFNLVIDGLLRRIPQEIGVKIDDVHYNALAFADDLVFVASTPQGLQHTLDVAAEYLTKCGLAINAGKSFTVAIRNVPHMKKTVVDGKVTFKCAGNQLPALKRADEWKYLGVPFTPEGRSKGHETELLKLGLQQLTQAPLKPQQRLFALRVMVLPGLYHLLTLGNTTLSKLKKIDLMVRSSIRKWLDLPHDTNNAYFHANVKDGGLSIPSMRWLMPLHRWRRLRSLTQEITASSFLSQELSRARRRLCDGHHIIENLEQLDKRWAEALHSSNDGHGLRESRGTPQQHRWILEGTRLLSGKDFLNANKLRINALPTRSRTARGRIKDRSCRAGCNTIETADHILQKCYRTHKARIERHNAVVSYIKRALEKSYAVEEEPRFDSVDGLKKPDLIAIKGETAEVLDAQVVGANICLDLAHDTKTAKYRCLAESIKEKYGVKEVCFSSVTLSYRGVWSKRSAQYLLNKKILKSGELMVISTRVLVGGLMEFRHFNKATTTSAFLARSKQRTGIG

SEQ ID NO: 19313 - protein, 1045 aa, Dolichovespula saxonica
MRLSPGWPRIASANVRVLGAATPLDRNLVGPKTNKIASDEHKIVGGSTDPSGPTNSSNRFLCEVENCEKTFATARGKSVHQQRAHKNWYDEKAALSINNSKAPWSTEETSLLARQEAVLVLGGAKYLNQALLPYFPNRTLEAIKGQRRYVKHKEAVQQFLAKLQEGPHKEPPKSESETEGVDSMNALKKAIINVMRGLSPLKGSEFRADKLGRILSNVLTSSNDEIATELESYLLEIFPPKPDNADPQPARSKERPLTRRQFRRVQYAKTQKAWRKSPNKCLRFLLKTKSSSQIPCKERMVPYWRTTMTNKCSLSPWSGQTPERELEILSPITPAEVTSAFPARSAAPGPDGLTPRQLRKVPSNILVGIMNLLLIGGKSPKFLLESKTTLIPKKEEASDPGDFRPITVSSVLIRTYHKILANRIAKAITLDDRQRAFLPRDGTARNIFDLDVILHYHRQNFRPLYLASLDLAKAFDSVSKCTIIDTLTTYGVPTPIVNYIADVYKRSTTRLSCDGWTSDIITPECGVKQGDPLSPLIFNLVIDGLLRRIPQEIGVKIDDVHYNALAFADDLVFVASTPQGLQHTLDVAAEYLTKCGLAINAGKSFTVAIRNVPHMKKTVVDGKVTFKCAGNQLPALKRADEWKYLGVPFTPEGRSKGHETELLKLGLQQLTQAPLKPQQRLFALRVMVLPGLYHLLTLGNTTLSKLKKIDLMVRSSIRKWLDLPHDTNNAYFHANVKDGGLSIPSMRWLMPLHRWRRLRSLTQEITASSFLSQELSRARRRLCDGHHIIENLEQLDKRWAEALHSSNDGHGLRESRGTPQQHRWILEGTRLLSGKDFLNANKLRINALPTRSRTARGRIKDRSCRAGCNTIETADHILQKCYRTHKARIERHNAVVSYIKRALEKSYAVEEEPRFDSVDGLKKPDLIAIKGETAEVLDAQVVGANICLDLAHDTKTAKYRCLAESIKEKYGVKEVCFTSVTLSYRGVWSKRSAQYLLNKKILKSGELMVISTRVLVGGLMEFRHFNKATTTSAFLARSKQRTGIG

SEQ ID NO: 19314 - protein, 1045 aa, Dolichovespula saxonica
MRLSPGWPRTASANVRVLGAATPLDRILVGPNSINIASDGLNRVGGSTDPSGPTKSSNQFPCGVENCEKTFATVRGKSVHQQRAHKNWYDEMTANSINNSKAPWSTEETSLLARQEAVLVLGGAKYLNQALLPYFPNRTLEAIKGQRRYVKHKEAVQQFLAKLQEGPHKEPPKSESETEGVESMNALKKAIINVMRGLSPLKGSEFRADKLGRILSNVLTSSNDEIAAELEAYLLEVFPPKPDNADPQPARSKERPLTRRQMRRVQYSKTQKAWRKSPNKCLKFLLKTKSSSQVPCKEQMVPYWRTTMTNKSDLSPWSGQTPERELEILSPIIPAEVTMAFPARSAAPGPDGLTPRQLRKVPLNILVGIMNLLLIGGKSPKFLLESKTTLIPKKEEASDPGDFRPITVSPVIIRTFHKIIANRVAKAITLDDRQRAFLPRDGTARNIFDLDVILHYHRQNFKPLYLASLDIAKAFDSVSKRTINDTLSIYGVPSQIVNYLSDVYKRSTTRLSCDGWTSDIITPECGVKQGDPLSPLIFNLVIDGLLRRIPQEIGVKIDDVHYNALAFADDLVFVASTPQGLQRTLDVAAEYLTKCGLAINAGKSFTVAIRSVPHMKKTVVDGGVTFKCAGSQLPALKRADEWKYLGVPFTPEGRSKGHEIELLKLGLQQLTQAPLKPQQRLFALRVMVLPGLYHLLTLGNTTLSKLKKIDLMVRSSVRKWLDLPHDTNNAYFHANFKDGGLSIPSMRWLMPLHRWRRLRSLTQENTASSFLNLELCRARRRLRDGHQTIETLEQLDKRWAEALHTSNDGHGLRESRGTPQQHRWILEGTRLLSGKDFLNANKLRINALPTRSRTARGRIKDRSCRAGCNTIETADHILQKCYRTHKARIERHNAVVSYIKRALEKSYAVEEEPRFDSVDGLKKPDLIAIKGETAEVLDAQVVGANICLDLAHDTKTAKYRCLAKSIKEKYGVKEVCFSSVTLSYRGIWSKRSAQYLLNKKILKSGELMVISTRVLVGGLMEFRHFNKATTTSAFLTRSKQRTGIG

SEQ ID NO: 19315 - protein, 1045 aa, Dolichovespula saxonica
MRLSPGWPRTASANVRVLGAATPLDRILVGPNSINIASDGLNRVGGSTDPSGPTKSSNQFPCGVENCEKTFATVRGKSVHQQRAHKNWYDEMTANSINNSKAPWSTEETSLLARQEAVLVLGGAKYLNQALLPYFPNRTLEAIKGQRRYVKHKEAVQQFLAKLQEGPHKEPPKSESETEGVESMNALKKAIINVMSGLSPLKGSEFRADKLGRILSNVLTSSNDEIAAELEAYLLEVFPPKPDNADPQPARSKESPLTRRQMRRVQYSKTQKAWRKSPNKCLKFLLKTKSSSQIPCKEQMVPYWRTTMTNKSDLSPWSGQTPERELEILSPIIPAEVTMAFPARSAAPGPDGLTPRQLRKVPLNILVGIMNLLLIGGKSPKFLLESKTTLIPKKEEASDPGDFRPITVSPVIIRTFHKIIANRVAKAITLDDRQRAFLPRDGTARNIFDLDVILHYHRQNFKPLYLASLDIAKAFDSVSKRTINDTLSIYGVPSQIVNYLSDVYKRSTTRLSCDGWTSDIITPECGVKQGDPLSPLIFNLVIDGLLRRIPQEIGVKIDDVHYNALAFADDLVFVASTPQGLQRTLDVAAEYLTKCGLAINAGKSFTVAIRSVPHMKKTVVDGGVTFKCAGSQLPALKRADEWKYLGVPFTPEGRSKGHEIELLKLGLQQLTQAPLKPQQRLFALRVMVLPGLYHLLTLGNTTLSKLKKIDLMVRSSVRKWLDLPHDTNNAYFHANFKDGGLSIPSMRWLMPLHRWRRLRSLTQENTASSFLNLELCRARRRLRDGHQTIETLEQLDKRWAEALYTSNDGHGLRESRGTPQQHRWILEGTRLLSGKDFLNANKLRINALPTRSRTARGRIKDRSCRAGCNTIETADHILQKCYRTHKARIERHNAVVSYIKRALEKSYAVEEEPRFDSVDGLKKPDLIAIKGETAEVLDAQVVGANICLDLAHDTKTAKYRCLAESIKEKYGVKEVCFSSVTLSYRGIWSKRSAQYLLNKKILKSGELMVISTRVLVGGLIEFRHFNKATTTSAFLARSKQRTGIG

SEQ ID NO: 19316 - protein, 1045 aa, Dolichovespula saxonica
MRLSPGWPRIASANVRVLGAATPLDRNLVGPKTNKIASDEHKIVGGSTDPSGPTNSSNRFLCEVENCEKSFATARGKSVHQQRAHKNWYDEKAALSINNSKAPWSTEETSLLARQEAVLVLGGAKHLNQALLPYFPNRTLEAIKGQRRYVKHKEAVQQFLAKLQEGPHKEPPKSESETEGVDSMNALKKAIINVMRGLSPLKGSEFRADKLGRILSNVLTSSNDEIATELESYLLEIFPPKPDNADPQLARSKERPLTRRQFRRVQYAKTQKAWRKSPNKCLRFLLKTKSSSQIPCKERMVPYWRTTMTNKCSLSPWSGQTPERELEILSPITPAEVTSAFPARSAAPGPDGLTPRQLRKVPSNILVGIMNLLLIGGKSPKFLLESKTTLIPKKEEASDPGDFRPITVSSVLIRTYHKILANRIAKAITLDDRQRAFLPRDGTARNIFDLDVILHYHRQNFRPLYLASLDLAKAFDSVSKCTIIDTLTTYGVPTPIVNYIADVYKRSTTRLSCDGWTSDIITPECGVKQGDPLSPLIFNLVIDGLLRRIPQEIGVKIDDVHYNALAFADDLVFVASTPQGLQHTLDVAAEYLTKCGLAINAGKSFTVAIRNVPHMKKTVVDGKVTFKCAGNQLPALKRADEWKYLGVPFTPEGRSKGHETELLKLGLQQLTQAPLKPQQRLFALRVMVLPGLYHLLTLGNTTLSKLKKIDLMVRSSIRKWLDLPHDTNNAYFHANVKDGGLSIPSMRWLMPLHRWRRLRSLTQEITASSFLSQELSRARRRLCDGHHIIENLEQLDKRWAEALHSSNDGHGLRESRGTPQQHRWILEGTRLLSGKDFLNANKLRINALPTRSRTARGRIKDRSCRAGCNTIETADHILQKCYRTHKARIERHNAVVSYIKRALEKSYAVEEEPRFDSVDGLKKPDLIAIKGETAEVLDAQVVGANICLDLAHDTKTAKYRCLAESIKEKYGVKEVCFSSVTLSYRGVWSKRSAQYLLNKKILKSGELMVISTRVLVGGLMEFRHFNKATTTSAFLARSKQRTGIG

SEQ ID NO: 19317 - protein, 1045 aa, Dolichovespula saxonica
MRLSPGWPRIASANVRVLGAATPLDRNLVGPKTNKIASDEHKIVGGSTDPSGPTNSSNRFLCEVENCEKSFATARGKSVHQQRAHKNWYDEKAALSINNSKAPWSTEETSLLARQEAVLVLGGAKHLNQALLPYFPNRTLEAIKGQRRYVKHKEAVQQFLAKLQEGPHKEPPKSESETEGVDSMNALKKAIINVMKGLSPLKGSEFRADKLGRILSNVLTSSNDEIATELESYLLEIFPPKPDNADPQPARSKERPLTRRQFRRVQYAKTQKAWRKSPNKCLRFLLKTKSSSQIPCKERMVPYWRTTMTNKCSLSPWSGQTPERELEILSPITPAEVTSAFPARSAAPGPDGLTPRQLRKVPSNILVGIMNLLLIGGKSPKFLLESKTTLIPKKEEASDPGDFRPITVSSVLIRTYHKILANRIAKAITLDDRQRAFLPRDGTARNIFDLDVILHYHRQNFRPLYLASLDLAKAFDSVSKCTIIDTLTTYGVPTPIVNYIADVYKRSTTRLSCDGWTSDIITPECGVKQGDPLSPLIFNLVIDGLLRRIPQEIGVKIDDVHYNALAFADDLVFVASTPQGLQHTLDVAAEYLTKCGLAINAGKSFTVAIRNVPHMKKTVVDGKVTFKCAGNQLPALKRADEWKYLGVPFTPEGRSKGHETELLKLGLQQLTQAPLKPQQRLFALRVMVLPGLYHLLTLGNTTLSKLKKIDLMVRSSIRKWLDLPHDTNNAYFHANVKDGGLSIPSMRWLMPLHRWRRLRSLTQEITASSFLSQELSRARRRLCDGHHIIENLEQLDKRWAEALHSSNDGHGLRESRGTPQQHRWILEGTRLLSGKDFLNANKLRINALPTRSRTARGRIKDRSCRAGCNTIETADHILQKCYRTHKARIERHNAVVSYIKRALEKSYAVEEEPRFDSVDGLKKPDLIAIKGETAEVLDAQVVGANICLDLAHDTKTAKYRCLAESIKEKYGVKEVCFSSVTLSYRGVWSKRSAQYLLNKKILKSGELMVISTRVLVGGLMEFRHFNKATTTSAFLARSKQRTGIG

SEQ ID NO: 19318 - protein, 1045 aa, Dolichovespula saxonica
MRLSPGWPRTASANVRVLGAATPLDRLLVGPNSINIASDGLNRVGGSTDPSGPTKSSNQFPCGVENCEKTFATVRGKSVHQQRAHKNWYDEMTANSINNSKAPWSTEETSLLARQEAVLVLGGAKYLNQALLPYFPNRTLEAIKGQRRYVKHKEAVQQFLAKLQEGPHKEPPKSESETEGVESMNALKKAIINVMSGLSPLKGSEFRADKLGRILSNVLTSSNDEIAAELEAYLLEVFPPKPDNADPQPARSKERPLTRRQMRRVQYSKTQKAWRKSPNKCLKFLLKTKSSSQIPCKEQMVPYWRTTMTNKSDLSPWSGQTPERELEILSPIIPAEVTMAFPARSAAPGPDGLTPRQLRKVPLNILVGIMNLLLIGGKSPKFLLESKTTLIPKKEEASDPGDFRPITVSPVIIRTFHKIIANRVAKAITLDDRQRAFLPRDGTARNIFDLDVILHYHRQNFKPLYLASLDIAKAFDSVSKRTINDTLSIYGVPSQIVNYLSDVYKRSTTRLSCDGWTSDIITPECGVKQGDPLSPLIFNLVIDGLLRRIPQEIGVKIDDVHYNALAFADDLVFVASTPQGLQRTLDVAAEYLTKCGLAINAGKSFTVAIRSVPHMKKTVVDGGVTFKCAGSQLPALKRADEWKYLGVPFTPEGRSKGHEIELLKLGLQQLTQAPLKPQQRLFALRVMVLPGLYHLLTLGNTTLSKLKKIDLMVRSSVRKWLDLPHDTNNAYFHANFKDGGLSIPSMRWLMPLHRWRRLRSLTQENTASSFLNLELCRARRRLRDGHQTIETLEQLDKRWAEALYTSNDGHGLRESRGTPQQHRWILEGTRLLSGKDFLNANKLRINALPTRSRTARGRIKDRSCRAGCNTIETADHILQKCYRTHKARIERHNAVVSYIKRALEKSYAVEEEPRFDSVDGLKKPDLIAIKGETAEVLDAQVVGANICLDLAHDTKTAKYRCLAESIKEKYGVKEVCFSSVTLSYRGIWSKRSAQYLLNKKILKSGELMVISTRVLVGGLIEFRHFNKATTTSAFLARSKQRTGIG

SEQ ID NO: 19319 - protein, 863 aa, Dolichovespula saxonica
MNALKKAIINVMSGLSPLKGSEFRADKLGKIYTKALSSSQDEIATELNAYLLEIFPPKPDNADRQPAQSKERPLTRRQIRRAQYAKTQKAWRKNPSKCLRYLLKTKSSSQVPCKEQMVPYWRTTMTNKCDLSPWSGQTPERELEILSPITPAEITMAFPARSAAPGPDGLIPRQLRKVPLNILVGIMNLLLIGGKSPKFLLESKTTLIPKKEEASDPGDFRPITVSSVLIRTYHKILANRVAKAITLDDRQRAFLPRDGTARNIFDLDVILHYHRQNFRPLYLASLDIAKAFDSVSKCTIIDTLTTYGVPTLIVNYLADVYKRSTTRLSCDGWTSDIITPECGVKQGDPLSPLIFNLVIDGLLRRIPQEIGVKIDDVHYNALAFADDLVFVASTPQGLQHTLDVAAEYLTKCGLAINAGKSFTVAIRNVPHMKKTVVDGKITFKCAGNQLPALKRADEWKYLGVPFTPEGRSKGHETELLKLGLQQLTQAPLKPQQRLFALRVMVLPGLYHLQTLGNTTLSKLKKIDLMVRSSIRKWLDLPHDDTNNAYFHANIKDGGLSIPSMRWLMPLHRWRRLRSLTQEITASSFLNQELSRARRRLCDGHHIIETLEQLDKRWAEALHTSNDGHGLRESRGTPQQHRWILEGTRLLSGKDFLNANKLRINALPTRSRTARGRIKDRSCRAGCNTIETADHVLQKCYRTHKARIERHNAVVSYIKRALEKSYAVEEEPRFDSVDGLKKPDLIAIKGETAEVLDAQVVVANICLDLAHDTKTAKYRCLAESIKEKYGVKEVCFSSVTLSYRGIWSKRSAQYLLSKQILKIGELMVISARVLVGGLMEFRQFNKATTSSAFLARSKQRTGIG

SEQ ID NO: 19320 - protein, 860 aa, Dolichovespula saxonica
MNALKKAIINVMSGLSPLKGSEFRVDKLGKIYTKALSSSQDEIATELNAYLLEIFPPKPDNADRQPAQSKERPLTRRQIRRAQYANTQKAWRKNPSKCLRYLLKTKSSSQVPCKEQMVPYWRTTMTNKCDLSPWSGQTPERELEILSPIIPAEVTMAFPARSGPDGLTSRQLRKVPTNILVGIMNLLLIGGKSAKFLLESKTTLIPKKEEASDPGDFRPITVSSVLIRTYHIILANRVAKAITLDDRQRAFLPRDGTARNIFDLDVILHYHRQNFRPLYLASLDIAKSFDSVSKCTIIDTLTTYGVPTLIVNYLADVYKRSTTRLSCDGWTSEIITPECGVKQGDPLSPLIFNLVIDGLLRRIPQEIGVKIDDVHHNALAFADDLVFVASTPQGLQRTLDVAAEYLTKCGLAINAGKSFTVAIRSVPHMKKTVVDGKITFKCAGSQLPALKRADEWKYLGVPFTPEGRSKGHEIELLKLGLQQLTQAPLKPQQRLFALRVMVLPGLYHLQTLGNTTLSKLKKIDLMVRSSIRKWLDLPHDDTNNAYFHANIKDGGLSIPSMRWLMPLHRWRRLRSLTQEITASSFLNQETSRARRRLCDGRHIIENLEQLDKRWAKALHTSTDGHGLRESRGTPQQHRWILGGTRLLSGKDFLNANKLRINALPTRYRTARGRIKDRSCRAGCNTIETAGHVLQKCYRTHKARIERHNAVVSYIKRALQKTYAVEEEPRFDLVDGLRKPDLIAIKGETAEVLDTQVVGANICLDLAHDTKTAKYRCLADSIRKKYGVKEVCFSSITLSYRGIWSKTSAQYLLNKKILSTSELMVISTRVLVGGLMGFGHFNKATTTSAYLAKNKQRTGIG

SEQ ID NO: 19321 - protein, 860 aa, Dolichovespula saxonica
MNALKKAIINVMSGLSPLKGSEFRVDKLGKIYTKALSSSQDEIATELNAYLLEIFPPKPDNADRQPAQSKERPLTRRQIRRAQYANTQKAWRKNPSKCLRYLLKTKSSSQVPCKEQMVPYWRTTMTNKCDLSPWSGQTPERELEILSPIIPAEVTMAFPARSGPDGLTSRQLRKVPTNILVGIMNLLLIGGKSAKFLLESKTTLIPKKEEASDPGDFRPITVSSVLIRTYHIILANRVAKAITLDDRQRAFLPRDGTARNIFDLDVILHYHRQNFRPLYLASLDIAKAFDSVSKCTIIDTLTTYGVPTLIVNYLADVYKRSTTRLSCDGWTSDIITPECGVKQGDPLSPLIFNLVIDGLLRRIPQEIGVKIDDVHYNALAFADDLVFVASTPQGLQHTLDVAAEYLTKCGLAINAGKSFTVAIRNVPHMKKTVVDGKITFKCAGNQLPALKRADEWKYLGVPFTPEGRSKGHETELLKLGLQQLTQAPLKPQQRLFALRVMVLPGLYHLQTLGNTTLSKLKKIDLMVRSSIRKWLDLPHDDTNNAYFHANIKDGGLSIPSMRWLMPLHRWRRLRSLTQEITASSFLNQELSRARRRLCDGHHIIETLEQLDKRWAEALHTSNDGHGLRESRGTPQQHRWILEGTRLLSGKDFLNANKLRINALPTRSRTARGRIKDRSCRAGCNTIETADHVLQKCYRTHKARIERHNAVVSYIKRALEKSYAVEEEPRFDSVDGLKKPDLIAIKGETAEVLDAQVVVANICLDLAHDTKTAKYRCLAESIKEKYGVKEVCFSSVTLSYRGIWSKRSAQYLLSKQILKIGELMVISARVLVGGLMEFRQFNKATTSSAFLARSKQRTGIG

SEQ ID NO: 19322 - protein, 860 aa, Dolichovespula saxonica
MNALKKAIINVMSGLSPLKGSEFRADKLGKIYTKALSSSQDEIATELNAYLLEIFPPKPDNADRQPAQSKERPLTRRQIRRAQYAKTQKAWRKNPSKCLRYLLKTKSSSQVPCKEQMVPYWRTTMTNKCDLSPWSGQTPERELEILSPITPAEITMAFPARSGPDGLIPRQLRKVPLNILVGIMNLLLIGGKSPKFLLESKTTLIPKKEEASDPGDFRLITVSPVIIRTFHKIIANRVAKAITLDDRQRAFLPRDGTARNIFDLDVILHYHRQNFKPLYLASLDIAKAFDSVSKRTINDTLSNYGVPRQIVNYLADVYKRSTTRLSCDGWTSDIITLECGVKQGDPLSPLIFNLVIDGLLRRIPQEIGVKIDDVHYNALAFADDLVFVASTPQGLQRTLDVAAEYLTKCGLAINAGKSFTVAIRSVPHMKKTVVDGGVAFKCAGSQLPALKRADEWKYLGVPFTPEGRSKGHEIELLKLGLQQLTQAPLKPQQRLFALRVMVLPGLYHLLTLGNTTLSKLKKIDLMVRSSIRKWLDLPHDDTNNAYFHANIKDGGLSIPSMRWLMPLHRWRRLRSLTQEITASSFLNQELSRARRRLCDGHHIIETLEQLDKRWAEALHTSNDGHGLRESRGTPQQHRWILEGTRLLSGKDFLNANKLRINALPTRSRTARGRIKDRSCRAGCNTIETADHVLQKCYRTHKARIERHNAVVSYIKRALEKSYAVEEEPRLDSVDGLKKPDLIAIKGETAEVLDAQVVGANICLDLAHDTKTAKYRCLAESIKEKYGVKEVCFSSVTLSYRGIWSKRSAQYLLSKQILKIGELMVISARVLVGGLMEFRQFNKATTSSAFLARSKQRTGIG

SEQ ID NO: 19323 - protein, 863 aa, Dolichovespula saxonica
MNALKKAIINVMSELSPLKGSEFRADKLGKIYTKALSSSQDEIATELNAYLLEIFPPKPDNADRQPAQSKERPLTRRQIRRAQYAKTQKAWRKNPSKCLRYLLKTKSSSQVPCKEQMVPYWRTTMTNKCDLSPWSGQTPERELEILSPITPAEVTMAFPARSAAPGPDGLIPRQLRKVPLNILVGIMNLLLIGGKSPKFLLESKTTLIPKKEEASDPGDFRPITVSSVLIRTYHKILANRVAKAITLDDRQRAFLPRDGTARNIFDLDVILHYHRQNFRPLYLASLDIAKAFDSVSKCTIIDTLTTYGVPTLIVNYLADVYKRSTTRLSCDGWTSDIITPECGVKQGDPLSPLIFNLVIDGLLRRIPQEIGVKIDDVHYNALAFADDLVFVASTPQGLQHTLDVAAEYLTKCGLAINAGKSFTVAIRNVPHMKKTVVDGKITFKCAGNQLPALKRADEWKYLGVPFTPEGRSKGHETELLKLGLQQLTQAPLKPQQRLFALRVMVLPGLYHLQTLGNTTLSKLKKIDLMVRSSIRKWLDLPHDDTNNAYFHANIKDGGLSIPSMRWLMPLHRWRRLRSLTQEITASSFLNQELSRARRRLCDGHHIIETLEQLDKRWAEALHTSNDGHGLRESRGTPQQHRWILEGTRLLSGKDFLNANKLRINALPTRSRTARGRIKDRSCRAGCNTIETADHVLQKCYRTHKARIERHNAVVSYIKRALEKSYAVEEEPRFDSVDGLKKPDLIAIKGETAEVLDAQVVVANICLDLAHDTKTAKYRCLAESIKEKYGVKEVCFSSVTLSYRGIWSKRSAQYLLSKQILKIGELMVISARVLVGGLMEFRQFNKATTSSAFLARSKQRTGIG

SEQ ID NO: 19324 - protein, 1243 aa, Pterostichus madidus
MGATNPPDVIREGKQLVVYHPCNNTLYCTENGCDAIFRSVKWNSTRVSLERHLKEVHALNLERSLNKCRYCDAPLGSRPSVHSCRLAPAAEVDPQETEEVEFSHRCGDCMKTFPTRRGLLNHSRQHDITARKAVINAELPRPRTGRARTNHGARVDLLEPPVNNVAEAVNIQTASSITPTRVPPLHPADFPVRVTSPLSVIISPTSAHSTSCMIPQDETAMSNREDNIASPASQLYEGSPVTQHEPIINDALLTPLRSAVTSPAGAHSTLRTTPQDETAVLDHEDNVAPQAVQQNENPATTQNVHSKSDTPLSPFFDRLQALARRPATQQNWNSFLTLLADIETVIHQAVSIRPRAPDTANLTRKPIPDPEDARYIQRLYRNNRRRAVRLILGEKRNTCTISKDAIMAHFSRVWAGNPNYRPTYQHIHNRPPIHTAEFTQQEVWARLRRCENTAPGPDLISYNNWRQVDPEAQILASVFNICALHQRIPVAWKTTTTILVHKKGAADVINNWRPIALSSTIYKLYTGCWAARLARWLETNNVIHPSQKGFMAHDGVLEHNYALKRRIGEARSGRSELCVAWLDLSNAFGSIPHAAVIEAAAASGTGPAFVQIVRDILQDSKTKIMTSDGLTAEIEVSSGVKQGCPLSGLLFNLSIDPVLHELQNTSDVTAAQCQVLAYADDLALLCCNSHLLQDKLNTACDLMHRLSMRFNAGKSRTLHIGNVTRNQVGVLQTQFVVDGTAVPNISDMLDSESFLGAPIGFSPVPSNAAILDIINTGLKILRSKLAPWQRIDATKTFVLPAALHLMRTGSHEKQDWDEMDRIFRAELKKTLYIPTEAANEYIYGPRSAGLVGVQVAAETADHSLIDSAFKLLTSRDNIIAEQARDDLDTAIVVRTKEVATDDLRGRFLGGDMTVPFDKRSTGLASVWSRARKASSRNYITWGFNERSPHLITSEGKTIGPADRRKILASLRQQRHLQRLTSLPSQGKAIECVATSATNSHFITDGAFTRFAEWRFIHRARLNLVPLNANARPKPGMTMDTRCRKCQYQLETLPHVLHHCMRYSHAYLQRHNAIVDRIRNAARVKYRVISEGQNFGGTLLRPDLVLVRGRSAVILDVTVVAENRVAAFQAAHDEKIAKYAALVDILNQRYDSVSIEPIVVGSLGSWSRSNDSFLRKLCTRRYGHLMRRLITSDTIRWSRDIYVEHLTGHQQWTPSDDVAPATSTTVAVAAPGIGAAPPSLPSVS

SEQ ID NO: 19325 - protein, 1246 aa, Pterostichus madidus
MGATNPPDVIREGTQLVVYHPCNNTLYCTENGCDAIFRSVKWNSTRVSLERHLKEVHALNLERSLNKCRYCDAPLGSRPSVHSCRLAPAAEVDPQETEEVEFSHRCGDCMKTFPTRRGLLNHSRQHDITARKAVINAELPRPHTGRARTNHGARVDLLEPPVNNVAEAVNIQTSSSITPTRVPPLHPADFPVRVTSPLSVIISPTSAHSTSCMIPQDETAMSNREDNIASPASQLYEGSPVTQHEPIINDALLTPLRSAVTSPADAHSTLRTTPQDETAVLDHEDNVAPQAVQQNENPATTQNVHSKSDTPLSPFFDRLQALARRPVTQQNWNSFLTLLADIEAVIHLAVSIRPRAPDIANLTRKPIPDPEDARYIQRLYRNNRRRAVRLILGEKRNTCTISKDAIMAHFSHVWAGNPNYRPTYQHIHNRPPIHTAEFTPQEVWARLRRCENTAPGPDLISYNNWRQVDPEAQILASVFNICALHQRIPVAWKTTTTILVHKKGAADVINNWRPIALSSTIYKLYTGCWAARLARWLETNNVIHPSQKGFMAHDGVLEHNYALKRRIGEARSGRSELCVAWLDLSNAFGSIPHAAVIEAAAASGTGPAFVQIVRDILQDSKTKIMTSDGLTAEIEVSSGVKQGCPLSGLLFNLSIDPVLHELQNTSDVAAAQCQVLAYADDLALLCCNSHLLQEKLNTACDLMHRLSMRFNAGKSRTLHIGNVTRNQVGVLQTQFVVDGTAVPNISDILDSESFLGAPIGFSPVPSNAAILDIINTGLKILRSKLAPWQRIDATKTFVLPAALHLMRTGSHEKHDWDEMDRIFRAELKKTLYVPTEAANEYLYGPRSAGLVGVQVAAETADHALIDSAFKLLTSRDNIIAEQARDDLDTAIVARTKEVSTDDLRGRFLGGDMTVPFDKRSTGLASVWSRARKASSRNYITWGFNERSPHLITSEGKTIGPADRRKILASLRQQRQQQHLQRLTSLPSQGKAVECVATSATNSHFITDGAFTRFAEWRFIHRARLNLVPLNANARPKPGVTMDTGCRKCQYQLETLPHVLHHCMRYSHAYLQRHNAIVDRIRNAARVKYRVISEGQNFGGTLLRPDLVMVRGRSAVIVDVTVVAENRVAAFQAAHDEKIAKYAALVDILNQRYDSVSIEPIVVGSLGSWSRRNDSFLRKLCTRRYGHLMRRLITSDTIRWSRDIYVEHLTGHQQWTPSDDVAPATSATVAAAAPGIGAAPPSLPSVS

SEQ ID NO: 19326 - protein, 1143 aa, Pterostichus madidus
MAEARVPPIEHQTDAEESKTMKRYNTTLTMWHPAATTMKCTETSCAHFYSAKIWTSTKQSIQRHLQEVHRILIDECIHICRNCDELLSNRPASHKCCAPNIPIPLADTTEAHQCTFCTMQFPSVQGVKNHEREHVRSDRTLELNNPLPRPRTRAHLRRVRTPPPHIAPATQINSPSEESDTNSTASSLHVQCSQLTDTSREPTPELPRTPPHPLRLPATCRLSSEDTSESDSDTGSVASRTRARSAARRLSSEPRTPERCSRRNLRAKTLSVPTPRPAAMVRSTPNRLSQQSLSQPPCRTTPHPYTLSPIAEETDTASTYTNLHATLTQGSVFSTENNTSQTQTNTNHSKTNQVPDEPLKDLTVTLKNIANRPISDTNWREFNVSLKTITDTIHESLKIRPRSDNSANKSRRNNIDPDNAKTIQKLYRNNRRRAIRAILDEQRVNCDIDNHTITTHFKNIWAPQPYVTGAYRRETNRPTIKLDLSNAFGSIPHAAVIEAAAASGTGPAFVQIVRDILQDSKTKIMTSDGLTAEIEVSSGVKQGCPLSGLLFNLSIDPVLQNTSDVAAAQCQVLAYADDLALLCCNSHLLQEKLNTACDLMHRLSMRFNAGKSRTLHIGNVTRNQVGVLQTQFVVDGTAVPNISDILDSESFLGAPIGFSPVPSNAAILDIINTGLKILRSKLAPWQRIDATKTFVLPAALHLMRTGSHEKHDWDEMDRIFRAELKKTLYVPTEAANEYLYGPRSAGLVGVQVAAETADHALIDSAFKLLTSRDNIIAEQARDDLDTAIVARTKEVSTDDLRGRFLGGDMTVPFDKRSTGLASVWSRARKASSRNYITWGFNERSPHLITSEGKTIGPADRRKILASLRQQRQQQHLQRLTSLPSQGKAVECVATSATNSHFITDGAFTRFAEWRFIHRARLNLVPLNANARPKPGVTMDTGCRKCQYQLETLPHVLHHCMRYSHAYLQRHNAIVDRIRNAARVKYRVISEGQNFGGTLLRPDLVMVRGRSAVIVDVTVVAENRVAAFQAAHDEKIAKYAALVDILNQRYDSVSIEPIVVGSLGSWSRRNDSFLRKLCTRRYGHLMRRLITSDTIRWSRDIYVEHLTGHQQWTPSDDVAPATSATVAAAAPGIGAAPPSLPSVS

SEQ ID NO: 19327 - protein, 1136 aa, Pterostichus madidus
MKTFPTRRGLLNHSRQHDITARKAVINAELPRPRTGRARTNHGARVDLLEPPVNNVAEAVNIQTASSITPTRVPPLHPADFPVRVTSLSVIISPTSAHSTSCMIPQDETAMSNREDNIASPASQLYEGSPVTQHEPIINDALLTPLRSAVTSPAGAHSTLRTTPQDETAVLDHEDNVAPQAVQQNENPATTQNVHSKSDTPLSPFFDRLQALARRPATQQNWNSFLTLLADIETVIHQAVSIRPRAPDTANLTRKPIPDPEDARYIQRLYRNNRRRAVRLILGEKRNTCTISKDAIMAHFSRVWAGNPNYRPTYQHIHNRPPIHTAEFTQQEVWARLRRCENTAPGPDLISYNNWRQVDPEAQILASVFNICALHQRIPVAWKTTTTILVHKKGAADVINNWRPIALSSTIYKLYTGCWAARLARWLETNNVIHPSQKGFMAHDGVLEHNYALKRRIGEARSGRSELCVAWLDLSNAFGSIPHAAVIEAAAASGTGPAFVQIVRDILQDSKTKIMTSDGLTAEIEVSSGVKQGCPLSGLLFNLSIDPVLHELQNTSDVTAAQCQVLAYADDLALLCCNSHLLQDKLNTACDLMHRLSMRFNAGKSRTLHIGNVTRNQVGVLQTQFVVDGTAVPNISDMLDSESFLGAPIGFSPVPSNAAILDIINTGLKILRSKLAPWQRIDATKTFVLPAALHLMRTGSHEKQDWDEMDRIFRAELKKTLYIPTEAANEYIYGPRSAGLVGVQVAAETADHSLIDSAFKLLTSRDNIIAEQARDDLDTAIVVRTKEVATDDLRGRFLGGDMTVPFDKRSTGLASVWSRARKASSRNYITWGFNERSPHLITSEGKTIGPADRRRILASLRQQRQQQHLQRLTSLPSQGKAIECVATSATNSHFITDGAFTRFAEWRFIHRARLNLVPLNANARPKPGMTMDTRCRKCQYQLETLPHVLHHCMRYSHAYLQRHNAIVDRIRNAARVKYRVISEGQNFGGTLLRPDLVMVRGRSAVIVDVTVVAENRVAAFQAAHDEKIAKYAALVDILNQRYDSVSIEPIVVGSLGSWSRRNDSFLRKLCTRRYGHLMRRLITSDTIRWSRDIYVEHLTGHQQWTPSDDVAPATSATVAAAAPGIGAAPPSLPSVS

SEQ ID NO: 19328 - protein, 1034 aa, Pterostichus madidus
MIPQDETAMSNREDNIASPASQLYEGSPVTQHEPIINDALLTPLRSAVTSPAGAHSTLRTTPQDETAVLDHEDNVAPQAVQQNENPATTQNVHSKSDTPLSPFFDRLQALARRPATQQNWNSFLTLLADIETVIHQAVSIRPRAPDTANLTRKPIPDPEDARYIQRLYRNNRRRAVRLILGEKRNTCTISKDAIMAHFSRVWAGNPNYRPTYQHIHNRPPIHTAEFTQQEVWARLRRCENTAPGPDLISYNNWRQVDPEAQILASVFNICALHQRIPVAWKTTTTILVHKKGAADVINNWRPIALSSTIYKLYTGCWAARLARWLETNNVIHPSQKGFMAHDGVLEHNYALKRRIGEARSGRSELCVAWLDLSNAFGSIPHAAVIEAAAASGTGPAFVQIVRDILQDSKTKIMTSDGLTAEIEVSSGVKQGCPLSGLLFNLSIDPVLHELQNTSDVTAAQCQVLAYADDLALLCCNSHLLQDKLNTACDLMHRLSMRFNAGKSRTLHIGNVTRNQVGVLQTQFVVDGTAVPNISDMLDSESFLGAPIGFSPVPSNAAILDIINTGLKILRSKLAPWQRIDATKTFVLPAALHLMRTGSHEKQDWDEMDRIFRAELKKTLYIPTEAANEYIYGPRSAGLVGVQVAAETADHSLIDSAFKLLTSRDNIIAEQARDDLDTAIVVRTKEVATDDLRGRFLGGDMTVPFDKRSTGLASVWSRARKASSRNYITWGFNVRSPHLITSEGKTIGPADRRKILASLRQQRQQQHLQRLTSLPSQGKAIECVATSATNSHFITDGAFTRFAEWRFIHRARLNLVPLNANARPKPGMTMDTRCRKCQYQLETLPHVLHHCMRYSHAYLQRHNAIVDRIRNAARVKYRVISEGQNFGGTLLRPDLVLVRGRSAVIVDVTVVAENRVAAFQAAHDEKIAKYAALVDILNQRYDSVSIEPIVVGSLGSWSRSNDSFLRKLCTRRYGHLMRRLITSDTIRWSRDIYVEHLTGHQQWTPSDDVAPATSATVAAAAPGIGAAPPSLPSVS

SEQ ID NO: 19329 - protein, 918 aa, Apoderus coryli
MGWLTASTDLEDLNVAYTRMVGEMMAGEDHGQRPVRPGRGRPPHLPPRRRDVEARYDPVEASSIQKLYRTRRDKAYRQIVGVGANDYCTIPEDQLLRYFSETHAERQLEGPTHDVQLPTAMDDVSAQPFRSDEIGRRLQRTKNTAPGKDGLRYHQIKKLDPGCRVLTILFNKILQLGQVPTAWKTGTTVLIYKKGDRMDPSNWRPISLCSCLYKLFTSCLASRISSWANNNGLLSPAQKGFGRNEGCFEHNFLIQSVLENVRRTRRRCAIAWLDLANAFGSVPHGHLLRTLSAMGLDGTTVEIIRDIYSGCSATIRTPEGESADFPVRAGVRQGCPLSPVIFNLALEPVLRSVLRTNQGFTLHGRLLAVLAYADDLVMVAESPETLQHLLDEAGRTSTRCGLTFKPAKCASLHLDCRVRSVCLPTTFNIQDRQFGAMVEGEAYQHLGVPTGYHVDQTPEVTVRNMSDAVDRLDSSLLAPWQKIDAINTFVMPQISFTMRGCVVKKNSVKELDRKVKLLVKKWMNLPQRASPEIVYLPNKRGGAGVLPLADLLDVSTMVHAFRMLTCPEDVARSVALGQLTEVVRRRIGRQPFLEDLMNYLSGDLRGEFGYDRGDIESLWTRARNATRRLAARTPVAWMVADNNCALRIGFPRPTGDNVVVSGQRSAVESRLRTVLAGIYENSLTRKPDQGKVFRLSSKSAASNHFMRDGFATRFCDWRFLHRARLDCVPLNATRRFGGGDKRCRKCGGQAETLPHVLNHCRVHSAAWQKRHNAVQDRLVRAVPDRAGTVAVIRTVPGTGSNLRPDIVITSGQSITIIDVSIPFENGHDAFTVARDHKIAKYEPLADELRAGGFDVVVDAFLVGALGSWDLLNERVIRRCGVSMFYARLMRKLMCSDVVRWSRDIYVEHVTGVRQYAEN

SEQ ID NO: 19330 - protein, 1116 aa, Apoderus coryli
MENFHVQYPFPDLFTCNFCEIIPPRSYLNHNDLNKHTKRYHQRAVAFECRVCGVQYGNLKRMKAHVASEHPDDGEPAARRQPPERLPIRRRVDVVDRPPPVRPVNGSPPRMPVVQAPPDSPPPAPMGAAVVVEPPRLWADELPPTPPGGVVRPASPVVPNEAQIQEDLLEAPVDPNHRLPPVHPDQHPLRAPNQDQERWIGWLNAVIDLDDLNAAYNRVVEEMAARGNAGQRPAGGRRPRRPPRPPNIGLQYDPNEAASIQKSYRTSRDKTYRRIVGGEVNDFCTIPEDRLLHYFSETHAERRVDRPPHDVQLPNAVDATSALPFTPQEVKGRLQKTKNTAPGRDGVRYHQIRKLDPGCKTMTTMFNKVLQLGQVPSAWKEGTMVLIYKKGDRMDPSNWRPISLCSCLYKLFASCLAARISSWANSNGLLSACQKGFGRHEGCFEHNFLIQSVLENVRRARKECAIAWLDLANAFGSVPHDHLLRSLSAMGLDASTVGIIRNIYSECSATIRTTMGESANFPIRAGVRQGCPLSPVIFNLALEPVLRSVLRTNRGYALHGRIISVLAYADDLVMVAESPVDLHGVLDECGRAATSCGLTFKPAKCASLHLDCRVRNTCLPTAFTVQGSEFSAMAEGEAYQHLGVPTGYHVDQTPEETINRMSLAVDRLDSSLLAPWQKIDAVNTFVVPQISFTLRGCVVKKMAVRCLDRKIRSVVKKWLNLPQRASAEVVFLPNKKGGAGVLPLTDLVDLSTVVHAFRMLTCPEDVTRAVAGDQLCDVVQRRIGRRPYLEDMTQYLSGDLRGEFGVDRGDVGSLWSRTRNATRRLAARTPISWLVGDNSFAVRLGFPRPTDTNVVLPSQRNGVESRLRTLLSDMYAASLARKPDQGKVFRVSSRSAASNHFVRSGFSTRFCDWRFIHRARLDCVPLNATRRFGGGDRRCRRCGTQAETLPHVLNHCRMHSAAWQRRHNAIQDRLVRAMPARAGTVTVNRTVPETGSNLRPDMVVRSGDALHIVDISIPFENGQEAFELARNHKINKYEPLADELRAQGLDVTVDAFLIGALGSWDQTNERVLQRLGISQYYARLMRKLMGSDVVRWSRDIYVEHVTGVRQYADAEL

SEQ ID NO: 19331 - protein, 1115 aa, Apoderus coryli
MEKYYIRYPFPELFTCEFCNVLPPRTYLNHNDLNKHTKRYHQRSAAFECGVCELQFDTLKRIKAHAASEHPDQAGPPAPREPPDGDPPLRRRVVVRRARPTDDGSPQWRAVAPVSPQQNGPPRDIGPAPDGPAGLPPAPSPPPVEGRVPPPASPQVRLTVQNVLNLRDEPVDRAQQQQPPDPPDQRPLRTNQDQARWMGWLTASTDLEDLNVAYTRMVGEMMAGEDHGQRPVRPGRGRPPHLPPRRRDVEARYDPVEASSIQKLYRTRRDKAYRQIVGVGANDYCTIPEDQLLRYFSETHAERQLEGPTHDVQLPTAMDDVSAQPFRSDEIGRRLQRTKNTAPGKDGLRYHQIKKLDPGCRVLTILFNKILQLGQVPTAWKTGTTVLIYKKGDRMDPSNWRPISLCSCLYKLFTSCLASRISSWANNNGLLSPAQKGFGRNEGCFEHNFLIQSVLENVRRTRRRCAIAWLDLANAFGSVPHGHLLRTLSAMGLDGTTVEIIRDIYSGCSATIRTPEGESADFPVRAGVRQGCPLSPVIFNLALEPGLRSVLRTNQGFTLHGRLLAVLAYADDLVMVAESPETLQHLLDEAGRTSTRCGLTFKPAKCASLHLDCRVRSVCLPTTFNIQDRQFGAMVEGEAYQHLGVPTGYHVDQTPEVTVRNMSDAVDRLDSSLLAPWQKIDAINTFVMPQISFTMRGCVVKKNSVKELDRKVKLLVKKWMNLPQRASPEIVYLPNKRGGAGVLPLADLLDVSTMVHAFRMLTCPEDVARSVALGQLTEVVRRRIGRQPFLEDLMNYLSGDLRGEFGYDRGDIESLWTRARNATRRLAARTPVAWMVADNNCALRIGFPRPTGDNVVVSGQRSAVESRLRTMLAGIYENSLTRKPDQGKVFRLSSKSAASNHFMRDGFATRFCDWRFLHRARLDCVPLNATRRFGGGDKRCRKCGGQAETLPHVLNHCRVHSAAWQKRHNAVQDRLVRAVPDRAGTVAVNRTVPGTGSNLRPDIVITSGQSITIIDVSIPFENGHDAFTVARDHKIAKYEPLADELRAGGFDVVVDAFLVGALGSWDLLNERVIRRCGVSMFYARLMRKLMCSDVVRWSRDIYVEHVTGVRQYAEN

SEQ ID NO: 19332 - protein, 1115 aa, Apoderus coryli
MEKYYIRYPFPELFTCEFCNVLPPRTYLNHNDLNKHTKRYHQRSAAFECGVCELQFDTLKRIKAHAASEHPDQAGPPAPREPPDGDPPLRRRVVVRRARPADDGSPQWRAVAPVSPQQNGPPRDIGPAPDGPAGLPPAPSPPPVEGRVPPPASPQVRLTVQNVLNLCDEPVDRAQQQQPPDPPDQRPLRTNQDQARWMGWLTASTDLEDLNVAYTRMVGEMMAGEDHGQRPVRPGRGRPPHLPPRRRDVEARYDPVEASSIQKLYRTRRDKAYRQIVGVGANDYCTIPEDQLLRYFSETHAERQLEGPTHDVQLPTAMDDVSAQPFRSDEIGRRLQRTKNTAPGKDGLRYHQIKKLDPGCRVLTILFNKILQLGQVPTAWKTGTTVLIYKKGDRMDPSNWRPISLCSCLYKLFTSCLASRISSWANNNGLLSPAQKGFGRNEGCFEHNFLIQSVLENVRRTRRRCAIAWLDLANAFGSVPHGHLLRTLSAMGLDGTTVEIIRDIYSGCSATIRTPEGESADFPVRAGVRQGCPLSPVIFNLALEPVLRSVLRTNQGFTLHGRLLAVLAYADDLVMVAESPETLQHLLDEAGRTSTRCGLTFKPAKCASLHLDCRVRSVCLPTTFNIQDRQFGAMVEGEAYQHLGVPTGYHVDQTPEVTVRNMSDAVDRLDSSLLAPWQKIDAINTFVMPQISFTMRGCVVKKNSVKELDRKVKLLVKKWMNLPQRASPEIVYLPNKRGGAGVLPLADLLDVSTMVHAFRMLTCPEDVARSVALGQLTEVVRRRIGRQPFLEDLMNYLSGDLRGEFGYDRGDIESLWTRARNATRRLAARTPVAWMVADNNCALRIGFPRPTGDNVVVSGQRSAVESRLRTMLAGIYENSLTRKPDQGKVFRLSSKSAASNHFMRDGFATRFCDWRFLHRARLDCVPLNATRRFGGGDKRCRKCGGQAETLPHVLNHCRVHSAAWQKRHNAVQDRLVRAVPDRAGTVAVNRTVPGTGSNLRPDIVITSGQSITIIDVSIPFENGHDAFTVARDHKIAKYEPLADELRAGGFDVVVDAFLVGALGSWDLLNERVIRRCGVSMFYARLMRKLMCSDVVRWSRDIYVEHVTGVRQYAEN

SEQ ID NO: 19333 - protein, 1141 aa, Micoletzkya japonica
MAYILFPVPLPPGPYPCDPCLDPSIGIRRSYGNRSELAKHVKLHHPQCPGLRYYCAGCGLEGDLKSTNKHRKESPACLANTVQAPPSVSVPTVPPTVPRPISRPRMPAQARPPDPSTAPARGGATAGRGRGRGGRGSARGTRRRNRTPSPVSDSDLTSVSTPESSVPSSPSLSSTDSSDLTSSSDSEASPGSSSRRTVGVPTPPQGPSPVSPSGQASPLRPLHSPPVSIASVATGRAPSIGVSPTGNPSVRPSPVHRTQASPTVPNPQLSTAARGRTTRGRGRGRGRGGRPQAGGHPGRLPHQDTWVSRLLSIHSLPSLESSMEDLVRDLAASAPTPAAPDRPSGRNRGARNGSSRPAGRPQDPVQEAKQLQQLYRMDPKKAMRKVLEGESPFCTIPDHDLESHFTTVHSAPTVPPGQPPPVAPLPPADTDNPFDSEFDRSEIWTRLGRCSNTAPGPDGVRYAEWKRFDPEAHILHALFKAVRAYGIPRSWKVSSTVLLHKKGDRNEVTNWRPIALSDTIGKLYSGLIAQRLEAWSTRNGRLTSSQKGFLHYEGCAEHSFVVQSIIQDARRSRRHLSLAFLDLANAFGCVPHSTLFEALSWAGLGDPAIDRIRQLYDGCTTRIRTASGHTRPISIMSGVKQGCPLSPIVFNLAIEPVIRRALETGKGYGIHGQTHAICGYADDLCCMAETPADLQLILDSLSSAADWAGLRFKPAKCASLVWDGKTTVPLTLSIQGTAMPALSSSDHYEYLGVPISMKIIPSALSVLEGITKDLDRVDRSLLAPWQKATALSTFLLSRLPFHLTHGTVPKERLHELDKKVKSCAKKWLYLPKRASNELLYLGYHQGGLNLLPMADLADLSQLSQALHLLDSRDPSIASLSLSTLREVAEKRARCRLNSSQICEYLNGSNEGIFRTPTGDVTSRWTRLRSATARLRSRGIPVEWINDQGSIRLRARGRVVNRVRSMGYLAFVMREKYREGLCDKRDQGKTIDLLSSSPLSNFFMRDGKFMRFCDWRFLHRARLNLLPLNGARKWDMNCDKRCRRCGYTSETLPHVLSHCPPNMPTIRARHNAVHDRLKAAIHPPQGSFVGHDSRVPGFDSPLRPDIVVLDEQNKKATIVDIVIPFENRPESIEQAKQEKRDK

SEQ ID NO: 19334 - protein, 965 aa, Dicyema japonicum
MAIDSLPNLDINDITDIIYAGQCTYESLTRRNSTKSNWEESMKGKITKLRKQLEQIQMASGMNGKKQFDEEVRNTLCSYGFKKSKRGEFERIASYVRDQIKIIEKKLRIYESRKGFRRANWCFELNRRRFYRNISGDNKKGVLNFDEGECLPFWTTIWNESDRKESKFLLNKRVTGSENSYADFTKEAIVDTIKMLPNWKASGCDGVYNFFIKSFTSIHEHLCEEIQKIINDEYTPGDWFYTGITHLIPKVDVCNSPKELRPITCMPNLYKLLTKCVNKKLSEYIESYDLLSDNQLGTRRMCQGAKEQALVNQYLNQRNGSNLCSTWIDVKKAFDSVDHELLGEVLQNSGLPFWIVSFITKLVGKWKIRLNLEGKVLGEIRIRRGILQGDSLSPQIFALLMDPLSRILNGKFPKVTMGSPGNGEPTYATNHLLFMDDIKLFSHKSDSMVMMMEEVDSFFDASGLERNFDKSATNVKSLSGKARFLDGLDGYRYLGVLEDKNSNVLKGEIMNKIYGEVSKRIKNLTKTDLNSVNLFKAMNEYAISLYNYYIGLIDIEPGEFEQIDKNIRRILMDSHIHLQPANKERLYLPRNKFGRGLELVSNKAERMLLQFYSDLEHKANYCLRRAGILRVINSKKIHMATIVKFISRKYNIENVKETMLKLMEIQHEYLLGKIEEKSLHSILFECLKDTEVNIAESSGWLVHGNHSPVTEGRLCLLQDRNMFFDNGEAKCKHCNSGKKTVDHLATRCGRMLNSSYLRRHNEVVRCIHLHLCRQYGIRKTKKLKTHSVQSVVSNEFVEIRVDTTISTDTAVQNNKPDIFVHDKVRNTITLVEIGITSQNCLKQVEVEKFHKYDLLANELGCIHRAKVKIIPVVITWDGIVSRFFKGHLDALKLEERVKAYIQTLVLRKTLESMQAEDRHGVSIPDEEEADKECRSRGVSECELCDNENTPILTIDVGPKKRRLAN

SEQ ID NO: 19335 - protein, 1163 aa, Dicyema japonicum
MVILIDIEFFVVVGMAVSCKKRRKDVSIDLSTKVTKRKNKRNVENVVDDLSKTQKVVNTDLKEHLLSLQCVVDKVHTVDKRQWAVEVVEATKSRFKRMPRGGWPLITNAFNQRFGTPKSVTNFKSLLFSNSSESLCGLPVGEIQKVEISNFRKCFEEFCCQIGKVFTTGRNLRMPTRKIPRQLIKKDILNGINAAIKEYIDSLPNLDINDITDIIYAGQCTYESLTRRNSTKSNWEESMKGKITKLRKQLEQIQMASEMNGKKQFDEEVRNTLCSYGFKKSKRGEFERIASYVRDQIKIIEKKLRIYESRKGFRRANWCFELNRRRFYRNISGDNKKGVLNFDEGECLPFWTTIWNESDRKESKFLLNKRVTGSENSYADFTKEAIVDTIKMLPNWKASGCDGVYNFFIKSFTSIHEHLCEEIQKIINDEYTPGDWFYTGITHLIPKVDVCNSPKELRPITCMPNLYKLLTKCVNKKLSEYIESYDLLSDNQLGTRRMCQGAKEQALVNQCLNQRNGSNLCSTWIDVKKAFDSVDHEFLGEVLQNSGLPFWIVSFITKLVGKWKIRLNLEGKVLGEIRIRRGILQGDSLSPQIFALLMDPLSRILNGKFPKVTMGSPGNGEPTYATNHLLFMDDIKLFSHKSDSMVMMMEEVDSFFDAAGLERNFDKSATNVKSLSGKARFLDGLDGYRYLGVLEDKNSNVLKGEIMNKIYGEVSKRIKNLTKTDLNSVNLFKAMNEYAISLYNYYIGLIDIEPGEFEQIDKNIRRILMDSHIHLQPANKERLYLPRNKFGRGLESVSNKAERMLLQFYSDLEHKANYCLRRAGILRVINSKKIHMATIVEFISRKYNIENVKDLTMLKLMEIQHEYLLGKIEEKPLHSILFECLKDTEVNIAESSGWLVHGNHSPVTEGRLCLLQDRNMFFDNGEAKCKHCNSGKKTVDHLATRCGRMLNSSYLRRHNEVVRCIHLHLCRQYGIRKTKKLKTHSVQSVVSNEFVEIRVDTTISTDTAVQNNKPDIFVHDKVRNTITLVEIGITSQNCLKQVEVEKFHKYDLLANELGCIHRAKVKIIPVVITWDGIVSRFFKGHLDALKLEERVKAYIQTLVLRKTLESMQAEDRHGVSIPDEEEADKECRPRGVSECGLCDNENTPILTIDVGPKKRRLAN

SEQ ID NO: 19336 - protein, 1149 aa, Dicyema japonicum
MAVSCKKRRKDVSIDLSTKVTKRKNKRNVENVVDDLSKTQKVVNTDLKEHLLSLQCVVDKVHTVDKRQWAVEVVEATKSRFKRMPRGGWPLITNAFNQRFGTSKSVTNFKSLLFSNSSESLCGLPVGEIQKVEISNFRKCFEEFCCQIGKVFTTGRNLRMPTRKIPRQLIKKDILNGINAAIKEYIDSLPNLDINDITDIIYAGQCTYESLTRRNSTKSNWEESMKGKITKLRKQLEQIQMASEMNGKKQFDEEVRNTLCSYGFKKSKRGEFERIASYVRDQIKIIEKKLRIYESRKGFRRANWCFELNRRRFYRNISGDNKKGVLNFDEGECLPFWTTIWNESDRKESKFLLNKRVTGSENSYADFTKEAIVDTIKMLPNWKASGCDGVYNFFIKSFTSIHEHLCEEIQKIINDEYTPGDWFYTGITHLIPKVDVCNSPKELRPITCMPNLYKLLTKCVNKKLSEYIESYDLLSDNQLGTRRMCQGAKEQALVNQYLNQRNGSNLCSTWIDVKKAFDSVDHEFLGEVLQNSGLPFWIVSFITKLVGKWKIRLNLEGKVLGEIRIRRGILQGDSLSPQIFALLMDPLSRILNGKFPKVTMGSPGNGEPTYATNHLLFMDDIKLFSHKSDSMVMMMEEVDSFFDAAGLERNFDKSATNVKSLSGKARFLDGLDGYRYLGVLEDKNSNVLKGEIMNKIYGEVSKRIKNLTKTDLNSVNLFKAMNEYAISLYNYYIGLIDIEPGEFEQIDKNIRRILMDSHIHLQPANKERLYLPRNKFGRGLESVSNKAERMLLQFYSDLEHKANYCLRRAGILRVINSKKIHMATIVEFISRKYNIENVKDLTMLKLMEIQHEYLLGKIEEKSLHSILFECLKDTEVNIAESSGWLVHGNHSPVTEGRLCLLQDRNMFFDNGEAKCKHCNSGKKTVDHLATRCGRMLNSSYLRRHNEVVRCIHLHLCRQYGIRKTKKLKTHSVQSVVSNEFVEIRVDTTISTDTAVQNNKPDIFVHDKVRNTITLVEIGITSQNCLKQVEVEKFHKYDLLANELGCIHRAKVKIIPVVITWDGIVSRFFKGHLDALKLEERVKAYIQTLVLRKTLESMQAEDRHGVSIPDEEEADKECRPRGVSECGLCDNENTPILTIDVGPKKRRLAN

SEQ ID NO: 19337 - protein, 940 aa, Dicyema japonicum
MPTRKIPRQLIKKDILNGINAAIKEYIDSLPNLDINDITDIIYAGQCTYESLTRRNSTKSNWEESMKGKITKLRKQLEQIQMASEMNGKKQFDEEVRNTLCSYGFKKSKRGEFERIASYVRDQIKIIEKKLRIYESRKGFRRANWCFELNRRRFYRNISGDNKKGVLNFDEGECLPFWTTIWNESDRKESKFLLNKRVTGSENSYADFTKEAIVDTIKMLPNWKASGCDGVYNFFIKSFTSIHEHLCEEIQKIINDEYTPGDWFYTGITHLIPKVDVCNSPKELRPITCMPNLYKLLTKCVNKKLSEYIESYDLLSDNQLGTRRMCQGAKEQALVNQCLNQRNGSNLCSTWIDVKKAFDSVDHEFLGEVLQNSGLPFWIVSFITKLVGKWKIRLNLEGKVLGEIRIRRGILQGDSLSPQIFALLMDPLSRILNGKFPKVTMGSPGNGEPTYATNHLLFMDDIKLFSHKSDSMVMMMEEVDSFFDAAGLERNFDKSATNVKSLSGKARFLDGLDGYRYLGVLEDKNSNVLKGEIMNKIYGEVSKRIKNLTKTDLNSVNLFKAMNEYAISLYNYYIGLIDIEPGEFEQIDKNIRRILMDSHIHLQPANKERLYLPRNKFGRGLESVSNKAERMLLQFYSDLEHKANYCLRRAGILRVINSKKIHMATIVEFISRKYNIENVKDLTMLKLMEIQHEYLLGKIEEKPLHSILFECLKDTEVNIAESSGWLVHGNHSPVTEGRLCLLQDRNMFFDNGEAKCKHCNSGKKTVDHLATRCGRMLNSSYLRRHNEVVRCIHLHLCRQYGIRKTKKLKTHSVQSVVSNEFVEIRVDTTISTDTAVQNNKPDIFVHDKVRNTITLVEIGITSQNCLKQVEVEKFHKYDLLANELGCIHRAKVKIIPVVITWDGIVSRFFKGHLDALKLEERVKAYIQTLVLRKTLESMQG

SEQ ID NO: 19338 - protein, 912 aa, Dicyema japonicum
MYKNASGMNGKKQFDEEIRNTLCSYGFKKSKRGEFERIASYVRDQIKIIEKKLRIYESRKGFRRANWCFELNRRRLYINISGDNKKGVLNFDEGECLPFWTTIWNESDRKESKFLLNKRVTGSENSYADFTKEAIVDTIKMLPNWKASGCDGVYNFFIKSFTSIHEHLCEEIQKIINDEYTPGDWFYTGITHLIPKVDVCNSPKELRPITCMPNLYKLLTKCVNKKLSEYIESYDLLSDNQLGTRRMCQGAKEQALVNQYLNQRNGSNLCSTWIDVKKAFDSVDHEFLGEVLQNSGLPFWIVSFITKLVGKWKIRLNLEGKVLGEIRIRRGILQGDSLSPQIFALLMDPLSRILNGKFPKVTMGSPGNGEPTYATNHLLFMDDIKLFSHKSDSMVMMMEEVDSFFDAAGLERNFDKSATNVKSLSGKARFLDGLDGYRYLGVLEDKNSNVLKGEIMNKIYGEVSKRIKNLTKTDLNSVNLFKAMNEYAISLYNYYIGLIDIEPGEFEQIDKNIRRILMDSHIHLQPANKERLYLPRNKFGRGLESVSNKAERMLLQFYSDLEHKANYCLRRAGILRVINSKKIHMATIVEFISRKYNIENVKDLTMLKLMEIQHEYLLGKIEEKSLHSILFECLKDTEVNIAESSGWLVHGNHSPVTEGRLCLLQDRNMFFDNGEAKCKHCNSGKKTVDHLATRCGRMLNSSYLRRHNEVVRCIHLHLCRQYGIRKTKKLKTHSVQSVVSNEFVEIRVDTTISTDTAVQNNKPDIFVHDKVRNTITLVEIGITSQNCLKQVEVEKFHKYDLLANELGCIHRAKVKIIPVVITWDGIVSRFFKGHLDALKLEERVKAYIQTLVLRKTLESMQAEDRHGVSIPDEEEADKECRPRGVSECGLCDNENTPILTIDVGPKKRRLAN

SEQ ID NO: 19339 - protein, 933 aa, Rhinocypha anisoptera
MARQQQIFHRCPALSHDCLGGRLVWIRGQIRECQKAFKYNFTVLAKCSNIPTCNKFDSCTHKFHFILEPTRKCEERRASQWLCWLCGVRYNSCSSLLLHLESSHGTSPTLRCKLCHRPKPNLRSLSQHYRWCFIPPEVNSRPRPHFRPPLGRPTNLSSLLEDIHDLNDSPFRKLCLTMFEINSVIDIDAIYDAFTTLLPQTRGKRKKRRSNNNQQSQNNAPHSQRVTEFALNQELYKKCKKRLVYKLLNQSTSPRCTDPTPIFEHFKQLFSTTSEACPAPNVTSSSHSIRQHIEPWTIEIFLKKKLRSCPGPDRYTAKHILPFINELAVVLNFCLYCCRIPKRWKHSVTHLLPKSRQHNSFRPISISSICYRAFAAHLSLRLARHLSSDEQKGFVSGDGIFEALTVAKHFAYSTNKLIVSLDVSRAFDSISHLAILQTAANKGIEYFSLCLLKDLYINCTTQIKLEDYLSGSIDLRRGVKQGCPLSPTLFNLCLDPLLSKVNNGSLGASLGTRKLAAICYADDILLLSDNRSSMQSLINEVCSYLSTIGLEINPAKSCNIGPRSTLLASNSILPSVLSTRYLGIKLNRSDEPVLDVSSLKANLEIIKKALLRPYQKIVIARHYIIPKYFFAATNSRIVGFALDEADLAIRDFVKDTLHLHSTTPSSFIHLKCRSGGLGFAQFRYDIPAHYLRRFNNLLQCQWWPAITIANLPIHATNQNRIAQLAAPDLDNQQRLMNDLSLIPDTKGFKCFSNRFNIGNQFLYMNWRIPFKMLKNSIKLRCGYLIFNDPNDPKQCTQCQGIVSQFHALNQCPSMSNAFAWRHNQILKTLTYHLRKNNISFFQEPSIPTRYSFIKPDLIVIRDDDVFCIDLACPYENSVSSLRDATSRKTAKYGWHRRYIEDWLRCLTSLVAPFIRGNKPVIPILQYLYIYIYK

SEQ ID NO: 19340 - protein, 1227 aa, Aurelia coerulea
MGDIDHDNQIEQTNNVNHGSSSITVAQETCVDDNGDHGENSVRKRNFGGWTENEKIRITQIDIDERQKGPGFMKRIKERWDTEFPSRRHITAQNLCDNARRFRKSLEMQAAPQVANESRESSTKEKNLQWTTEMKVKLVEIDTEERQKGRGFMSRVKSRWDVEYPTYAATIGAQRLRDNASRFRKEKEISILVLVRKRSQVVRVEEGLEPRRTGESSGRDQGENANEEEVHIAEEVIEGMHCGVEDLQESGENEMTEDDKELENMFLAELERLERSNLTEIQERDKLPKLKMPDELVKRSNRVLSKYLDEKSEIPEISDFVYAMGKAVASTLGIKAKEKRQNNKAKDGNRRERKVKCEMKELRQWIARISNEVHRRKEHRKATWKEKQLLKELKVRIPGKKTTTTALMIHREELLDKLRYMKVKLEKMLAKGKRARNNALFRKDERQFYRNVNESKSRTGKVPNINEFVAFWGGIWEDEKVTPFLPWMDEVAGKLKRMVVEVKEFDVTEEKLIEVIKKRKNWSSPGIDGIQNYWWKWFKTAQQALCRALQRLKEDHSLIPDWFPAGRTVMLPKTDVLSNVKERRPITCLNTSYKIYTGNIGKYMREHACNNGIWDEGQLGGVEDVLGTVDQLLIDNCIMEEVRRHRRNLAVAYYDYRKAYDSVHHDWMLRVFDWIGIPKDIRLVLQELMKRWKTRLEVWDDNKKCVSRWINISCGFLQGDSYSPVGFCLTEIPVCILLSQTRGYRMGPPGEREVNRTHSLFIDDLKVYQESHQQLVAVNEMLVQASHDTGACYGISKCAEIVFEHGRMVKGEGLNVLEERMRALDPDENDTYKFLGVEQAEGIKVKEVLIRVKAEMQNRLRTLLNAELYDKNLIRAINNKVMPVAAYVMNVCNFSKGELEELDQMIKRELRSNNMLGRQSSEERLYLKRKVGGRGLKSLRVVYTETKIRVACYMAASESRWIKVAWKQEKSKEYNSLKTAAEEMINEIGHALKFKDEGIELDGELQIGNWRKSWKKIKDVLRKGNEMLLIEKYKQKQFQSETYSKQETECHMWLECNLDPRKTAAIVNLQEQMVETKSWKVSRGIADGGDMCRLCGSFRETVHHLLAGCQMLAGKEYLQRHNKALMVLAVAWAKRYEIIDENIVWYKEKWEKGKVFENMKGKLVWDFEYKLRQSSSARRPDLTLEDKETKRIWICDMACPQENNIEAKVLGHPFSEISGTHMIYKCI

SEQ ID NO: 19341 - protein, 1098 aa, Beroe forskalii
MGIIHRKQHDTEGGSEIEIAIEKAREEVDHAVGIEPGDTKVPDIIENHDSRQERNVERIVSWEKAQINFDERVEPSPSDFEIKERTKKIKDDEEWERVNQRFKETFTEKSEKMESNELDELLKLFKQVVYGTLKDIGGEGGEENQPPKSMRWIDEEKKRVRKLKNEAKKNFKRMLRDEETEQEALSEQNRHCKKLIRLHSKLKRQEDAINGHVKRKENTKAFCQNPYAFIKRNITEKTEMQKITPESSQEEANVFFQERYRDVERSRKIPFPHALPYPKKPVYYMDMSAPSDEEIYEYIKSRRNKSAPGPDGIPFIVFKKCPDIRKVLGVVVRRIFSENWIPSADRTAVKILSHKSGSRKLDNFRDITLFNTTLKTAMGIWARRVRKYMMVNKYFDTDLQKGFLPKISGCLEHNQTVVDILKEKISIGEDVYIIWMDLQNAFGSIQHNLMSAALAFYGVPERAIELIMSLYSDCSVKVVTQDWTSHPVRIEKGSLQGGPEAGLCFNIAWNLGLEFLMLVALHIGCKKQDKPVAGFVDDVTLSAQERSQVRALVSAAEKFCKWAGLKFKDAKCKAMGIVDGSLVNPLIAVNNKIVPAMHKEPFKFLGRWVYPAFEEKEERMIVEKFKKLMDKTNSINIDERKKAWIYENGVLPSMSWDFMTYHFTEQGIVEMEKITNRYLKKWLRLCKSADPSILYRKEKGMGIREVRSVCMQGQVRREVILCCSRDKAVRRTSSARREAEQIKERKWNPAEKLDEAVQRVTYARNFKSQQDRRGLGHGVYTNKPLQRKEITDEVKRITDEEMIPHITSLAMQSKWTKWDEVIEMDMKWKEIMYGMSPSMLSFYMNAVQDTLPHPQNLRRWGKGQEAACALCGWKNAGLPHILCGCKVALDQGRVSYRHDSILKVIEGALKEKIEAITEPIPIHDTIKEVKFVKKGQRVRKEKDKKKKHVGLLDHADDWKMNVDTRKNQIHFPPHITTTSDRPDIVLYSESSKTVIMIELTSPVEENMEKWREIKKTKYEKLAENIREMGTWKPWVFTIEVGAIGYVAKRTQGLWKKLGVGDKEGKQLSKKISRTALRSSHFIWISRNTKEWGEPGMER

SEQ ID NO: 19342 - protein, 994 aa, Beroe forskalii
MFSEQSEKMESNELDELLKLFKQAVYGALKDIGGEGGEENQPPKSMRWIDEEKKRVRKLKNEAKKTFKRMLHDEETEEEALTEQNRHWKKLIRLHSKLKRQEDAINGHVKRKENTKAFCQNPYEFIKKNITEKSEMQKITPESSLEEANVFFQERYKDVERNRKIPFPHALPYPKKPVYFMDMSAPSDEEIYEYIKSRRNKSAPGPDGIPFIVFKKCPDIRKVLGVVVRRIFSENRIPSEDRTAVKILSHKSGSRKLENFRDITLFNTTLKTAMGIWARRVRKYMMVNKYFDTDLQKGFLPKISGCLEHNQTVVDILKEKIGIGEDVYIIWMDLQNAFGSIQHNLMSAALAFYGVPERAIELIMSLYSDCSVKVVTQDWTSQPVRIEKGSLQGGPEAGLCFNIAWNLGLEFLMLVALEIGCKKQDKPVAGFVDDVTLSAQERRQVRALVSAAEKFCKWAGLKFKDAKCKAMGIVDGSLVNPLIAVNNKIVPAMHKEPFKFLGRWVYPAFEEKEEKMIVEKFKKLMDKTNSINIDERKKAWIYENGVLPSMSWDFMTYHFTEQGILEMEKITNRYLKKWLRLCKSADPSILYRKEKGMGIREVRSVCMQGQVRREVILCCSRDKAVRRISSARREAEQIKERKWNPAEKLDEAVQRVTYARNFKSQQDRRGLGHGVYTNKPLHRKEITDEVKRITDEEMIPHITSLAMQSKWTMWDEVIEMDMKWREIMYGMSPSMLSFYMNAVQDTLPHPQNLRRWGKGQEAACTLCGWKNAGLPHILCGCRVALDQGRVSYRHDSILKVIEGALKDKINAITEPIPIHDTIKEVKFVKKGQRMRKEKEKKKKHVGLLDYANDWKMNVDTRKNQIHFPPHITTTSDRPDIVLYSESSKTVIMIELTSPVEENMEKWRVIKKTKYEKLAEHIREKGTWKPWVFTIEVGAIGYVAKRTHGLWKKLGLGDKEGRQLSKKISRTALRSSHFIWISRNTKDWGEPGMER

SEQ ID NO: 19343 - protein, 1153 aa, Odontocolon sp.
MADTSSEASDADDPDPGSPVADLSAEDGINDDDNGIQEVNEWIIAVPLLEGGQECGPCRAGNRRRGFLVEKDLAKHMGEEHPRCTVEYQCRGCDRLFPGLRNWHAHKGKCRGRPIAVNAPPPQEAQYVCTRCGRNFETRIGRSQHERHEHPAERNETRRREAERPKGKQGRRRYGWTEEEEVRLIELERRFQGERNINKEIAALMPGKTAKQVSNKRRRVTAVPEAEQAESSMEESPERIGNRSAGYFSAEEEMEEEGEAVEGENDTTEEWKERMEEYFLSVEVAEGNKYRNIKEALVRIWRDKKDHPEELKEELDEWVTSALNPLLLGDAEEREGNRERRRRQAGTRARQAGTRPLNSSQRKRFKYARCQDMYANCPKKLAEIALTGDFSFVEARKEAPPAREVANLSEELWGSEGPQDIRMEEAIEEVRIFEDFKPITVEEVKKRIGKIKSSSAAGLDKVKKCHITRTEVAEVLAILFNILVSGNYYPKAWGQNRTTLIPKPGKDHKDVKNWRPITVGSLVGRTFSAIFDQKLRGFIQQSIRQKGFTAEDVCRANTLILSEAISDMKWKEGGVVMVADVSKAFDTVPHGAMRPSLRRKGVPVYLVQMVEKMYENCCTSIKVENDEKVEVRLRRGVKQGDPLSPRLFNLAIDQVIEELEKEERGARMGEGNLSVLAFADDIVLIGKDRKSAQKQVDRLSGYLRGLGMSLSAPKCTTFQIVPKGKSWYLKNPWLEIGGVEIPETSAEETLTYLGAKISPWSGLQRGKEVPTIIKAVRNVRQLGLKPHQKADIIQTYILPHFMYELALSPPAPGTLKMLDSSIRQEMKEILHLPISTATGFFYTPKRDGGLGLLRIQRAIHLASLKQGVKLLESRDPVLGEIRQRREFENRLDKSAHALRVEKPANMEEYEAVRRQTREREAGSWAELVSQGHGVKDYRGDKIGNYWLRDPILLKPSRFLNAIRLRTNTYGTRVVLSRTTANAATQCRRCGLQPETLGHILGQCVHTKPLRIKRHDEIRDLLAERLSRKVPVFKEATVMNDEGELRKPDLIVKLSNEVAVVVDVTVRYEYRTYIADASREKKDKYEGIAKKVAERIGCKKGVVMPVVVGSRGVLPRETLSNLRNLGITKKDQLTVSMIALRASIEMANTFIDYD

SEQ ID NO: 19344 - protein, 1187 aa, Apodemia zela
MMDRRNIRLRKEPLPGGNRQGSSGAGAGRGSMRAASRGLAQPSGQSVYPPSPPGGLVSAESSQAQQMAPAPGGVRRMRWTSSQNMNVMRAYYRAIGGETCRTGYRARLYQEFQLLEPTLSVTEQNLADRVRYILRSNMFSADHLERLRTEVTQSASLTDPAVLQCNVPTLTRVEKDLSVSSTVDVGEVASLELDRIKKCLEETVLEYRNIPLHERPRLPRIPCSRRNLSIISAVNNTLPLHLSNNASIEETNTLLFGAAVTVCQSIGVNISPSSHQSAQKTVNKVPRWRVRIERRITEARVLIGKLISFRSGNNRPRIMRFVRAAFAGSESEELKKNMHQMVTLRIDELKQKISAWGKRIRRYSQRVERYRQNCLFRSDQKKFYKYLEQVSPYQNTTTPSATECVAYWRDIWSQPKVHQEGSWMSSVLESCTSIASMDPVTITEDDVAQALRRAPNWKTPGVDGLHHFWLKRFANCHAVLAHQFQEALQHRNLPEFLTMGVTHLIPKSSVTDDPAKYRPITCLSTTYKTLTSILKSKVDGHLQLNRILSPVQNGCRSGGRGTKELLVIDTVASQVVLRNRRNYAAAWIDYKKAFDSIPHSWLLRVLELYKIEKTVRDFLETCMLQWRTALYLSGQRISDFGDPIWIKRGIFQGDCLSPLWFCLSLNPLSTLLEKSGTGFQFRRGGTRCSHLFYMDDLKILAPNPVGLEKLLDITSSFSSDIGLEFGIDKCAVIHVERGKVAQTREVPTSPAPIRFLSEFETYRYLGMSQNLGVREAEVKQSVCEAFFERLTKVLNSYLTGANKIRAYNGWVIPILLYTFGVLKWTQTELDALDRKVRTTMTSHRMHHPRSSIMRLYIPRKCGGRGLLSIKDMHNREVCSLRNYFLTNTSGLMYLDVIECDKGLTSLSMANEDWQTPAILSSSEREGIWKAKELHGRFYKVLHESHVDFKSSVHWLRYGDLFGETEGFVCAIQDQVMKTNNYRKYILKDGTVDICRLCRYTGETLRHITSGCPMLANTDYLHRHNLVARIIHQELALKYQLIDRRLPYYQYTPEPVLENDLAKLYWDRPIITDRTIFANKPDIVLMDRTQSLVSLVDVTIPFDENIVKAESEKRTKYLDLSHEITDMWGVTSTEIIPIVLSVNGLIPTSLGHYLQKLGLRDGIVIPKLQKAVLMDNARIVRRFLSISP

SEQ ID NO: 19345 - protein, 1110 aa, Apodemia mormo
MRWTSSQNMNIMRAYYRATGGETCRTGYRVRLYQEFQLLEPTLSVTEQNLADRVRYILRSNMFSTDHLDRLKTDAAQSAPLTDLDPLQNNVPTLTRAENDLSASSKVDDAMASLELERIKTSLEETLLKFRNIPFYERPRLPRIPCSKRNLSIVNAVNSTLPLYLSKSVSIEETNALLFGAAVTVCQFIGANISPITEQNTQRPANKIPRWRVRIERRITEARILIGKLISFRSGNKRPRVMRFVRAAFAGSESDELQKDMYQAVTLRIDELKQKISAWGKRIRRYSQRAERYHQNCLFRSDQKKFYKHLEQVTTTQNLTTPSATECIAYWRGIWSQSKEHQEGPWMSSVLESCTSFASMDPVSITEDDVVQALRRAPNWKTPGVDGLHHFWLKKFANCHAVLARQFQEALQQRNLPGWFTMGVTHLIPKSSVTDDPAKYRPITCLSTTYKTLTSILKSKVDGHLQLNRILAPVQNGCRSGGRGTKELLVIDKVASQVVLRNRRNYSAAWIDYKKAFDSVPHSWLMRVLELYKIDKTVRDFLETCMLQWRTALCLSGQHISDFSDPIRIKKGIFQGDCLSPLWFCLSLNPLSTLLEKSGIGFQFRRGGTRFSHLFYMDDLKILAPNAVGLEKLLNITSNFSNSIGLELGIEKCAVIHVERGKVAQVREIPTSPIPIRSLSEIETYRYLGMSQNVGIREAEVKQSVYEVFFERLAKVLNSYLTGANKIRAYNGWVLPVLLYTFGVLKWTQTELDALDRKVRTIMTAHRVHHPRSSVMRLYIPRKNGGRGLLSAKDMHNREVCSLRNYFLTNMSGLMYLDVIECDKGLTSLSLANEDWQIPAILTSTERQGVWKGKELHGRFFNALHEPHVDFKSSIHWLRYGDLFAETEGFVCAIQDQVIKTNNYRKYILRDGTIDVCRLCRQPGETLRHITSGCPMLANTDYLHRHNLVAKIIHQELALKYQLTDRRLPYYQYTPKPVLENDHVRLYWDRSIITDRTIHANKPDIALMDRTQSLVFLVDVTIPFDENIVKAESEKRTKYLDLSHEITDMWRVTSTEIIPVVLSVNGLIPTSLGHYLQKLGLRDTVIIPKLQKAVLLDNTRIVRRFLSLSP

SEQ ID NO: 19346 - protein, 1186 aa, Apodemia mormo
MMERRNMRMRHGPLPGGNRQGPSGAGAGRGSMRAASLGLAEPSGQPVYPPSPSEGLVSAGSSRAPQMAPATGGIRRMRWTTSQNENVMRAYYRATGGETRRTGYRVRLLQEFQLLDPLVTVTEQNLSDRVRFILRSNIFSAEDLGRLRDEAGFVAQLEDEAVSPSETERNYIIPEAQQVNDDSALQLAPAESEQIGKILEENVLKYKLTPISERSHLSRITLSKKNRSVVNTVNQLLTRYLENSKSLDETNSIIYGAAVTVCQCTNAKIFPPTRQSKNQSFTSKPQWQIRIERRITKARILIGKLISFNTGNRRPRVLRFVTAAFAGLEFDETSQDAYKKVTLRIDELKQKIAAWSKRIRRYSDRVLRNRQNTLFKKDQRKFYKQLDGVLGSDVAEQPIPTGFMEYWRGIWSQPGVHNEDPWMETVKEACTKITPMDPVSITTEDIADALRKTANWKSPGRDRLHYFWLKNFNSCHTTLAQQFLQVIENRNPPNFFTVGMTHLVPKATATSDPSQYRPITCLPTIYKVLTSILKSKIERHIECNNILSPSQNGCRTGSRGTKELLLIDSVASHIVKNNRRNYSAAWIDYRKAFDSVPHTWLLRILELYKINNLIRGFLGACMERWSTDLYLFGQRLSDAKDQILIKRGIFQGDCLSPLWFCLALNPLSTLLEKSGLGFQFRRGGTRLSHLFYMDDLKLFAPNTTGLEKLLKITYDFSNSISLELGVDKCAVIHVERGRVVQTRAVDETLPHLKHLSETETYKYLGMSQSIGVKETEMKQSVREVFLERLTKVLKTYLSGVNKVRAYNSWVIPVLLYTFGVLKWSQTELEALDRRVRTTMTYHRMHHPRSSMMRLYIPRKHAGRGLLSVTSLHNKEVCSLRAYFMTKTTSLMHCEVIGCDVGLTPLSMAKTDWQGPIVLSKGDRETVWKNKELHGRFYKSIREPYIDFKRSVNWLQYGDLFGETEGFVCAIQDQVIKTNNYRKYILKDGTVDLCRLCHQPGENLRHVTSGCPMLSNTEYLHRHNQVAKILHQELALKFRLTEKRCPYYQYVPEPVLENSQAKLYWDRPIMTDRTIQANRPDIVLVDRAQSAVFLVDVTIPYDENLIKSEADKRTKYLDIAHEITDMWQVTSTEIIPVAISTNGLITKSHSTYLEKLGLHAGKIVPMLQRAVLLDNARIVRRFLSLSS

SEQ ID NO: 19347 - protein, 783 aa, Apodemia mejicanus
MEYWRGIWSQPGVHNEDPWMETIKEACTKITPMDPVSITTEDIADALRKTANWKSPGRDRLHYFWLKNFNSCHTTLAQQFLQVIENRNPPNFFTVGMTHLVPKATATSDPSQYRPITCLPTIYKVLTSILKSKIERHIECNNILSPSQNGCRTGSRGTKELLLIDSVASHIIKNNRRNYSAAWIDYRKAFDSVPHTWLLRILELYKINNLIRGFLGACMERWSTDLYLFGQRLSDAEDQILIKRGIFQGDCLSPLWFCLALNPLSTLLEKSGLGFQFRRGGTRLSHLFYMDDLKLFAPNTTGLEKLLKITYDFSNSISLELGVDKCAVIHVERGRVVQTRAVDETLPHLKHLSETETYKYLGMSQSIGVKETEMKQSVREVFLERLTKVLKTYLSGVNKVRAYNSWVIPVLLYTFGVLKWSQTELEALDRRVRTTMTYHRMHHPRSSMMRLYIPRKHAGRGLLSVTSLHNKEVSSLRAYFMTKTTSLMHCEVIGCDVGLTPLSMAKTDWQGPIVLSKGDRETVWKNKELHGRFYKSIHEPYIDFKRSVNWLQYGDLFGETEGFVCAIQDQVIKTNNYRKYILKDGTVDLCRLCHQPGENLRHVTSGCPMLSNTEYLHRHNQVAKILHQELALKFRLTEKRCPYYQYVPEPVLENSQAKLYWDRPIMTDRTIQANRPDIVLVDRAQSAVFLVDVTIPYDENLIKSEADKRTKYLDIAHEITDMWQVKSTEIIPVAISTNGLITKSHSTYLEKLGLHAGKIVPMLQRAVLLDNARIVRRFLSLSS

SEQ ID NO: 19348 - protein, 783 aa, Apodemia virgulti
MEYWRGIWSQPGVHNEDPWMETVKEACTKITPMDPVSITTEDIADALRKTANWKSPGRDRLHYFWLKNFNSCHTTLAQQFLQVIENRNPPNFFTVGMTHLVPKATATSDPSQYRPITCLPTIYKVLTSILKSKIERHIECNNILSPSQNGCRTGSRGTKELLLIGSVASHIVKNNRRNYSAAWIDYRKAFDSVPHTWLLRILELYKINNLIRGFLGACMERWSTDLYLFGQRLSDAEDQILIKRGIFQGDCLSPLWFCLALNPLSTLLEKSGLGFQFRRGGTRLSHLFYMDDLKLFAPNTTGLEKLLKITYDFSNSISLELGVDKCAVIHVERGRVVQTRAVDETLPHLKHLSETETYKYLGMSQSIGVRETEMKQSVREVFLERLTKVLKTYLSGVNKVRAYNSWVIPVLLYTFGVLKWSQTELEALDRKVRTTMTYHRMHHPRSSMMRLYIPRKHAGRGLLSVTSLHNKEVCSLRAYFMTKTTSLMHCEVIGCDVGLTPLSMAKTDWQGPIVLSKEDRETVWKNKELHGRFYKSIHEPYIDFKRSVNWLQYGDLFGETEGFVCAIQDQVIKTNNYRKYILKDGTVDLCRLCHQPGENLRHVTSGCPMLSNTEYLHRHNQVAKILHQELALKFRLIGKRCPYYRYVPEPVLENSQAKLYWDRPIMTDRTIQANRPDIVLVDRAQSAVFLVDVTIPYDENLIKSEADKRTKYLDIAHEITDMWQVTSTEIIPVAISTNGLITKSHSTYLEKLGLHAGKIVPMLQRAVLLDNARIVRRFLSLSS

SEQ ID NO: 19349 - protein, 1363 aa, Limenitis arthemis
MEQSGSKYNLRSLPGVRRGASGAGAGCYSMRDTGDGVLSRRAPVTQDITADRRELNGRTPDVEVTAEVLGHPKRYMTRSKSGWSCTTTSNNRGFEKDLGQSTSKASSPTTSTISLFSSIPSTVPSYRVSRTTSIDTDMSEDVAQETNSVTYPEPTFGRTRKRKKWSYEMNEYILRTYLQITLMETQTNDYLHILHTKFTEKFPDMQVTKQRLGDQRRAIMRNSLLPQKTIDDIYKEESCQTLCIGESLEKNRNIQTPSRQTIEHTLVKRKMRWSVYLNEEVMRLYFRVTHLETNKTNYRKYLHEEFINLFPQLDHITEQRLSDQRRLIVNNKYLSECRIDQIKQEVARELQVMTNTDLQITNKIDTERPGTQEHEEVPTESNQNFIFSINPDLFCDDHTRSHSNTEDTETNKIFKKVLEYYKNTIPTEREFIPKQASTKKLAIIVEYINKNILPQYLNAETDFSTFQVILYCAAWTASKVNGAKIELPTENDRQTIDKRRKLTKPKWQIRLERKIDDLRTKIARLTQYSKGNRSKKIVKHVENIIKQYNTHTIHEEHNTQIIHFLDTLKQKLAVVTSRLRRYKQCTLRKTQNCQFTFNEKQFYRSLKKSSANDTIQNNTNSLPSLPEKIRQVWSQIWENPANHNNDANWIQDEQDKHSETTTMEFEYVPSDTFQTVLKKLHNWKAPGTDHIHNYWYKRFTFIHPFLLNYINTFLENPQSMPEYISTGITFMLPKDEKDLNNPLKYRPITCLQTIYKILTSCLTHLIYNHINANSLLAEQQKGCRKLSQGCKEQLTIDSVILKQVQRDKRDLFTMYIDYKKAYDSVPHSWLLKVLEIYKINPKIIKFLECTMARWTTRLRLPSQTTFETEPIKILRGIFQGDALSPLWFCLALNPLSTTLNNSNTGYKLINRLTKKETLFDHSYKINHLLYMDDIKLYADSQAELESLASITESFSRDICMEFGVEKCKINSIKAGQTYEHHFQLQTGQIIDSIDDNGTYKYLGYTQSKQIHDQEIKATLSKLFKHRVNSILKTQLNSTHLVKAINSFAIPVLTYSFGIINWSQTELKKLQRSINSNMTKYRKHHPRSCLQRLTLPREEGGRGLIDILNLHNSQITTLKKYFHQKSDSSDLHKAIVYTDRKLTPLNLYNRQTQKNEKLTDIQTKIEEWKKKSLHGRHYKDLNLQNIDKAASNEWLKRGELFPETEGFLIAIQDQIIETRNYQKYIIKTPNLLTDLCRRCQSSSETIQHITGACKVIAETDYKHRHDQVANIIHQNLACKYKLIQAIKPHIPYYKYLPETVLENETHKLYYDRAILTDKTIHFNRPDITVIDKINKTALLIDIAIPNTHNVQDTVLYPVRYGCLV

SEQ ID NO: 19350 - protein, 1010 aa, Matsumurasca onukii
MSQSTSNGASCCIPNNRDPRYFRPQYTYYLDSSSGSLPSQNSSQQSSNSSDSGTNRVPMVDNNILWPCNICQKMLKTQKGLKLHMNYCFKKKTIANTSALPSMLNHAGPTSTTLPNLPGFTSLILNLNVESFSDLIAGLKRNVPVLKRIPKGARIIAAEKLSNRILECIRTNSVAAWTSLMLFSFDCLKVPDKDGKKSLTSLVKENVLSGKRPEIKERRIKPFKVEQLVINKINDFDTKGALRVISSNDTLADVNDENYAKLLTMHPTASRDLQMPEPPNETLPFLQVNANQVSKSIMSFPNGSSSGFDGLSPQHLKDMISFSANAQGKKLLENITKLVNFMLSGKINPEVLKYLYGANLCALNKKDGGLRPIAVGCVFRRLTAKLCCQAVQEKCRVYLQPFQLGFATKQGCETIIHATRTLIEQKHQSNFVLFKLDYKNAFNSVERDILLQQVKDHVPELYPFLWQCYSSSSLLLFGNKTIESQVGCQQGDPTSSLTFSLAIHPIVLKLKSKLKLFYLDDGTLGGDPDTVLEDLNVLIAESRKIGLTVNPNKCELYFPTSLDPEIERKFRNILPGIQTIHSSELSLLGSPLCIEGFQTAINQKFDSLNIMIERLKTIPKHVAYYLLKNCLGIPKMLYTLRTVPTFIFPQILATIDDAIKSSLEDILNLKLSDMQLKQASLPVNYGGIGIRSVTDLSLPAFLSSFSGVMPLVSNILNITVDNLVLTSWNSGVEEFERKYTDLPLNKDTQHEWDNILLKNKVEALKFDTIEDLARIKATQSKESGAWLHAFPSEKIGLLMDDCTFQISMGLRLGCRKFKCICGEIIDTKALHPLSCVKNTGKFYRHAEINNIIKKALASADIPAQLEPTGLDRNDGKRPDGATVVPWSKGKCLAWDFTCSDTYAKSYLKQTSERAGAAAEMATKRKHNKYTNLKSKNTHFVAVAVETSGVWGEEAKDWINQLGSKLIDKTKDNRARSFLVQTISMAIQRGNAASISLAMAAEEASLPIFYL

SEQ ID NO: 19351 - protein, 1033 aa, Crotalus adamanteus
MLTDTVVLRPPGLPDPSCPGSCPRVASPKSDAECPKHSCPCGSEFGTKRGLAMHRFHCHPAEVNAERLATLPTKKLVWTQEEMDGLLRHANGAWKEGMLKTQIFTSLMPHFPGRSAEAIKKRLQSLKWVPARDNPERNSQPLHATSGNVAPATLPTPDPSRVDDQGANIEDPAASWRRALLAAAADHLKEPKLGAGTLKQITQDLLNGKISSGECRVLMGEHAQHWFPHTWKPSSARPEPKARQWKAREIRRANYAAVQKLYKLRRRDAAQAVFSGSWRNAYRGRAPQPDKMDQYWAEVFETASATDVTPPGSPSEIYWSVVSKITPSEVADALKGMRNSAPGLDRITAEELLTWDHPSLAAYYNLMLAAGGPPEHLACSRVTFIPKVENPQTPGDYRPISVASTVLRAFHKILAWRLRDTLHLSPFQHGFLQRDGCLEATALLHTILRKVHNSRKSCAMLFLDVAKAFDTVSHQTLFRVAVELGLPPPLVNYLRCLYSRSTVRLADKATKCGRGVRQGDPLSPLLFIMVMDDIVRKTLPEVGFDLDGQRVDSLAYADDLVLLAEKSPRLQDKLHLLSEALRKAGMSLNARKSRGLTITKVSKRKQMVTTPTTYECEGEPIKPMGTDDSVRYLGLHFNWKGRIVPKHTGKLDSLLKELTKAPLKPYQRLQLLKFHAVPKFTHELVLGHAHRNTVKKLDCLTRAAVRKWLRLPQDTPLGYLHANVKDGGLGIPCFSTSIPLLQKKRFEKIATNPATIFQIMQRQDSFRTQGRRLDKPCRLNSTVVTSKTEVREEWGNMLSNSIDGRELRHPEVDKASHEWLLRPDRVFPRLHMRGIQLRGGLLPTKARSGRGNNRQVTSKTCRGACQNVETLNHILQVCDVTHDARCARHNRVLHRLERLLHKKGLRTTLEPVIPAGSSFIKPDLIIETDTHTYVLDVSVVAGYRMTESWDIKVEKYGRPDRVEAIRKWAAIPATKRVEHLPVIVSNRGLCYQPSGDGLRALGLTSRDISDLCLLAISGSLRCYDLYMRGTRAV

SEQ ID NO: 19352 - protein, 1041 aa, Bothrops jararaca
MLTRTDDPRPPGHPDPSCPGSCSRDCRESVAESPRHACPCGCEFPTKRGLAMHRFHRHMAEVNAERLATLPTKKLAWTQEEEAGLLRHASQAWKEGMTKTQIFAAVLPHFPGRSMEAIKKRLQSLKWVPPQNTPERNLQPLHATSGNVAPAALPSPDSSVKVDGQGQNTEDPAASWRRALLAAAVDHLEEPKLGAETLRQITQDLENGKISSKKCRVLMNEHAKHWFPHTWKPSSARPEPKARQWSNREIRRGNYGAIQKLYKLRKRDAAQTVLSGRWRTAYRGRAPMPAKMEEYWSEVFQAPSATDAIPPGSPSDTLWSVMGKITSSEVTAALKGMRNSAPGLDRITAEELLTWHQPSLASYYNLMLVAGGPPKHLACSRVTFIQKVELPQTPGDYRPISIASTILRALHKILAWRLRDTLRLSPFQHGFLQRDGCLEATALLHAILRKVHNSRKPCAMLFLDVAKAFDTVSHQTLFRVASEMGLPPPLVNYLKYLYSRSTIKLADKVIKCGRGVRQGDPLSPLLFIMVMEVIVREALPEVGFNLDGQRVDSLAYADDLVLLAEKSTRLQEKLERLSEALRKAGMALNARKSHGLTVTKASKRKQMVLTPTTYECEGDTIRPMGTDDSVRYLGLHFNWKGRIVPKHTGKLDTLLKELTRAPLKPYQRLELLRFHTVPKLTHELVLGHAHRNTLKKLDCLTRAAVRQWLRLPQDTPLGYLHAHVKDGGLGIPCFSTSIPLLQQRRFEKIATNPATIFQVLQRQDSFRTQWRRLDKPCRLNSTVVTSKVEVRKEWENMLSNSVDGRELRYPEVDKASHEWLLRPSRVFPRLHMRGIQLRGGLLPTKARSGRGKNRQVTSKTCRGACQTVETLNHILQVCEVTHDARCARHNRVLHHLEKLLRKKGIRTTLEPVIPAGSSFIKPDLIIETDTKLFVLDVSVVAGYRMAESWSIKVEKYGRPDRVEAIRRWAAIPEEIRVEHLPVIVSNRGLCYRPSGDGLRALGLTSRDISDLCLLAINGSLRCYDLYMRGTRATRETERHLP

SEQ ID NO: 19353 - protein, 1033 aa, Crotalus tigris
MLTDTVVLRPPGLPDPSCPGSCPRVASPKSDAECPKHSCPCGSEFRTKRGLAMHRFHCHPAEVNAERLTTLPTKKLVWTQEEMDGLLRHANGAWKEGMLKTQIFTSLMPHFPGRSAEAIKKRLQSLKWVPARDNPERNSQPLHATSGNVAPATLPTPDPSRVDDQGANIEDPAASWRRALLTAAADHFKEPKLGAGTLKQITQDLLNGKISSRECRVLMGEHAQHWFPHTWKPSSARPEPKARQWKAREIRRANYAAVQKLYKLRRRDAAQAVFSGSWRNAYRGRAPQPDKMDQYWAEVFETASATDVTPPGSPSEIYWSVVSKITPSEVADALKGMRNSAPGLDRITAEELLTWDHPSLAAYYNLMLAAGGPPEHLACSRVTFIPKVENPQTPGDYRPISVASTVLRAFHKILAWRLRDNLQLSPFQHGFLQRDGCLEATALLHTILRKVHNSRKSCAMLFLDVAKAFDTVSHQTLFRVAVELGLPPPLVNYLKCLYSRSTVRLADKATKCGRGVRQGDPLSPLLFIMVMDDIVRKTLPEVGFDLDGQRVDSLAYADDLVLLAEKSPRLQDKLHLLSEALRKAGMSLNARKSRGLTITKVSKRKQMVITPTTYECEGEPIKPMGTDDSVRYLGLHFNWKGRIVPKHTGKLDSLLKELTKAPLKPYQRLQLLKFHAVPKFTHELVLGHAHRNTVKKLDCLTRAAVRKWLRLPQDTPLGYLHANVKDGGLGIPCFSTSIPLLQKKRFEKIATNPATIFQIMQRQDSFRTQGRRLDKPCRLNSTVVTSKTEVREEWGNMLSNSVDGRELRHPEVDKASHEWLLRPDRVFPRLHMRGIQLRGGLLPTKARSGRGNNRQVTSKTCRGACQNVETLNHILQVCDVTHDARCARHNRVLHRLERLLHKKGLRTTLEPVIPAGSSFIKPDLIIETDTQTYVLDVSVVAGYRMTESWDIKVEKYGRPDRVEAIRKWAAIPATKRVEHLPVIVSNRGLCYQPSGDGLRALGLTSRDISDLCLLAISGSLRCYDLYMRGTRAV

SEQ ID NO: 19354 - protein, 1035 aa, Archon apollinus
MQIQTDNTSTCTNNATSLNVTESVTLETNTNQQQEEVAENVKDAFIETLIKYKGTDPTLRPHIPKLQITHSTRNTINQLNQLIRAELEGITEPTLEEIHEIIYSGAIAAALIHRNKIYNQQENSTKKNKANLKPAWERRIETKISKLRKAIGQLTQYIKGNLSTRKSNSMDNKYQNKDEAIEDLDKNTQNLQALAKRLRRYKKSNQRHRDNQLFNTNQKLFYRTLEKEPIIESLPDIDELQQFWENIWSIPALHNPHAHWIKEEKEEVSNVEPMPQFIIEKEDVQQAIKRTLNWKAPGPDKIHNFWLKYFTSTHEHLAHAFNNLILEPTNISQFFTQGVTYLKPKDTDTSNPSNYRPITCLPTLYKLLTSIIAQKIDAHVTNNNIISEEQKGCRKGSRGCKEQLIIDTEIHYQARLKRRNMYYAYIDYQKAYDSVPHSWLIDVLKLYKIDSKVVNFLQLVMAQWKTCVNIKTQSTHLQSNLIKIKRGIFQGDSLSPLWFCLALNPLSKILNKTPHGYIIEKKTNIKISHLLYMDDIKLYAANRIQLENLLKLVEQFSIDINMKFGIDKCKINSIEHGKHKETESYYLAKENKFINSMDIRDTYKYLGYIQGVKLDHNKIKETLITKYKQRLNKILKTQLSARNITKAINTYAVPVLTYSFGIIKWTDTDLDRLNTTTRTQSYKHNIHHIHAATERYTLKRKLGGRGFTDIKNLHYRQIENLRTYMLKKANHSSIHKALTNINSSGTPLQLNDNSFELKDKLITDEQKIEKWKQKSLHGKYPHQLHQATIDHEASTAWLYKGNIFSETEGFMIAIQDQIINTRNYSKYIIKDPAVRDDRCRLCNQVSETIDHITGGCHVLANKEYINRHDNVAKQVHQHLALNHKLINTYTPYHKYKPKNVLENSNTKLYWNRDIITDKTVNCNRPDLTLIKKDDKTTYLIDISIPNNLNIEKKYNEKIQKYIPLAEEIKQMWHQETVKIVPIIISSTGLIPKHLIRSLKNLNIKEKLYIQLQKSVILDTCSITRQFINSSTFNNV

SEQ ID NO: 19355 - protein, 1002 aa, Lytechinus variegatus
MQPIAILLHGLLLCSPSSGPAVMIPVLSAACSIAAFIRFALPELPLTHWNDLDSDLAKRLAPLHHDLSSGAIPPSEAGDCFSILLQEFFGEIKDFEPKSNTSPYFERPPKTLNQVKRMKNRLRKKAFAKDATEDDRRNFYDALHTYDHLRGLDRRQERKRTTAREEKHFNSNFWDYCKRLVNGSLYSDTPRPSFSQEFADEYFTSRYQSPSEIITSDLNWIPDTAGPSTQATPPQFDTTPIRPSIVKNVLRKKSSHSTPGPDGLYYGMLKKLPCTHHFLATLYTKVMQTGIPPSNWSKSKVTLIYKSGDTSQPGNFRMISLSNVVGKIYHQVLAERFENFMIDNNIIDCNLQKAFLKGINGCTEHNLVMHEVLSHAKSKSRTVHVTWFDLADAFGSVSHDLIHYMLRRHKFPNSVQLYMKNLYSSLSGRVITKDWISNEFKFRKGIFQGDPLSPLIFIMCFDPIIQFLKHNSAYGYDLSGKRIITTPFADDFCLISNNKRTHQRLLNQIDKHIKSMGLSLKPSKCRSLSLTSGKFNELEFMVGEEQVSSIGNDIHKFLGSVITKNLASSDVHAYISNKLETRLKYIDDSLIRNEYKLKVYSRYLLPSLRFDLTVNDITHSHCLALDSVSNVYLKKWCGMPPSATLAFVHMPNDLNIPNISDVYKECHTLSYITMREQGDENVNHCLDTRLEREKKWVRKKSAIVQSDTVYSQIEQNSLKGKKTEAKKLLTQEVSEIWHSHVKNLLVQGRFLDLLSTEDNCVIWKIIMYNLPVRVLKFLINSVTDTTNTRANLVRWGKSVTNRCKHCKGLETLNHVLNSYPTFLSQGRYTWRHNNILKYFVRLATENTIDKPELQIFHDIPNMNGYSPASTIPVSCTQTNLRPDLFILNERSKRLLILELTVPFELAIDRAHQYKTEKYTALITDIENNGYRVDFLAIEIGSRGFLSKENTQRIKSFFYFLETRRTKFSLIRDNMSKMAVVSSFSIYCAKDESIWGDYNLLEQ

SEQ ID NO: 19356 - protein, 885 aa, Lytechinus variegatus
MKNRLRKKAFAKDATEDDRRNFYDALHTYDHLRGLDRRQERKRTTAREEKHFNSNFWDYCKRLVNGSLYSDTPRPSFSQEFADEYFTSRYQSPSEIITSDLNWIPDTAGPSSQATPPQFDTTPIRPSIVKNVLRKKSSHSSPGPDGLYYGMLKKLPCTHHFLATLYTKVMQTGIPPSNWSKSKVTLIYKSGDTSQPGNFRMISLSNVVGKIYHQVLAERFENFMIDNNIIDCNLQKAFLKGINGCTEHNLVMHEVLSHAKSKSRTVHVTWFDLADAFGSVSHDLIHYMLRRHKFPNSVQLYMKNLYSSLSGRVITKDWISNEFKFRKGIFQGDPLSPLIFIMCFDPIIQFLKHNSAYGYDLSGKRIITTPFADDFCLISNNKRTHQRLLNQIDKHIKSMGLSLKPSKCRSLSLTSGKFNELEFMVGEEQVSSIGNDIHKFLGSVITKNLASSDVHAYISNKLETRLKYIDDSLIRNEYKLKVYSRYLLPSLRFDLTVNDITHSHCLALDSVSNVYLKKWCGMPPSATLAFVHMPNGLNIPNISDVYKECHTLSYVTMREQGDENVNHCLDTRLEREKKWVRKKSAIVQSDTVYSQIEQNSLKGKKTEAKKLLTQEVSEIWHSHVKNLLVQGRFLDLLSTEDNCVIWKSIMYNLPVRVLKFLINSVTDTTNTRANLVRWGKSVTNRCKHCKGLETLNHVLNSCPTFLSQGRYTWRHNNILKYFVRLATENTIDKPELQIFHDIPNMNGYSPASTIPVSCTQTNLRPDLCILNERSKRLLILELTVPFELAIDRAHQYKTEKYTALITDIENNGYRVDFLAIEIGSRGFLSKENTQRIKSFFYFLETRRTKFSLIRDNMSKMAVVSSFSIYCAKDESIWGDYNLLEQ

SEQ ID NO: 19357 - protein, 962 aa, Ephestia elutella
MLPNKNASSSRSVPSTSSENIIQCSQCSQPRFFKGQRGLKIHLARAHKNTPLCPQQALTPATVSQSQRPDVPFYQYLSILKNSKPLVKRIPKSARIRVAEILSTSIKTVIQNNTQNAWEQLLTFPYRILHIESNENVGKTSLAAKIKQNCNDPLSFHDDLTNQNSKRNKSLAQYVEAKIGEGDIKGAARILFSDDAIAPNTPETLAALLEKHPPSNGLNLPDDGNNFPTQLMASPEDVFRAVMSFRSGSAGGLDGLSPQHLKDLLGGDCGNAGCELLKNITALVNLMLSGEVISTITDIIYGANLCALKKKDGGIRPIAVGSTYRRLTSKICCRAITTTLTDYFQPLQVGFGSKGGCEAAVHSVRTFLNNQGGDVLLKVDIKNAFNSVDRGVLLAEVKDKIPFIYKFIWQCYGKNSKLMYKDNVLLSCVGCQQGDPLGPAVFSLAIHPIIKKLNSKLNVWYLDDRTLGGDAQSILTDFKILINKLQQIGLDLNFKKCELFISETNIQKDTIIADFRSISPEIQIVDKTSLHLLGSPIFDESFSNFIDNKIIKFQNASDRLSDIQTHFAYVIIKHCLFVPNFTYNLRCSPFWKFPDLLHKLDALIKNSLSSVLNIDFSGRVWDQASLPIRYGGLGIRKISSVALPAFLSSAHSVEDLYKKICKNNFNIIDNLAEARNAWAANLPNSKFPDYSSSQRQWDGPLCRVVQDNLIETSSNSVERARLLAVMQWESGLWLQALPSANLGTLLHNNAFRLATALRLGASCVVPHRCACGDTVDSYGHHGLSCCKSAGRLGRHAALNNIIHRALATINVPAILEPNGLARDDGKRPDGMTLVPWRLGRPLVWDATCVDTLAPSHLQATKSKAGAAATEAESLKRRKYVVIGNNYIFEPFGVETLGPWGPSAHQLFIFISKRLVEVSRDQRAGSFFGQRLSIAIQLGNAASLLGTLPRGYALEGLYNLYNL

SEQ ID NO: 19358 - protein, 982 aa, Ephestia elutella
MSLRERVSPGNNKSNQTVSSDDRVWCTQCSQPRSFKGLKGLNIHIGKIHNTRDPLLHSQPVSSSASHPLTSSHPDSSSASHPSNPNIHPLHQHLSQLKRTLPIVKRIPKGARLSVSQALSSAIKKTVSENSILAWEHLLTFAFRTLHVSPSGNQNLTTKIKFNCNNFNSSKLLDHHSISAQKNINYNKTTKYVESKICEGDIKGAARLLFSDDAVAPNSPETLSALREKHPPSAADLALPDPPDSMVGALQATEEEVHRAVMSFRSGSAGGLDGLTPQHLKDLLCGNSGQAGESLLRDLTALVNLLLSGRVNQEITPVIYGANLCALKKKDGGIRPIAVGMTIRRLTAKICCRAVAAALEDYFQPIQLGFGSKGGCEAAVHSLRTHLSTQKGEVLLKVDIKNAFNSVDRGAMLTQVKEKIPFIYNFIWQCYSQNSKLVYQDHTLSSEVGCQQGDPLGPVLFSLAIHPIIEKLNSKFNVWYLDDGSLGGDASLVLVDLESIIKEFQTIGLNLNFSKCELYIDEHMPFLDKVKFLSKFNNLAPNIKIVDKSSLRLLGSPIFDESFPNFVDEKIQKFIFASGRLNDLHTHFAYIIIKNCLFVPNFTYNLRCSFLWKYPDLLSKLDNIVKDTITSVFNIDFNQELIWEQASLPIRLGGLGIRKISSIALPAYLSSVHSVYNLMIKILKISSPVIPHLAEAKSAWLDICQNSKLPDNPASQRQWDEPLCRVVQSNLLQSSASNSVNRARLLASAEWESGLWLRALPSFSLGTFLDDNSFRAVTCLRLGAKTNAPHHCLCGDSVDQFGHHGLSCSRSAGRIARHASLNNILHRALVTIQMPAVLEPNGLARDDGKRPDGMTLVPWRLGRPLVWDATCVDTLASSHLHGTSVKAGAAAAAAESLKRRKYACLGEAYIFEPFGVETLGPWGPSAHKLFSFLSKKLIEVSCDQRAGEFFSQRISIAIQRGNAASLLGTLPRGNDLRDIFYL

SEQ ID NO: 19359 - protein, 737 aa, Ephestia elutella
MVGALQATEEEVHRAVMSFRSGSAGGLDGLTPQHLKDLLCGNSGQAGESLLRDLTALVNLLLSGRVNQEVTPVIYGANLCALKKKDGGIRPIAVGMTIRRLTAKICCRAVAAALEDYFQPIQLGFGSKGGCEAAVHSLRTHLSTQKGEVLLKVDIKNAFNSVDRGAMLTQVKEKIPFIYNFIWQCYSQNSKLVYQDHTLSSEVGCQQGDPLGPVVFSLAIHPIIEKLNSKFNVWYLDDGSLGGDASQVLVDLESIIKEFQTIGLNLNFSKCELYIDEHMPFLDKVKFLSKFNNLAPNIKIVDKSSLRLLGSPIFEESFPNFVDEKIQKFIFASGRLNDLHTHFAYIIIKNCLFVPNFTYNLRCSFLWKYPDLLSKLDNIVKDTITSVFNIDFNQELIWEQASLPIRLGGLGIRKISSIALPAYLSSVHSVYNLMIKILKISSPVIPHLAEAKSAWLDICQNSKLPENPASQRQWDEPLCRVVQSNLLQSSASNSVNRARLLASAEWESGLWLRALPSFSLGTFLDDNSFRAVTCLRVGAKTNAPHHCLCGDSVDQFGHHGLSCSRSAGRIARHASLNNILHRALVTIQMPAVLEPNGLARDDGKRPDGMTLVPWRLGRPLVWDATCVDTLASSHLHGTSVKAGAAAAAAESLKRRKYACLGEAYIFEPFGVETLGPWGPSAHKLFSFLSKKLIEVSCDQRAGEFFSQRISIAIQRGNAASLLGTLPRGNDLRDIFYL

SEQ ID NO: 19360 - protein, 842 aa, Ephestia elutella
MHLLTFPYRILHVSNHPSTSSNLTTKIKNNCSESPYLPLNNDSVHLRNRNTLQYVESKISDGDIKGAARMLFSDDAVAPNNQDTLSALRDKHPPSTGFDNFPTPPDDSTASLVATVESVRTAVMSFRSGSASGLDGLSPQHLKDLVGSQLGVAGEALLVDLTALVNLMLSGGVNREVCDVLYGANLCALKKKDGGIRPIAVGAFYRRLTSKICCKEISSTLSDYFQPIQLGFGSKGGCEAAVHSLRTFLDHQESEILLKVDIKNAFNSVDRAALLTQVKNKIPFIYNYIWQCYSINSKLMFRENLLFSCVGCQQGDPLGPAIFSLAIHPILEKLNSKFNAWYLDDGTLGGQADTVFQDFQTLKEDFKNIGLDFNYQKCELFFSDTLTFTQREEILSKFNTFAPNIKILDRSSLRLLGSPIFADSFSNFIQEKIKNFDFALERLSKIHTHFAFSILRFCLFVPNFTYNLRCSHFWKYPFLLQNLDVSIKNSLSTILNISFDDSSFAQASLPIKFGGLGIRKISSVALPAFLSSVHSIENLSKKILKDPSYDISYVSEAKNEWLGQCPNSQIPSFPASQKLWDGPLCRLAQINLLESSGNSAERARLLAVAEWESGLWLQALPSLNLGTFLDDETFRLAASLRLGAICTVPHRCPCGDGVDGLGHHGLSCRRSAGRLGRHAALNNIIHRALASVHIPAILEPSGLARDDGKRPDGMTLVPWRLGRPLVWDATCVDTLALSHLPATGSKAGAAAAAAESLKRRKYAGIGDFYIFEPFGVETLGPWGPSAHKLYTAISQKLIEVSRDQRAGIYLAQRLSIAIQRGNAASLLGTLPQGNDLSGLAFL

SEQ ID NO: 19361 - protein, 1129 aa, Achlyodes mithridates
MADLATAPIVAEGETFTILLPIGTDRHIQCPLCVRSGSFKGVRKIENFVRHCKDSHQSMSTTYRCSGCGFTAPEGKRYPRKIVSQHCATCVPSVAPTPALDRERRCAIRRRLGTNPPGVPVEQMRASDTSNPEAQSIEPVETSELHPAPLNPPAPALSTLPAAVEAPHEAQPTADDSAQTCQIPTNVCPTADSQQSGDGQYHPTPEQKALVEEINKIQDPQALNEIAERVAVFLGRRKQSSSSSVAPLDERTPRQLRGAYQGPSRIEEATRMQRLYRRNRRGAVRRILSGPQATCAIDTAIVESHFRVLATERECQPEWPCVFDQSPPTDESNSRLCEPFVRRSVALKLKSRSNTAPGPDGVSYADLRRADPGAHVLTALFNAVWRVEAVPISWKISHTILIHKKGDQASIENWRPIALSNTCPKLFAALLAEKVKNWATTNRRFSDAQKGFRQYEGCHEHNFVLQEAIRDAKLKSKELVVAWLDLSNAFTSVPHEAIARALREHGMPTKVRTIVGSLNTGNTTRIRVGSAYTEPILLEAGVRQGCPLSPDLFNLTLEVVLRDIARTGEGYIMGSNKISTLAYADDIAILANSAQAMRTLLQTAAKSAAALGLKFNPAKCATLHITGDIDNGLPQTEFVIDGSPIRSLGLHESYDHLGIPTGLQVRQTPIKSIADVVAEARRIDESLLAPWQKLDAVATFTLPCLDFIMRGGAIEKEYLNEADRFIKKLAKKWLYLPQRASAEVVFLPPSLGGAGLLPLSDLYEAHTITHAYKMLNASDSTVSSIAESELHRTVSERLKKPPSGVDLARYLSGDLDLPRSSGKSSFWTSVRKSTTRLSQKTGLRWIWSRESGALHISLGDGPDITPADKSAVYRRLRQGLIQHYAQRLSAKRDQGKVFEVTRESRYANHFLRTGRNMRFCDWRFIHRARLGVLPLNAAKRWQTNADKRCRRCGHGLETIPHVLNHCGVHSAARQLRHNNIQNRLVKAAKCPGTISVNRTIEGTTGSAATLRPDITVRDEQTKTCIIIDIAVPFENRREALGAARQSKLQKYAPIAQQLREQGYKVVVEAFIVGSLGAWDPRNERIISRLCVSRRYAAMMRRFMVSDTIRWSRDIYVEHVTGERQFEVPL

SEQ ID NO: 19362 - protein, 917 aa, Mimia chiapaensis
MEVLDRVRDPQILNEVAERVAEFLSRMSVRAPTPEEPRRVPPSRPIHINREGTRVEEATRIQRLYRGNRKSAIRRVLSGPAHICSIDAATVEAHFRALAARRDGQEEWPNVLNQGPPTDRSNARLCNPFKRHHVHQKLKGRSNTAPGPDGLTYLQLRRADPGAHVLTSLYNAVWRLEVIPTCRKISHTVLIHKKGDRSSIENWRPIAMSNTCPKLFAALLAERVKEWATTNKRFSDTQKGFRQYEGCHEHNFVLQEAIRDAKAKRKELVVAWLDLASAFTSVPHSSIAKALDRHGMPNKAKNVIASLNSDNQTRIRVGNDYTEAIYLQAGVRQGCPLSPDLFNLTLEVVLREIAATGEGYIIGDRRTSSLAYADDVAILADSADAMRRMLRVAETAARAVGLTFNSYKCAALHIASEGEGGVLRSEFVIDGRPIPSLGPNEAYDHLGIPTGYQVCQTPVGTIADIIAGARKIDESLLAPWQKLDAVGTFILPRIDFILRGGVVKKEYLQEADRELRKLAKGWLHLPRRASAEIVCLPPSQGGGGLLPLADLYELYTVSHAFKMLHASDDAVRGIAEDTLRATVSERLKKPASGVDVARYLSGDLDLPRSSGRGTFWTSVRKSAIRLKQRLGLRWTWCRESRSLTIDLGNGTSVTPAEKSGLYREMRLGLIQFYARSLVAKGDQGKVFEVTRDTRYANHFLRTGRNTRFCDWRFIHRARLGVLPLNAAKRWQAGGDKRCRKCGHELETLPHVLNHCGVHSAARQLRHDAVQNRLVRAIRCPGTITVNRTVNGTSGRMSALRPDVTVRDEEKKTIIIVDVAVPFENRREALNSARQEKIGKYAPLAEQLRALGYRVAVEPFVVGSLGAWDPRNERVLNRLRVSPSYAAMMRRLMISDTIRWSRDIYTEHVSGKRQYQVP

SEQ ID NO: 19363 - protein, 1099 aa, Ophraella communa
MWCFYYAKVKNIEGGVVKGTFKIWRERNPDIFTDMDPNKLATQRRFIVNSKKLTDTELEKIRVKVNRTLQTDYSVPTNTVQQAEKIQLAITNEREQMVQSTTDINENVMEMEQRMKKKLLDIEIVSINERQKLNKVRLTKDVRHQISLANTVLANITRDKCLNLTEINRLMYATAVVIAGETKPRTAPTVNKEQAWKRRIQNTIETYRRDLAIICEYKKGVTTRQVCKKIDKIIKKYKSEKQTAEELELNVQMKLQAKAQRLRRYTKRSNHYHQNKIFNEDAKRFYRQLNQQKTDIINPPSEEQVTRFWRGILEDQAVHNQEANWIEQERKNHEHVKTSLWQSFTIDEVVKIIKQSHNWKAPGLDMVQNFWLKQLTTLHGELTRAYNDIMNDPKSIPVWFTSGITFLISKGKDTKDPKNYRPITCLPTTYKILTALITNRIYEHLLKNKTSPDEQKGCRKFSRGCKDQLLVSKMVVSSAKKHLRNLGMAWIDYKKAFDSLPHTWIAEVMKIYRVCPTITQFVESSMKEWKTEMWLYYTGGHIRTGNIAIKRGIFQGDSLSPLLFCMALIPLTNMLNRKGIGYEVDDNNKVSHLLYVDDLKLFAKDEKQLKQGLSVVTTFSNDIKMEFGLDKCAKVAFKRGRLIKSQNIQLGNRTVIRNMEPGEKYKYLGVDESSGIDNCHMKDKITKEYYRRVREILKTELSSKNKVTAINTLAVPVVSYSYGIVDWLRSDIEKMDRKTRKLLTIGGMHHPKADVNRLYIKRRDGGRGLTELESAYNKAIVNLSMYIKLGKDKFTRMVRDYDASKAKYSLQKEAEKILGNYVSQQITTQNVKQQLNNNIEKEKIESLKRKPLHGRFFREMERPFVDRDASMRWLCSSGLKGETESLIIAAQDQALNTRYHQKNILKQSVDSKCRLCNKAEEHISHIVAGCTTLPSSEYTHRHNKVASYVHWSMCKCLGVQVPDKYYEHQPDKVVNIDYSTILWDVPITTDRTILANRPDIVLHDKKEKICLLIDIAVPDDMNIMLKETEKISKYKDLEIEISRMWNCKTRVVPIVIGALGTLRKGLEQNLMVLPGNISVSELQKLALMGTAHILRKVLG

SEQ ID NO: 19364 - protein, 960 aa, Ophraella communa
MLTKIFNQKIIPEEIPHISTLEDIQNILYLAAYTISICNGAKIKFNENNTRKTNVAPKWEMRIQKEIDELRASIARLLEYKKGNKTRRLNNKINQIMRKYNQHTKYDPQNETINEVIDTIKQRLQILSKRMRRYKTSNKRKSENAVFNSNQRMFYTKIKNTEEKEILLTPETKKLEEFWGGIWKNPTQHNKDSNFIDIIETKCSEITQMADNQITSSMLRIQINKMHNWKCPGPDKIQNYWIKNLSNLHNKILEIINQTINNPNSISDQICEGITYLKAKSNDTLDPSKYRPITCLNTIYKLITGCITQAISNHCENNKIISEEQKGSRIGTQGCKEQITIDAVIMNQATKKKRNLYTCFIDYVKAYDKIPHSWIIYIMNLYKINTKFIEFLQTVMNKWKTTITLNTRHKKIKTSKLHIQRGIFQGDSLSSLLFCLCMNPLSTLLQKNSKGYKIKNPSSNHIITHLFYIDDLKLYSDSKLNLLNSLKMVEKFSTDIKMELGTDKCKIQALNKGKITTNTEYITTSLENIDAMEPEYYKYLGIEQNRTIDHTYTKNKFKTIFNQRLRMLSKTSLNSKNLTKSINTFAIPILTYSFGLIKWSKTDLESLDRNIRKTLTTFNKHHPRSAIERITIPRKKGGRGFIDIESLHNKQINNMKEYFHKKRRNSNLITAITEADDHYTPLNLKENTTYNTTNSLETKINAWKSKPLHGRCPNEVNQEYVDEVQSYKWLTEGRLFPETEGFFIAIQDQVVATKNYRRYILKDPTVQDDKCRWCGNQSETTQHIMAGCSALSQTEYLLRHDNMGKILHQQIETKFFSSKQDKQYWDYTPQPIIENEEYALYWNRTIYTDRTIHHNRPDTILWKKREKTVHLIDYAVVNSNNITSTYNEKIKRYERLISEIKVLWKVNVIKIHPIIMSTTGVVPKSMSKHLEELDISKTIITTMQHSVILSICHLFRKTLN

SEQ ID NO: 19365 - protein, 1224 aa, Clytia hemisphaerica
MIPPGNDQIQLDQPRIAQEQSRNIEEQPGEILECDMQRSSNTTAGTPVQNNNIQRRTKWTKEMNLHIVRSYFIAIKTTPNTFRKTLHNLWKERYGDNFTEQRICDQKRIIFVKATNAQNQRLRGNWLTQIEINTVREEIDTELNQDQQVDQEEPQHQEEPLQQENLPENNDAHDQHIGQDQDEQNAQNEIMQAANNVPEEGNVIRVQGNDGENIQTRFEEHFIISKLTPFEKREKFRKPSKFDLKKLSRSCDIVNEIIDVNRHQCNDISQINEMTYAFALTAIEHANLRKQCIITNKEASKRKQAWVKRLDSKILEIRKEISQVEQMNADNPSTKMKKNNDRLRRKHNINNERDRVTTCERLKQKLLAKNNRLKRYKSRAKQYTENRDFVNNPDKFYKSLRGTSIPIDKSPSKQEIENFWRPILGTEANYNDQAPWIAEYEETINIQSYEFQPIFKDEISEAIKNFANWKSPGVDSLQNFWWNKFNSIYDQKTIVYNAMVDNPQSIPEWFTTGRTTLVPKKPQTEIPSNYRPITCLPITYKIMTSIITKRMKSHLDTFNLLPEEQKGGISGNQGTVDQLLIDDMILGNAKKSKRNLSTAWIDYRKAFDSVPHDWLRRSLEIHKFPHKLINFFSTTMTKWKTTLNITTQNSTISSEPINIHNGIFQGDCPSGLNFVISLLPLSWLIKRTSIGYSIGPRNNRTTISHLLFMDDLKLYANNDEHLQDLLEIVSMFSNDIHMQFGLDKCNIMSVRKGKLTRGNDIILQSEETIKALDLRDQYKYLGMLQSNEIDKKQMRSKFRAEYFTRVKKILKSSLNSKNTIQAINTFAVPSISYGFQVLDWSVTELEDIDRQTRNVLRQHHMLHLKSDVARVYIPRRNGGRGLLNITDLYKNQIIQYSKYLKNSTEHLMILVSTSQTDRGAKSLHQKAEKYLAELNIDENQANELTKPQLKLRVKTKRSKQKLEILKEKPMHGQFFITLDQPHIDKDASLSWLRSSTLKRTTESTICAIQENAITTKYTQKHIFKTTNDDTCRACKTKPETIHHIISGCPVLAPTKYTQRHDNVCRYIHLLLAEKHAMIQPNSSKWYQYDPEPLLENDDVKILWNFPVQTDRRVAHNKPDIIVINKRTREVQIIDIAVPLDCNIARKRNEKVTKYVDLSIEIKQLWGMTKVKTIPIVIGAMGSIHEKFEKLINDKMDLKVNVNEMQKIVLLGTSHISRYFFSADF

SEQ ID NO: 19366 - protein, 1224 aa, Clytia hemisphaerica
MIPPGNDQIQLDQPRIAQEQSRNIEEQPGEVLERDMHRSSDTTAGTPVQNNNIQRRTKWTKEMNLHIVRSYFIAIKTTPNTFRKTLHNLWKERYGDNFTEQRICDQKRIIFVKATNAQNQRLRGNWLTQIEINTVREEIDTELNQDQQVDQEEPRHQEEPLQQENLPENNDAHDQHIGQDQDEQNAQNEIIQAANNVPEEGNVIRVQGDDGENVQTRFEEHFIISKLTPFEKREKFRKPSKFDLKKLSRSCDIVNEIIDVNRHQCNDISQINEMTYAFALTAIEHANLRKQCIITNKEASKRKQAWVKRLDSKILEIRKEISQVEQMNADNPSTKMKKNNDRLRRKHNINNERDRVTTCERLKQKLLAKNNRLKRYKSRAKQYTENRDFVNSPDKFYKSLRGTSIPIDKSPSKQEIENFWRPILGTEANYNDQAPWIAEYEETINIQPYEFQPISKDEISEAIKNFANWKSPGVDSLQNFWWNKFNSIYDQKTIVYNAMVDNPQSIPEWFTTGRTTLVPKKPQTEIPSNYRPITCLPITYKIMTSIITKRMKSHLDTFNLLPEEQKGGISGNQGTVDQLLIDDMILGNAKKSKRNLSTAWIDYRKAFDSVPHDWLRRSLEIHKFPHKLINFFSTTMTKWKTTLNITTQNSTISSEPINIHNGIFQGDCPSGLNFVISLLPLSWLIKRTSIGYSIGPRNNRTTISHLLFMDDLKLYANNDEHLQDLLEIVSMFSNDIHMQFGLDKCNIMSVRKGKLTRGNDIILQSEETIKALDLRDQYKYLGMLQSNEIDKKQMRRKFRAEYFTRVKKILKSSLNSKNTIQAINTFAVPSISYGFQVLDWSVTELEDIDRQTRNVLRQHHMLHLKSDVARVYIPRRNGGRGLLNITDLYKNQIIQYSKYLKNSTEHLMILVSTSQTDRGAKSLHQKAEKYLAELNIDENQANELTKPQLKLRVKTKRSKQKLEILKEKPMHGQFFITLDQPHIDKDASLSWLRSSTLKRTTESTICAIQENAITTKYTQKHIFKTTNDDTCRACKTKPETIHHIISGCPVLAPTKYTQRHDNVCRYIHLLLAEKHAMIQPNSSKWYQYDPEPLLENDDVKILWNFPVQTDRRVAHNKPDIIVINKRTREVQIIDIAVPLDCNIARKRNEKVTKYVDLSIEIKQLWGMTKVKTIPIVIGAMGSIHEKFEKLINDKMDLKVNVNEMQKIVLLGTSHISRYFFSADF

SEQ ID NO: 19367 - protein, 1200 aa, Clytia hemisphaerica
MENQPGEVLDDELPRSSQNIEGTPGRNQNNNNNNNRRRMKWTKEMNVHIVRSYFIAIKTTPTTYRRTLHNLSIQRYGENFSEQRICDQKQQIFVKAENQQNQRLRGNWPTNREIDTIRQEVDQEHNQERQVDEGEHVQNENPPEIIREPEEPANTPLEPPPAENNILPAGNEAQQVQEGVMIQRDEEENLRARFEEHYFISKLTPFEKREKFRKPSKIDIKKLSRSCDIVNETIDVNQYQCNDITQINDMTYAFAITAIEHSNLRKKCIVSDKITIKKTHNWIKRINATILELRKEISQIDQMNIANPSPKMRRNNERIKRKFTITNDRERKLTCERLKQKLLAKNNRLKRYKERSNQFNQNREFVNSPDKFYKKLRGCAIPITKAPSKQEIEDFWRPILGTESNFNNNAPWIADYEATIDIQPYEFQPITKEEMSEAIKNFANWKSPGIDCLQNYWWNKFESIHDHKVQIYNRLMDDPQSIPPWFTSGRTTLIPKKPQTEIPSNYRPITCLPITYKIMTSIMTKRMKTHLTTFDLIPEEQKGGISGNQGTVDQLLIDNMILENARKSKRNLSTAWIDYRKAFDSVPHDWLKRSLQIHKFPEKLINFFTTTMTKWKTTLNISTQDTTVSSDPINIHNGIFQGDCPSGLNFVISLLPLSWLIKRSSIGYAIGPRNNRTVVSHLLFMDDLKLYANCDERLQDLLEIVSMFSNDICMSFGLDKCNTLSIRGGKLTKGNDITLHTEETIKALDLREQYKYLGMLQSNTIDKKNMRNKFRTEYFQRVKKILKSSLNSKNTIQAINTYAVPALSYGFQVLDWSVTELEEVDRETRNTLRQYHMLHLNSDVDRVYISRKQGGRGLLNITDLYKNQIIQYSRYLKNSTERLIVLVSTSQTSKGAKSIHQKAETYLRELNIDEEQLQQLNNQQLKTRVKTIRTNQKIQTVKSKPMHGQFFNTLEQPHIDKTASLSWLRSSTLKRATESTICAIQENAITTKYTKKHIHKTSNDDTCRACKTKPETIHHVISGCPILAPTKYTQRHDNVCRYIHLLLAEKYQFIEPTATKWYQYDPEPILENDNVKILWNFPVQTDRRVTHNKPDIIYLNKQSRDIQLIDIAVPLDSNIARKRNEKVTKYVDLSIEVKQLWNGRKVNTIPIVIGALGSIHENFQKLIEQKMDLKINVNEMQKIVLLGTSNISRHFFSADF

SEQ ID NO: 19368 - protein, 1625 aa, Ampulex compressa
MATEIILKYPYAEGDMRCPWCFRYDRPTGMRTTRAYGNHTDLLKHIRRQHTGTKVSWECGACGFVGSGAYPLKSVRAHYADRHWSPGAAGSRGPSRGQCVIVRTNETTTVSRRSPVARSGTRPTAATARFVTGKETSTSVRTTTAGIATCVTVTKAETRTRTTPIVARASPGRVGSGSTHSVMTATTVSSRAKMIRRAENGAENSPSTSAMPAPAPSRAKPRVVSNVRLEWAYVGTAIDAQRTTTATAAGITGTTVTGRRHRDILEGLARFARRRSSGSGATPPLTKSKIPVATGVVRGGLQSIAPSTLTKPPGAPAPSKGLAETTTITSKRQGPSVTSPNSGPSRAARTLPPNNVEPVTLETTHAPVAEGRSMPLIPKNTPPSPGEPACSAVVALTTETIAVSVPRTSPSPRISADTGEGEISSVTPTTPRSPTIPPAPRRNAAHGLSEATEEAANRWSPVPLRSGFRRQRPDFAVAASRARTDPSATPRARPRDTGPTTTSAGNMLRAVALQPAPSTVQTPPRGQTSAGVAAPYTRPDGGVETRRDREAAARRGQGERGRAPQEALVHVGERTDVRGRVSVGGARRTSRARDSRDEHGGTLRLRDGGYRAVNQRDGPARTAVERGERDVRAIERLTARAKRRRPNREALTALQRAERDALIRQADAVTDGEGLRVLAGRLATYLRSLRGSVETGRGMADAACTRGGGGESWRRAQPTGAGARRGKRRWERGPRGGRDRVAEARHVQRLFRADPECAVREILRKSSRHCEIPVQSAEEYFIELYAPSIGARESVPAHSSRRETPPSAESDGAVLVDPFSASEIGGRLRRLDDSAPGPDGVTYPNLRKADPGAVLLTAVFNACLRAEAVPEAWKTFDALLVHAKRDTKDLATSNLVPKLFAAALADRLTSWAIDGHRLSAAQKGLLSYEGFYEHSFVLREALDDARRRGEEIVIAWTNLSNALDSVPHAVIYAALERAGAPELFINVVRSLYADCDARVYAAPIARGVGFRQGCPLSPVLFDLTIETIVRAVFESGSGYVLHAHDVSVLAYAHHLTLLARTPACMLQMLSIAEEEARKIGSTFNPDNCATLHLGARGVLPTVFSLRGKLLRVLRIWEAHQLLDVPTGVRVARTPYDTIEAMIADLRRVDASLLAPWQKMEVTRNILLPRLDFLLRGADIRKGPLKEADKVIRSTAKKWLHLPQRASAELVYIPPSRGGCGLLPLADLADAMTVARAFGMLSAEDTVVASIARSSLERVVRRKIGRNPSEMDLAQYLSGSLDGALARDTGDTGSFWSRARMACRRSSGKLATSWRWDSERRELALECRGTAGRTVIIPLSARNQVVRRLRAAISESYLGTLLAKKDQGKVYEATSRCPVSNHFLANGSFTRFSDWRFIHRGRLDVLPLNAARRWGDLDKRCRRCGAKLETLPHVLNHCGPHAAARQKRHDEIVHRLVRASRIPGEIRVNKRVRGVEKEFAALRPDIVVTHGASKSVVIVDVAVPFENRADALVKARARKELKYAPLAESLRRNGYTVAIGAFLVGALGAWDPHNETLLRLLYVSRNYARLMRRLMISKSIAWSKNIYLQHITGVCQGPVPRSLPRREDTAISPRMIEATTQTDETQ

SEQ ID NO: 19369 - protein, 919 aa, Paramacrobiotus metropolitanus
MTWTCPDCQLICKRQGSHLGSGNCLERQAQRLGRPVDPPQSQGQTRRSPPTATGALPPPFISARRKLMRRIPKAARASVAIALAKLMRSAVSANDSSSWLKLLSAPSAILSLPGASKKSRKTSITSHIRDQIAKFESGELDDEETKAAPGKPRRATPEDEIARRVGIQIDDFNVSGAVRTLLSSDSVADSTPIVIESMKLKHPAAPLPTPPPDPPASSFAPLTPAEVLSVLEAMPRGSAGGLDYLRPQHLLDLIGARMDDAASSLCDALTDLLNLILAGKAPPEVVPLLCGARLVALRKKDGGLRPIAVGNIYRRIAAKAVDIRIRPVTAEILQPHQLGSGVKRGVEGIIHAARDFLLEYSGGVKALLKIDFTNAFDCVSREEVLRITAEVIPENYAFVKMCYGSYSSLFLGETIIASQSGVQQGDPLGPALFCLVLQFVIDKLNAYLNAWYMDDGKLGGTPSEVIRNLLLIVEAKKVGLEVNIAKCELFLCGGTEAQRSSAANEFTSLFPGIALVTADKLNLLGSPLLPAAVIPIINEKINQLGIMCGRLQLIPKHQALFLLKNCLGVPKIVHILRTSPAWMFPQELYRLDQVFRESVETITNVKMDHPTWLQASLPVRFGGLGIRRTEKLAPSAYLASASSLHPLISKLCPKLTATDVTTATRAWKLEADTDEIPAQAIRHVQKAWDTPVTLNAFSRLTTLRTLPEEVAHLKAVSVPESGVWIHALPAACLGNLLEDNAFRISVALRLGAPIVTPHVCVCGGLVDELGRHGLRCKRSAGRLPRHDGISAEFARGLKSAGFPSRMEPKGLSVKDRKRPDVITLIPWARGKPLAIDVTCVDTLAVSYIDRTSVNAGAAAELAERKKLAKHAWLQARYDFVAAAIEIYGPYGDGTKKLVETVGNGINSNFNWPKAGERVF

SEQ ID NO: 19370 - protein, 863 aa, Paramacrobiotus metropolitanus
MRRTVTANDSPSWLKLLLAPSAILSLPGDNKKSRKTSVTTHIRDCIAKFESGELDNEEPTAPSKPRHATPEEEISRRVGIQIDDFNISGAVRTLLSSDSVADSTPEVIECMQRKHPEAPLPTPPLITANPTFVPLTPSEVLSVLEAMPRGSAGGLDFLRPQHLLDLIGGRMDDTSSDLCDSLTDLLNLILTGNVPADIVPLLRGARLIALRKKDGGLRPIAVGNVYRRIAAKAVDIRIRPITSEILQPQQLGCGIKKGVEGIIHATRDFLLQYSSDVKALLKIDFTNAFNCVSREEVLKVAADVIPEYYPFIRMCYGSYSSLFLGETVISSQSGVQQGDPLGPALFCLVLQIVVDKLNADLNAWFMDDGTLGGRPENVLQNFQQLITEAQKIGLAVSIAKCELFLCGGTETQRKSVADEFSHLFPGIAITTAEELNLLGSPLLPPAVVPMVNEKIQQLKGMCDRLQLLPKHQALFLLKNCLGVPKIVDILRTSLAWMFPQELYRLDQVFRDAVETITNVRMDHPTWLQASLPVRFGGLGIRRTEKLAPSAYLASASSLRPLISRLCTRLTATDVTAATHAWKTADTDELPPLPFRHVQKAWDTPATLHAFSRLTTLRTSQEEVAHLKAVSIPESGVWIHALPAACLGNLLENNAFRINVALRLGAPIVTPHVCVCGGLVDELGRHGLRCKRSAGRLPRHDGISGEITRGLKTAGFPARMEPKGLSVKDRKRPDVITLVPWQRGKPLAVDVTCVDTLAASYIDRTSVNAGAAAEHAERGKLTKHAWLQSRYDFVAAAFEIYGPSGDGAKKLVDKVGNGIAASTGQKRAKEFFKQRLSIQIQRGNAICVMGTIPDQDSVEEVFLL

SEQ ID NO: 19371 - protein, 955 aa, Paramacrobiotus metropolitanus
MTWTCPDCQFTCLRAGSHRGSGKCLERQRNGLGRVQGPPQAQRVYRHLSPARSRLSPAVGTTPSFITARRKIMRRIPKAARASVAIALTKLMQGVVSTNDTPSWHKLLSAPSAILSLPGDTKKSRKTSITSHIRDRIAKFESGELDGEEPSAPGKPRHATPEDEISRRVGIQIDDFNVSGAVRTLLSSDSVADITPEVIESMQRKHPAAPLPTLPADLPATPFVPLSPTEVLSVLEAMPRGSAGGLDYLRPQHLLDLIGARLDDASSALCDSLTDLLNLILTGNIPTEIVPLLCGARLVALRKKDGGLRPIAVGIVYRRLAAKAVDIRIRPVTSELLQPHQLGSGVKRGVEAVIHTARDFLLQYSKDVKALLKIDFTNAFNCVSREEVLKIASEVIPEYYPFIKLCYGTYSMLFLGETVISSQSGVQQGDPLGPALFCSVLQLIIDKINTDLNAWYMDDGTLGGHPSSVLRNFQLLITEALRIGLSVNIAKCELFLCGGTEVQRLSVIENFTTLFPGITVLTADKLCLLGSPLLPPAVVPIVNEKISQLGVMCSRLQLIPKHQALFLLKNCLGAPKIVHILRTSLAWMFPQELYKLDQVFRDAVEMITNVRMDHPTWLQASLPVRFGGLGVRRTEKLAPSAYLASASSLFPLTSRLCPTLTATDLSAATRAWKLLADTDELPSEVLRHVQKAWDTPTTLNTYARLTELRATKEKIAHLKAVSVPESGVWIHALPAACLGNLLENNTFRISIALRLGAPIVTPHVCVCGGLVDDLGRHGLRCKRSAGRLPRHDGLSGEFTRGLKTAGFPARMEPKGLSVKDRKRPDVITLVPWERGKPLAIDVTCVDTLAASYIDRTLVNVGAAAEHAERGKLTKHGWLQPRYNFMAAAFEIYGPWGNGTKTLVQKIGNGIATATGQKRAKEFFRQRLSIQMQRGNAICVMGTIPEQDSIEEVFLL

SEQ ID NO: 19372 - protein, 947 aa, Paramacrobiotus metropolitanus
MTWTCPDCQFTCLRAGSHRGSGKCLERQRNGLGRVQGPPQAQTRSRLSPAVGTTPSFITARKKIMRRIPKAARASVAIALTKLMQGVVSTNDTPWWHKLLSAPSAILSLPGDTKKPRKTSITSHIRDRIAKFESGELDGEEPSAPGKPRHATPEDEISRRVGIQIDDFNVSGAVRTLLSSDSVADITPEVIESMQRKHPAAPLPTLPADLPATPFVPLSPTEVLSVLEAMPRGSAGGLDYLRPQHLLDLIGARLDDASSALCDSLTDLLNLILTSNIPTEIVPLLCGARLVALRKKDGGLRPIAVGNVYRRLAAKAVDIRIRPVTSELLQPHQLGSGVKRGVEAVIHTARDFLLQYSKDVKALLKIDFTNAFNCVSREEVLKIASEVIPEYYAFIKLCFGTYSMLFLGETVISSQSGVQQGDPLGPALFCLVLQLIIDKINTDLNAWYMDDGTLGGHPSSVLRNFQLLITEALRIGLSVNIAKCELFLCGGTEVQRLSVIENFTTLFPGIRVLTVDKLCLLGSPLLPPAVVPIVNEKISQLGVMCSRLQLIPKHQALFLLKNCLGVPKIVHILRTSLAWMFPQELYRLDQVFRDAVEMITNVRMDHPTWLQASLPVRFGGLGVRRTEKLAPSAYLASASSLFPLTSRLCPTLTATDLSAATRAWKLLADTDELPSEVLRHVQKAWDTPTTLNTYARLTELRATKEEIAHLKAVSVPESGVWIHALPAACLGNLLENNTFRISIALRLGAPIVTPHVCVCGGLVDDLGRHGLRCKRSAGRLPRHDGLSGEFTRGLKTAGFPARMEPKGLSVKDRKRPDVITLVPWERGKPLAIDVTCVDTLAASYIDRTLVNVGAAAEHAERGKLTKHGWLQPRYNFMAAAFEIYGPWGNGTKTLVQKIGNGIATATGQKRAKEFFRQRLSIQMQRGNAICVMGTIPEQDSIEEVFLL

SEQ ID NO: 19373 - protein, 945 aa, Venturia canescens
MAPANVPNMVRYLETRLGFTRSFEAIKGMKRMPKYREALREVQQVINARNTEDQPQANIPEVTVTPGNDTLLQAERTGTPEPPAPHPAPTHVNPSTVLAAHLTEALHAEYLRDNLLLKRAVQRAISGGDPCALLEAWSEECLAPPRPRHPRTMRTDGGVAPLSRSARRREAYAGLQTLWRKNQAKAARKVLDGDANVTNSLPLETQDDYWRRLIQQPPPQRSVPWDDPNTSDRNNDVWLPISETEIKDNYPPSRSAAGPDGLTVRAWRGSVPDSVKATIMNTIMFCGRVPGRWSKSRTVLIPKCAEANDPSLYRPIAISSVILRHFHKILVKRVAACAPPDPRQRAFIETDGVAENIMIMGALISEARSRLRPLHMAILDVRKAFDTVNHKGIFNVLKHNHLPIQMVRYIEHLYGESTTVLEVAGQYSTDIRAARGVRQGDPLSPVLFNMVMDRVLNELLPVIGVELGGENINALALADDPVLVASTVQGLQRSLDAVHRALFSYGLEIMSTMCAALSMVPAGREKKIKIISESLFIIGDHRIPQLSVVDKWRYLGITFDCRGILPSTPYLRDQLNRISVAPLKPQQRLKILVTYLLPRATHALVLGRTTHGDLRRLDKQIRSAVRSWTRLPPDCPIAFFHAPVSEGGLGIPALSSSIPELKLRRLNNLAFSALPQARTACNSDFAGSIRRWCVLSSSRSKDWPDRLHRSVDGFELRETKKSGLSNQWVRDDYIRIPAREWIEDIRVRINALPSRMRTSRGVRRTLQATTCRAGCGVPETTAHIIQQCHRTHGGRIHRHNNVVYTLANALRRIGANVMVEKIHRTAVGRRKPDLTFRLGDRVVILDCQIVSGGRPLSITYAEKRDYYAANDELIRLVAHDFRVQPGAVEVGALTISWRGIWARESDSLLRSLGIPSPILASITTRVLQGSHLNFARWKQMTTMRR

SEQ ID NO: 19374 - protein, 1138 aa, Venturia canescens
MPSNVPLLTEPISEVGGEWATGAGNRIPPEPQISVVPPTTPVHLSGRGLRDMASNCDVPGHQARAPFNGAQLTANIVNHNGSGREDATASSRGEHNNTNTHIHDDPLTDPSSADDERQRAPHDNGPEPDDPGPPINGHRCAECARSFGTKIGLSIHRKRAHPASYNNEINVTRSTPRWSPEEIRLMAWEEAMAPADVTNMIRYLESRLGFNRTFEAIKGMKRTPKYRDALREVRQMIGERRMDNLIPRNARTAEMAPGDIPSSDEEEIDTASLTPGPDPEAGAAGVEPSVLLRECLEDALRDEFLTTHPLLRSAIQCAIDGGDPCALLDLWCAEHLALSRPQRARRPRTAATGAVLTRAARRHAAYADLQTLWRMNQSKAARKVLDGDADIANCLPLERQEEYWRRLIEQAPPPVTELWPEHIPGNTHNGVWAPITEEEVGLNYPPLRSAAGPDGLSVHDWRRAVPDRVKATILNTILKSGVVPARWSKSRTVLIPKGPEADDPSKYRPIAISSVVLRHLHKILAKRIAACAPPDARQRAFIEADGVAENIAVLTALITEQRTQLKPLHLAVLDVKKAFDTVDHKGILFVLRQNRMPEDMVRYMQHIYEGSTTILEVAGRHSGDIKAARGVRQGDPLSPILFNMVIDEVLRELLPVIGVELGGQNVNALAFADDLVLVASTAQGLQQSLDSVHRSLRRYGLELMSAKCAAISMVPSGRDKKVKIVPESLFAIGNHQIPQLSVVDRWKYLGVVFDCRGLVPSSFSFRDYLGKITAAPLKPQQRIRILTAYLIPRTTHTLVLGRTTHGDLRRLDKQIRTAVRGWTRLPPDCPIAFFHTPVREGGLGIPSLESSIPEMKLRRLNSLASSRLPQARAAGLSCFAQSVRRWCRITNLRNKDWASRLHRSVDGYELREAHKSCLSTQWTRDDYVRIPAREWIENIRVRINALPSSMRTSRGRRRALLNVNCRAGCNVPETTAHIIQQCHRTHGGRILRHDNIVKSVAAAMTRRGARVSVEKIYRTAVGRRKPDLVIRTDDRLVILDCQIVSGSRSLSQTNAEKTAYYANNHELIRQIGLEYGVHPNRVEVGALTISWRGIWARESDLLLRSLTIPSATLASLTTRVLQGSHLNFARWNRMTSVV

SEQ ID NO: 19375 - protein, 1062 aa, Riptortus pedestris
MVMLPRSVGGVSTACTVQRRAIRRLSVRTLRCRRVVPPVASLRSRTVTVLTHCRTVPSISGPSRCRWSARTTMAEPGEFLCRHCNRSFGSLIGLGLHRKHAHPVEYNAGIEVSRGRGRWDREELAALATAELRLRAEGSGRGLNAALSDLMPGRTVDAVKCARARSDYKNLLEVISGAGGSVSTSVGGSGETGDVRRVERTQSLRVAIRGLLDELTSSPTTLCVDRLVAVAESALAGGLVGDSLAGWISVHLAAGPSQVPPAGDGSAPRCRLGGPRVRGDGHRRRLYGRLQRLWAVDRTAAARLVLDGGSSVPSHSVDELYRHWRPIVEAPSVPWTGGEVRGPRLPSDVSVWFPVSEVEVKSLSPSGGSAAGLDGVAPSVWRALPWRQRAVILNLLLLEGRVPSMLLRARVTMIPKTSEVRSPGDYRPISVASVIVRHLHRILAVRLESAVQHVPEQSGFRRGFDGVAANVFLLDSVLRSAWRKKRGLCAALLDVRKAFDSVSHAAILRILRERGFQAELCEYVESIYMDGTSLISMGGAVSPEMRPGRGVRQGDPLSPLLFNLVMDHVIGGLSPMLGFRLGVGGPRIRSLAYADDLLLFASSPVGLQALLGSAVEGLRDCGLEINPDKSRALTLAVSGKRKLVKIDVDQEYFVEGESMGSTAVDEMFDYLGVKFSPSGLVRDRIELGDGLERITRAPLKPQQRMEVLRVFFLPAFYHRLTFGVSGPLALRALDVQIRGYVRRWLRLPHDSLNEFIHCPVRLGGLGVPRMARFIPYLREKRFLAVDDELENAGLDDGVRDVLGTDIPAGCLPEYPPLVELGGLVSHTDGMDLDGAGEVPASTAWLSRAAHSISGRDWTSYLRLYAGALPTRVRLTRGRRGEGGALCRAGCGAQETAYHVCNRCPLVKDAVTLRHHAVVDLVRSSLKRAGHRVLKEPTLSRDGVSRRPDLVAAVGDRCWLLDVTIISSRADKEMAAMVKRRRYGREWILEAARRLIGGSCSSAGVLPVVLTWKGIWAKESAAKLLDCGVTSRALGWMTQRVLRGSCMNFTTWQRAARNLPSWT

SEQ ID NO: 19376 - protein, 859 aa, Trichonephila clavipes
MYKWNRRKCIRAIANADSMNCAIPKERVQAHFKEIWETPAGPTEFPELPPPASSPESSQRPPVLEFISPKVVAACLKSAENSAPGPDLISYKHWREIDPTCTILAKLFQICLKIADIPDAWKESNTILIHKGNSPDELENWRPISLSGTAYKLFMKCLARALSVWCDIHGVISPAQKGFLPHDGVIEHNFLISQHLEEARRRKQDRYLAWLDISNAFGSVPHDVIINALVANGVDHEFISLVANIYSNSATKVFAGDGLTDPISIKRGVKQGCPLSGLLFNLAIDQVLRSVQDGREETAILAFADDIVLLADSQEELQGLLDTTSEALDRITLKVNPNKCATLHLSGKPQTGARPSPFQLRNSTLRMLNDGDHYKYLGKPVGFFLMKNYKNVNEALSLLQKVATSKLAPWQKLDALKTFFFPSLCFSMRTAQIDKTGWSQVDAAVTKEIKEILSLPERASNHYLQADRSAGGCGVPSAAADCDFYLVDTAFKLLTSRDEHVQLAALGQLTRTFKARMKRSPTDGDLASYLSGCMEGDYATSTNAISNTWTLARKASSRQQVTWSFIDGTPSISFGSAVVTATYRNSVMKKFHEHHKATEAAKLIALPSQGKVMECVSLAAESSHFITGGLYTRFADWKFVHKARLNLTALRGSKSWISGRNAKCRKCGKWDETLPHVLNHCKAYSAAWQMRHNDIVRRVKTAVAYKGTILSENQVVRPSTLRPDLVATVGNTLYIIDVTIPFENRKESFVAAAERKVEKYSTLIPFFNQMGYESIQVVPIIVGSLGAWDPANDKFLCKVATRRYLRTMKRLCVSDTIRWSRDIFIQHLTGKKQYINQDASNAASTTAPSPSRGIHPRGE

SEQ ID NO: 19377 - protein, 1117 aa, Rambutanura hunanensis
MYCATQSKGTCSPGQFYPFIGYPGLQRTTLNLCNMSKTHAKGLLSRLQSGEETYYASTVASHKCDVGTCEYSTSTKMGLNVHISLKHRKKVVNVSNDGHPKFSLDGARIKHHEDNHGPHGELHGNATNGFHGGQQNCCMNLVGASSAALLNEAGKKWTAEELHILRRIELDVGIHGKRGSRLIREKLITFGSRRSLDAIDRMRREPRYKAIVLETAPVAEIAPATSSVNEVSATIQEVMSALHSEALGQILSLTDPVVAVREYTINNMIAKAHQGENVEADLELFLSSCFKASKAKSIRANRIRKPVNRKDRKRLEFKRVQLLFKENRSKAAKMILDDNQKVGKNVHEIPNFVNYWESTLKAAETALNTTDMVSMTKDCHQQAWDPITYAEVKAALMSTPNNKAPGPDGVTVKELKDWGINVVGKILNLFIYNGKLPMCLKNSNTIFCAKKSGAKEPRDFRPISLSPMITRVFNKIIAMRVSLFANLDIRQRAFQPLDGCCENIMLLEHVITEAKRKRRTVFLANLDMNNAFGSVEHGAIIRALECKGAPIALINYISDLYTNYTTNFNVGQYPTIAKVDRGILQGDPLSPILFNLIIDQLLAKIPEEIGFELDKDTRVGGMAFADDLNLISSSKVGMTVSLKIMEETGRKWGLTFNHDKCSYLALIMERCKTVRAAKGFDFKINGRNIRPLNHDEPWRYLGAYFSAEGLKDAPEMLKIWLQRVKKSLLKPQQRYSVLKDHLIPRLIHRLCMSNTSGRKLNKLDRIIRTSLTGKNGFLHLPGDTPAAFFHAPTADGGMGLMRLRHSIPSMIVERFERLGKSASNLVRIAAFGHANSKRVTRARSILVKSGNIEGLGSSNVRAVNAALLHERIDGNRLKLAREVPYVHEWVNDGTLFLNGNMYCNALKVRILAIPTKSRSTRGRDLDRNCRAGCMVPETNSHVSQRCHRSYGGRIKRHDRVVNVLANSLRKLGHTVDIEPIIPTTVGKRKPDIVAVKDDKVHVIDPTICGESEDPDVAHRQKVAKYGDNPDVHKFLETKYPGKTISFGSLTMTFRGIWSKESEEYLLGIDVPKETLKRATVVAMEGTVQCFRMFMMSCEMRKFGREVKARAWDSHYDM

SEQ ID NO: 19378 - protein, 935 aa, Amphibalanus amphitrite
MSEAVTQDVPGSQTQTGECRRLRVSHTQCSGTGARHRKAGEALRKRVCAKLSDGDIKGALRLLTSGEEMVLPSASNVTALEAKHPAAPTDLDLPPCPDHELEEPADATEADVMAAINGFNSGSSAGLDGLRPAHLKNLTGKSAGEAGARLVTALTALVNTAAAGRLPACARDAFYSASLTALRKSDGGLRPIAVGSVYRRLATKITLRSITQELGQQLRPIQLGYGSPGGCEAAVHAVRHFSANLPDNEVLVKIDMRNAFNTVRRDKFLSAVRQHAPSLYRLMWQAYSQPSSLYFGTTRIESATGLQQGDPCGPAVFSLAVQAASKEVVSPFNIWYLDDAVIGGDIETVCQDLERVIPALARVGLDVNPNKCEIILPRACSKKKREGNVFQLHRLIPGATVTEESEAIMLGAPVTDEAAEAVITKKYEEFDRMAGRLQYIDSHSALFLLRNCIWMPKLQYLLRVSPFYRQLELLKPLDEKLRVTTSTITNVHFDDKTWKQASLPTRFGGLGLRRAQDLALPSFAASLNHCLPLLTTILPGELHTSMAKERDQTVNAWIRAADNAAPPTGDAVCSQRAWDSVLAEQTQKSLLSSGNQLDQARLLSAAAPESGSWLHAVPSAALGTLLDPETLRIAVALRVGADVCQPHQCRCGARADSRGHHALTCRLSAGRHPRHTALNDVVRRVLQTACIPAILEPTGIDRGDGKRPDGMTVFPFAEGKAMIWDATCVNTFAESHLPSAATSAGAAAKDAETRKCRKYEKFTTRYMFQPVAFETTGACGPSTRAFVKELGARMAANTGDRREQAWLWQRLSLAVVRGNAASVLLAPAVDDCGDGDVYVSRFEQQAPEVDSEPEQYISPESPQPQSSDLLLELLSIDVTEVGKSQSSERKGRSLSNSLQRYRQIFNEMKENYTVTEDRDIMSDPDLAPYLCRRPC

SEQ ID NO: 19379 - protein, 971 aa, Marasmia exigua
MSQAAQTSATITHAAQTNPSTIRDDSECILVQCELCSQPRFFKGLRGLRIHTGRAHRSQHIQANIQTRPDSQTETPAQTTLPFWQKLSSLKCNRPLIKRIPRGARVSVALALSKCIENVVKFNNADSWEHLLTFAYNTLYVNRNERNEGSLTQNIKKNCTNPAPINYSCSRIPSHNKNNSVENSKRIESKINDGDLKGAAQLLFSHDVVAPDNPDTLSALLSKHPLPSSSLRLPDPPLPSDHSLHASPNDVLAALTSFKNGSAGGLDGLTPQHLKDLVSIEAGNAGSALLAHITSLANLMLSGNVTDSITDILYGANLVALKKKDGGIRPIAVGSTFRRLVSKLCVKSIIPDIPTHFQPIQLGFGTRGGCEAAVHSVRSFLHHNGGEVLLKVDVKNAFNSVDRGALLTQTKDKAAHIFKYIWQCYSKPSKLIYKNHLLSSSVGCQQGDPLGPALFSLAIHPTISALNSKFNVWYLDDGTLGGDTATVLEDFNNLIHNFETIGLELNFSKCELYISDTVPNRQEVTSKFSAIAPGIIILEKQNLHLLGAPIFDDAIPNFISNKTTKFQNCSDRFLKINSHMALTILRFCTFVPKLTYYLRCSQFWKFKFLLAPLDELLKNLIGEILNCCLDDRGWVQASLPIRFGGLGTRKISDVALPAFLSSAYGTCDLYATIINPSLGDVEVTCLAEARNAWSISCPNPPSFPNLQKRWDEPLCQAAFDNLLSTSANDNERARLLASAERESGFWLHALPSANVGTVLDKLSLSIAVSLRLGLRIVQPHTCRCGEFVGPLAYHGLSCAQSAGRASRHASLNDLLRRAFISIRVPAVLEPLGICRSDGKRPDGMTIIPWSKGKALVWDATCADTLAPSSVHATARGAGAAAASAETRKRYKYSALDSCYRFAPFGVETLGPWGPEARKLFQELSARLIEFSGDRNAGSYLGQRLGLAIQRGNAASILGTLDNISGADNFFL

SEQ ID NO: 19380 - protein, 655 aa, Marasmia exigua
MLSGNVTDSITDILYGANLVALKKKDGGIRPIAVGSTFRRLVSKLCVKSIIPDIPTHFQPIQLGFGTRGGCEAAVHSVLTFQHHNGGEVLLKVDVKNAFNSVDRGALLTQTKDKAAHIFKYIWQCYSKPSKLIYKNHLLSSSVGCQQGDPLGPALFSLAIHPTISALNSKFNVWYLDDGTLGGDTATVLEDFNNLIHNFETIGLELNFSKCELYISDTVPNRQEVTSEFSAIAPGIIILEKQNLHLLGAPIFDDAIPNFISNKTTKFQNCSDRFLKINSHMALTILRFCTFVPKLTYYLRCSQFWKFKFLLAPLDELLKNLIGEILNCCLDDRGWVQASLPIRFGGLGTRKISDVALPAFLSSAYGTCDLYATIINPSLGDVEVTCLAEARNAWSISCPNPPSFPNLQKRWDEPLCQAAFDNLLSTSANDNERARLLASAERESGFWLHALPSANVGTVLDKLSLSIAVSLRLGLRIVQPHTCRCGEFVGPLAYHGLSCAQSAGRASRHACLNDLLRRAFISIRVPAVLEPLGICRSDGKRPDGMTIIPWSKGKALVWDATCADTLAPSSVHATARGAGAAAASAETRKRYKYSALDSCYRFAPFGVETLGPWGPEARKLFQRVVCPTDRVLWGPECWQLPRPTFRVGHPKRQRR

SEQ ID NO: 19381 - protein, 971 aa, Marasmia exigua
MSQAAQTSATITHAAQTNPSTIRDDSECILVQCELCSQPRFFKGLRGLRIHTGRAHRSQHIQANIQTRPDSQTETPAQTTLPFWQKLSSLKCNRPLIKRIPGGARVSVALALSKCIENVVKFNNADSWEHLLTFAYNTLYVNRNERNEGSLTQNIKKNCTNPAPINYSCSRIPSHNKNNSVENSKRIESKINDGDLKGAAQLLFSHDVVAPDNPDTLSALLSKHPLPSSSLRLPDPPLPSDHSLHASPNDVLAALTSFKNGSAGGLDGLTPQHLKDLVSIEAGNAGSALLAHITSLANLMLSGNVTDSITDILYGANLVALKKKDGGIRPIAVGSTFRRLVSKLCVKSIIPDIPTHFQPIQLGFGTRGGCEAAVHSVRSFLHHNGGEVLLKVDVKNAFNSVDRGALLTQTKDKAAHIFKYIWQCYSKPSKLIYKNHLLSSSVGCQQGDPLGPALFSLAIHPTISALNSKFNVWYLDDGTLGGDTATVLEDFNNLIHNFETIGLELNFSKCELYISDTVPNRQEVTSKFSAIAPGIIILEKQNLHLLGAPIFDDAIPNFISNKTTKFQNCSDRFLKINSHMALTILRFCTFVPKLTYYLRCSQFWKFKFLLAPLDELLKNLIGEILNCCLDDRGWVQASLPIRFGGLGTRKISDVALPAFLSSAYGTCDLYATIINPSLGDVEVTCLAEARNAWSISCPNPPSFPNLQKRWDEPLCQAAFDNLLSTSANDNERARLLASAERESGFWLHALPSANVGTVLDKLSLSIAVSLRLGLRIVQPHTCRCGEFVGPLAYHGLSCAQSAGRASRHVSLNDLLRRAFISIRVPAVLEPLGICRSDGKRPDGMTIIPWSKGKALVWDATCADTLAPSSVHATARGAGAAAASAETRKRYKYSALDSCYRFAPFGVETLGPWGPEARKLFQELSARLIEFSGDRNAGSYLGQRLGLAIQRGNAASILGTLDNISGADNSFL

SEQ ID NO: 19382 - protein, 949 aa, Marasmia exigua
MSQAAQTSATITHAAQTNPSNIRDDSECILVQCELCSQPRFFKGLRGLRIHTGRAHRSQHIQANIQTRPDSQTETPAQTTLPFWQKLSSLKCNRPLIKRIPRGARVSVALALSKCIENVVKFNNADSWEHLLTFAYNTLYVNRNERNEGSLTQNIKKKCTNPAPINYSCSRIPSHNKNNSVENSKRIESKINDGDLKGAAQLLFSHDVVAPDNPDTLSALLSKHPLPSSSLRLPDPPLPSDHSLHASPNDVLAALTSFKNGSAGGLDGLTPQHLKDLVSIEAGNAGSALLAHITSLANLMLSGNVTDSITDILYGANLVALKKKDGGIRPIAVGSTFRRLVSKLCVKSIIPDIPTLFQPIQLGFGTRGGCEAAVHSVRSFLHHNGGEVLLKVDVKNAFNSVDRGALLTQTKDKAAHIFKYIWQCYSKPSKLIYKNHLLSSSVGCQQGDPLGPALFSLAIHPTISALNSKFNVWYLDDGTLGGDTATVLEDFNNLIHNFETIGLELNFSKCELYISDTVPNRQEVTSKFSAIAPGIIILEKQNLHLLGAPIFDDAIPNFISNKTTKFQNCSDRFLKINSHMALTILRFCTFVPKLTYYLRCSQFWKFKFLLAPLDELLKNLIGEILNCCLDDRGWVQASLPIRFGGLGTRKISDVALPAFLSSAYGTCDLYATIINPSLGDVEVTCLAEARNAWSISCPNPPSFPNLQKRWDEPLCQAAFDNLLSTSANDNERARLLASAERESGFWLHALPSANVGTVLDKLSLSIAVSLRLGLRIVQPHTCRCGEFVGPLANHGLSCAQSAGRASRHASLNDLLRRAFISIRVPAVLEPLGICRSDGKRPDGMTIIPWSKGKALVWDATCADTLAPSSVHATARGAGAAAASAETRKRYKYSALDSCYRFAPFGVETLGPWGPEARVVCPTDRVLWGPECWQLPRPTFRVGHPKRQRR

SEQ ID NO: 19383 - protein, 971 aa, Marasmia exigua
MSQSAGPSSSTVRDDNFPIEVKCELCSQPRFFKGVKGLRIHVSRAHRSQNSKVFPTSTDLQTDNSNRLPLWQKLSSLKHSRPLLKRIPRGARTSVAHALGKCLENVVKSNNAESWERLLTFPYRTLFIDRRERNDSSLTQRIKLNCSNPPPLNYSSTFQANKKQNLSIETSKRIEQKISDGDLKGAAQLLFSNDVVAPDSPDTLSALYSKHPPPPSTLHLPDPPIPSDHSLLASPKTVLDALSSFKNGSAGGLDGLTPQHLKDLVSSETGNVGSSLLGHITSLMNLMLSGTVIDSITDILYGANLIALKKKDGGIRPIAIGSTFRRLASKICIRSIIPDIPSQFEPTQLGFGTRGGCEAAVHAVRSFLHHNGAEVLLKVDVKNAFNSVDRGALLTQVKEKTAPIFNYIWQCYSKPSKLIYKKNLLSSSVGCQQGDPLGPALFSLAIHPIISTLNSKLNLWYLDDGSLGGDPTTVLNDLKDVILKFSSIGLDLNFSKCELYVPDTLPDKQNIISKFSEVAPNISILSKETLHLLGAPIFDESIPNFISEKALKFQNSSDRLLKINPHMALTIIRFCTFVPKFTYFLRCSPLWKFKNILTSLDNLLQNTLCEILNCPLDDRSWAQGSLPIRFGGLGTRKISCVALPAFLSSAYSTYNLYHSIINPSLGDVEVTCLAEARNAWSHACPNDPPINPHVQKQWDEPLCRATFEDLLSSSANDKERARLLAVAERESGFWLHALPSANVGTVLDNVTLSIAVSLRLGLPITHPHTCSCGEFVGSLGHHGLSCARSAGRVPRHAYLNDILRRAFISVRTPAVLEPLGICRSDGKRPDGMTLIPWSQGKALVWDATCADTLAPSHVHATSRGAGAAAASAESRKKNKYSALDTCYRFAPFGVETLGPWGPEAHKLFRELSARLLDISGDRNAGSYLGQRIGLAIQRGNAASILGTMSSGADFSSHPSSLVNSIPPVVYF

SEQ ID NO: 19384 - protein, 971 aa, Marasmia exigua
MSQSAGPSSSTVRDDNFPIEVKCELCSQPRFFKGLKGLRIHVSRAHRSQNSKVFPTSTDLQTDNSNRLPLWQKLSSLKHSRPLLKRIPRGARTSVAHALGKCLENVVKSNNAESWERLLTFPYRTLFIDRRERNDSSLTQRIKLNCSNPPPLNYSSTFQANKKQNLSIETSKRIEQKISDGDLKGAAQLLFSNDVVAPDSPDTLSALYSKHPPPPSTLHLPDPPIPSDHSLLASPKTVLDALSSFKNGSAGGLDGLTPQHLKDLVSSETGNVGSSLLGHITSLMNLMLSGTVIDSITDILYGANLIALKKKDGGIRPIAIGSTFRRLASKICIRSIIPDIPSQFEPTQLGFGTRGGCEAAVHAVRSFLHHNGAEVLLKVDVKNAFNSVDRGALLTQVKEKTAPIFNYIWQCYSKPSKLIYKKNLLSSSVGCQQGDPLGPALFSLAIHPIISTLNSKLNLWYLDDGSLGGDPTTVLNDLKDVILKFSSIGLDLNFSKCELYVPDTLPDKQNIISKFSEVAPNISILSKETLHLLGAPIFDESIPNFISEKALKFQNSSDRLLKINPHMALTIIRFCTFVPKFTYFLRCSPLWKFKNILTSLDNLLQNTLCEILNCPLDDRSWAQGSLPIRFGGLGTRKISCVALPAFLSSAYSTYNLYHSIINPSLGDVEVTCLAEARNAWSHACPNDPPINPHVQKQWDEPLCRATFEDLLSSSANDKERARLLAVAERESGFWLHALPSANVGTVLDNVTLSIAVSLRLGLPITHPHTCSCGEFVGSLGHHGLSCARSAGRVPRHAYLNDILRRAFISVRTPAVLEPLGICRSDGKRPDGMTLIPWSQGKALVWDATCADTLAPSHVHATSRGAGAAAASAESRKKNKYSALDTCYRFAPFGVETLGPWGPEAHKLFRELSARLLDISGDRNAGSYLGQRIGLAIQRGNAASILGTMSSGADFSSHPSSLVNSIPPVVYF

SEQ ID NO: 19385 - protein, 956 aa, Cnaphalocrocis medinalis
MSQAAPSTSTVRDDIEVKCELCSQPRFFKGLRGLRIHVSRAHKSENLQLNSTPTDVQNVTDAPPSNITLSLWQKLSFLKHSRPLLKKIPRGARTSVATALGKCIENAVKLNNAESWERLLIFPYITLFVDRRERNDSSLTHKIKSNCTNPSPINYNSTFQAPKKQNLPSEVKRIEQKISDGDLKGAAQLLFTNDVVAPDNPDTLSALHSKHPPPPSTLLLPDPPHPSDHSLSVSSKSVLACLLSFKNGSAGGLDGLTPQHLKDLVSSETGNAGSSLLNHLTSLINVMLSGQVLNSITDILYGANLIALKKKDGGIRPIAIGSTFRRLASKVCVRSIIPEIPAHFQPIQLGFGTRGGCEAAVHSVRSFLNHFNAGVLLKVDVKNAFNSVDRGALLTQVKEKTPPIFNYVWQCYSKPTKLVYKNHLLSSSVGCQQGDPLGPALFSLAIHPIISALNSKLNLWYLDDGTLGGDALSVLNDLNDIILKFSSIGLDLNFAKCELYIPDSLSDKQILISKFSEIAPNITILNKESLHLLGAPIFEDSIPNFISDKVSKFQKSSDRLLKINSHMALTIIRFCTFVPKFTYFLRCSPFWKFQNILTSLDDLLKNTLCEILNCPLDDRSWALGSLPIRFGGLGTRKISSVALPAFLSSAYSTYNLYSSILNPSLGDVEVTCLADARNAWSLACSDDPPIHPHAQKHWDEPLCRATFDDLLSSSANDTERARLLAVAERESGFWLHALPSANVGTVLDNITLSIAVSLRLGLPITHPHTCPCGEFVGPLGHHGLSCVQSAGRIPRHACLNDLLRRAFISVRTPAVLEPLGLSRSDGKRPDGMTIIPWSKGKALVWDATCADTLAPSHVHATSRSAGAAAASAESRKRTKYSALDSCYRFAPFGVETLGPWGPEARKLFRELSARLLEITGDLNAGSYLGQRIGLAIQRGNAASILGTLNCGADNSL

SEQ ID NO: 19386 - protein, 1086 aa, Oedothorax gibbosus
MATANRGADPAAGGGSSAEGYCEICDKFFSGKRGLGVHRKRAHPEEHNRGIVVDRVKKRWSPEEVLLLAQAEVGALKSNPSCDINQVLSQQFPARTFESLKSKRKTSDYKKALADIRSRPMSPDPEPCPSSVVHSSAPPMHRSPSDSSSPPKAYSISMPLISPSGESPGEDASDVLEALDSTIREDINLLLRDSPSPEAQPRILFPRYRVDPLPPLPDVSEAQLKIFHYVNTLYDAAPESPSSPYLSLAEAWTRYRLDFNRELLFANVEQSINSILPPKNQPKPRSTPAHPPTRRINKKEARRQEYAETQKLFKKSPKTVVEKILEPASVASFPDAILFRSYWKNVMSLPSNQSAPSFHRDALEEANDYTGLWDPITDEEIKKNFPDHKAAPGPDGLKTGALRRLPHFFLPKMLNILLFLGRLPSRLSESKTIFIPKCDNAEDPGEFRPISMTSVLTRLFHKVLASRLGSRIKLSEEQRAFRPTDGVSQNIFLLDLILYNANTNLKESYLASVDIVKAFVSLSHSSIFAALDALGLPLELQEYLRTLYEESSTIYCFPGSSGEAFHPTCGVRQGDPLSPLLFNIFMEFLIRRLRSFIGIDIGEVHLGLSAFADDLLIFASTSDGLQFQMKKAVDFMATCNLRVNTAKSFVISLVPDGRNKRMKTVDPEIVVNGAPLRSLRPGEEFKYLGVFFRSDGLLFYSPVAKIKDWLTKLSHVPLKPQQRLLIIREFPIPRILHHSVLSRVRIGVLTKADRAVRAFVRKHLNLPHDAANVFMHGDIADGCLGIPSLRVIVPEMRLKRLESIKRSLSDRASDSFSLNFLMSHIHRAIDAAVPGSPKSYWRRQLSSCVDGAGLQESALTPGQHNWIKGRSLFLSGRDFIQAIKLRFNCLPCRSRCARGRPEKDRLCGAGCARNESLSHILQVCPRTHGHRIKRHNAVASYVARGLEDRRFTVYQEPRFSSSSQGLLKPDLLAVNDGKAYILDAQVISDGEPQGLAHRRKLDKYTELIPSVSAMHHVDDVKVYSVTPNWHGVWAPESAAALLADGLLRKSDLPVLSTRVIIGGLSCFHFSKSTARSKPHGHFRRPP

SEQ ID NO: 19387 - protein, 1013 aa, Ceratina japonica
MSYPADNSAGASGNSPGTHQPGSSVAEMFVCEYCVRAFSTRTGRGLHIKKAHVQQANMAIETSRSRARWTEEELETVAIAELECEGSAAINQEIQSRIPYNRTIEAIKCLRKQKRYKDIKERVREKRAASTREPDQETLLFEEANEITHIREVPEEALRAWLQVIPQDNGNPLNINLRRAVAMALDGQSPRSALQDWLESVMQNDNSLGRSDRMNTNQRTGENNQASSRRKEKKANYKRIQELWKKNMSKAAHIVLDGDNEAVVQPSLQQQEAFWRPIMEGQSEYRTGEHEYGHRFPGEINVLWSPITDEEIKKLKPCNGTAPGPDKMTTAIWNGIDDREKKIFFNVIMYTQECPKNILESRTVLIPKEPETMDPTCFRPLSIASVALRHFHKILANRMGEQGLLDVRQRAFIVADGVAENSSILSAMIKEARLKRRSLFLAILDVKKAFDSVRHDAILSAMTVKKIPLEMRRYIMKIYESSRTRLEVKKKMGEWIWPSRGVRQGDPLSPLLFNCVMDTVLQGIPEHIGFPMKDEKISALVFADDLIIAAETREGLQCSLDKVKDGLLLQGLEMMPRKCHTLAMVAAGKEKKMKVETQDPFLVDGQTLNQLGPHDRWKYLGVEYDSYGPVQVKINIGEELRRITSAPLKPQQRMVILNMFPIPRLIHRLVLGRVTNAELRRGDKMVRKSARTWLRLPHDTPIGYFHAPIKDGGLGIPAFESRIPELVKSRLEALRNSNMTSAKSLVDGEWANGRKKWINTRKRENKDWAEILHRTTDGKELSETGKAEASYSWVRDSHVSIPARDWIKYHHVRINAFPTLMRMSRGRRGADNALCRAGCGLPETLYHIVQQCPRTHGGRVLRHDKITEQVAIDMIDKGWQVQREAHIQTSMGLRKPDIIACRGTECCIIDCQIVAGTGMRIQHERKIYYYASNLELLSKVAHRMNHLGPVRVEAVTVSWRGIWEPRSYKLLRECGIPKIKMKGITTRVLLGSCLNFSSFNKATYRTRRHPTAC

SEQ ID NO: 19388 - protein, 1014 aa, Cecidostiba semifascia
MSNPADDFAGASGNRPGDHQPGVSATSVFVCEYCLRAFGTKTGRGLHIKRAHGQQANEAVQTERSKARWTDEEIRAVVELEIECASTAAINQEIQRRLPYNRTTEAIKCLRKQQRYKDIKESVERARAERRVLDGIQEGHDTEVVEAGSITQEDPKIILANWLKDALVESGNRLDNNLRAAVTTALEGRSPTEPLQKWLESITEEEVNSRRNNMGNSNFQANAVKQPTSRRNMKRAEYKRIQQLWKRNMSKAAHIVLDGDTDTVVQPSLQLQEAFWKPIMECQHEDIIEEQSDEQRVPGELYELWRPVNEVEVKEQKLDSGTAPGPDGMTTMMWNRVNDYSKTIFFNVIMYAQECPGLILDSRTVLIPKEPGTMDPACFRPLSIASVALRHLHKTLASRMSERRLLDPRQRAFIVADGVAENTSLLSAMIREARQKIKGLYIAILDVKKAFDSVNHSAILSAMKRKKIPREMRQYIMRIYRSSKTRLEVMKRKGEWIRPSRGVRQGDPLSPLLFNCVMDAALERLPEHIGFPINTEKINALVFADDLILAAETREGLQRALNEMNEGLRQQGLEMMPRKCHTLAMVPSGREKKTKVETSKPFSVGDQEVNQLGPTDKWKYLGVEFDSYGPVQVKISITEELRRIKAAPLKPQQRMVILNMFLIPRLIHKLVLGRTSNAELRRGDKAIRKSVRAWLRLPHDTPIGYFHTPIIDGGLGIPAFESRIPELLKSRLGALRASNMPSARGLVDGEWVNDRKKWVSSQKVKSDQWAAKLHQATDGKDLREARKAEASYSWVRDTHVAIPAGDWIKYHHTRINALPTLMRMSRGRRTDENALCRAGCRIPETLYHVVQQCPRTHGGRVLRHDTIAEQVAIGMQEKGWTVQREAHITTSSGLRKPDIIACRGPECRIIDCQIVTAGTDIRIQHERKIQYYNTWELRRAVATRMGHPGPVRVDAVTITWKGIWEPRSYNMLRECGIPKVRMKGLTTRVLLGSYLNFNTFNKATYRTDGRILHQ

SEQ ID NO: 19389 - protein, 1029 aa, Muscidifurax raptorellus
MTLLRPTILQGLTGFTMSNPVDNFTGASGNHLGDQPPGVSATEVFVCEYCLRTFSSSNGRGLHVKRAHQLHANEVINTARTKARWTEEEMEAVAAAEIECGPSMSINQEIQRMIPYSRTVDAIKSLRKQQKYKLIKERAETRNAERARALEQNTINVEDELVSSTTQDRPEDILRRWLQAAIAEEENRLDGNLRRAVSMALDGHQPIEALQKWLEAIPMEESTGVISRVGNVNRQMRKKNQPWSRRQEKRANYKRMQQLWMKSMSKAAHIVLDGDTDATAQPSLQQQEIFWRPIMESVSESLTEDYQEEDRLHGELGELWLPTTEDEIKKLKPDNGTAPGPDGITTAAWNRVNTYSKRVFFNVIMYIQECPGSILDSRTVLIPKEPGTMDPACFRPLSIASVALRHLHKIIANRMGERRLLDSRQRAFIVADGVAENSSLLSAMIKEARLRRKGLYIAILDVKKAFDSVYHSAILRAMRKKKLPLEMRKYIMKIYLGSKTRLEVMKRRSEWIRPSKGVRQGDPLSPLLFNCVMDEVLEKIPEHVGFHMNTEKISALVFADDLILTAATREGLQCSLDNIRNGLLLQGLEMMPRKCHTLALVPAGKEKKTKVETQKPFWAGTQEIVQLGPLDRWKYLGVEYDSYGPVQVKVDIAENLNRITSAPLKPQQRMVILNMFLIPRLIHKLVLGKTSNAELRRGDKLIRKSVRAWLRLPHDTPIGYFHAPIRDGGLGIPSFESRIPELLKARLEALSGSSMPSAKGLIDGEWVRDRRKWISTQKVKNNEWAGKLHQTTDGRDLRDTGKVEASYNWVRDTHVSIPAGDWIKYHHTRINALPTLMRMSRGRRAAGGALCRAGCGLPETLYHVVQQCPRTHGGRVLRHDHIAEVIAISMQEKGWQVQREPHITTSIGLRKPDIIALRGEECKVIDCQIIAGGIDMRTQHDRKVHYYDSWELRRAVALRMNHLGLVRVEAVTISWKGIWEPRSYNMLRECGIPKIKLKGITTRILLGSYLNFNTFNKATYRVEGRDVLS

SEQ ID NO: 19390 - protein, 1015 aa, Nasonia vitripennis
MTNPADNFAGASGNHPGEDLPGTSATGMFVCEHCLRAFTTNTGRGLHIKRAHEEQANEAITTERSRARWTNEEMEAVAEAEIDCEGRTAINQEILRIIPYQRTIDAIKCLRKQQKYKTIRERVANRRAENRARETELTRLETADEDPASQEQDNPNMSLKNWLREVIESDDDRLCADLRTAIEMALAGQSPLDVLHRWLLSIHNDETATGTSGTGRTHLLVQRPKQQQSRRNAKKADYKRIQQLWKKNMSKAAHIVLDGDTDAVSQPGLKEQEAFWVPIMEGQAVPTNTDNFADQRMQGEIKNLWRPISNDEIKELKPASGTAAGPDGMTTTAWNSIDECNKKAFFNMIMYMGQCPGDILDSRTVLIPKEPGTMDPACFRPLSIASVALRHFHRILANRIGEHGLLDTRQRAFIVADGVAENTSLLSAMIKEARMKIKGLYIAILDVKKAFDSVEHRSILDAMRRKKLPLEMRNYIMWVYRNSKTRLEVVKTKGRWIRPARGVRQGDPLSPLLFNCVMDAVLRRLPENTGFLMGAEKIGALVFADDLVLLAETREGLQASLSRIEAGLQEQGLEMMPRKCHTLALVPSGKEKKIKVETHKPFTVDNQEITQLGHADQWKYLGVVYNSCGPIQVKINIAGDLQRVTAAPLKPQQRMAILGMFLIPRFIHKLVLGRTSNAELRKGDKIIRKTVRGWLRLPHDTPIGYFHAPIKEGGLGIPAFESRIPELLKSRIEALGASNMQTARSLLGGDWVAERKKWINTQKIKNSEWAQKLHLTTDGKDLRDTRKAEASYSWIRDIHVAIPASDWIKYHHTRINALPTLMRMSRGRRTNGNALCRAGCGLPETLYHVVQQCPRTHGGRVLRHDKIAEQVAIFMQEKGWRVLREAHIRTSVGLRKPDIIARKGQDCKIIDCQIVTTGNDIRIQHERKIQYYASNWELRRSAATMIGHQGQVSVEAITISWKGVWEPRSYCLLRDCGIPKVKIKGLTTRVLLGSYLNFNTFSKATYRTERRRTAN

SEQ ID NO: 19391 - protein, 1015 aa, Pteromalus puparum
MTNPADNFAGASGNNPGEHQPGASAADVFVCEYCLRSFTTNTGRGLHIKRAHGEQANEAITTERSKARWTNEEMEAVAEAECDCEGRTAINQEIQRMIPYQRTVEAIKCLRKQQKYKTIRETVERRRAESRAREAVLARSEAAQDDQTNQVQGNPEASLKDWLKDTLESEDGRLNAELRTAVEMALQGQQPLDALQRWLQLIRNDEVTTGTSGTGRTKQPAQSTTQLQSRRNAKKEDYKRIQQLWKKNMSKAAHIVLDGDTDAVAQPSLQQQEAFWVPIMEGMTDAAATPVLTDRRMLGEINALWNPINDREIKELRPTSGTAAGPDGMTTAAWNSVDDYNKKVFFNLIMFVGKCPGNILDSRTVLIPKEPGSMDPACFRPLSIASIALRHLHKVLANRIGEHGLLDTRQRAFIVADGVAENTSLLSAMIREARAKIKGLYIAILDVKKAFDSVKHEAILQAMRSKKLPLEMRKYIMWVYKSSKTRLEIMKIKGRWIRPARGVRQGDPLSPLLFNCVMDAVLQGLPENVGFAMNTEKVGALVFADDLILLAETREGLQASLNKVEMGLKEQGLEMMPRKCHTLALVPSGKEKKIKVETHKPFTVGNQEITQLGPADQWKYLGVVYNSYGPIQVKIDIAGELQRITAAPLKPQQRMVILGMFLIPRFIHKLVLGRTSNAELRKGDKTIRRAVRGWLRLPHDTPIGYFHAPIKEGGLGIPAFESRIPELLKSRLEALRASNLQTARSLAGGDWMAERKNWISTQKIKNSEWAQKLHLTTDGKDLRDTKKAEASYSWVRDTHVAIPASDWIKYHHTRVNALPTLMRMSRGRRTNENALCRAGCGLPETLYHVVQQCPRTHGGRVLRHDKIAEQVAIFMQEKGWLVLREAHIRTSVGLRKPDIIARKGQDCKIIDCQIVTAGNDIRIQHERKIQYYASNWELRRTAASMVGHQGPVNVEAITISWKGVWEPRSYCLLRDCGVSKVKIKGLTTRVLLGSYLNFNTFSKATYRTDRRRTAN

SEQ ID NO: 19392 - protein, 1151 aa, Schistosoma mansoni
MITMPVSTSAETDITSSLPIPASSIVSPNYTFPDSSSTCLICFAVFPTHNILLSHVTAVHHTSCPPTPVQDGTQQMFCVLCTAAFSSNRGLSQHIRHRHISEYNELIRQRITGQPKSRIWSPFDDASLLSIANREAHRFPTKNDLCQHISTVLTRRTAEAVKRRLLHLQWSRSPTPTNTPSNNHTITDIPNTEALYVSPVDLDDQPEVYDATSPDASTHPLPELRIVLPPLSSPIRLQYTSELHTTDDSTTNSMHSPPTYACDSDESLGVTPSSTFPSCFNSYQDPLAEHRTKLLRVSSNLLRSNCTRLRSSSLLTFLQSGSLIMDEEHISTFLNNHAEIVFPRTWTPSRPKHTSHIPTNVSRKKIRKIEYAHIQTLFHHRPKDAANTVLDGRWKNPGSHFSSIDDFTEFWRTIFTSPSVPDDREILPVIPTNAALIDPILPSDVQWALREMRGTAPGIDRITAVDLMKYNKNSMAGYLNMLLAFAYLPLNLNTARVTFIPKTANPSNPADFRPVSVAPMITRCLHKILARRWMPLFPQERLQFAFLNRDGCFEAVNLLHSVIRHVHTHHTGASIAILDVSRAFDSVSHDPILRAAKRFGAPDLLIQYISNYYWDSTSKFNDTECHPSCGVKQGDPLSPLLFIMVLDEVLEGLDPSTHLTIGGETVNYIAYADDLVVFAPNANLLQQKLDRISQLMSKAGWSINAIKSRTTSLISGGHSKLTALDDTTFTTSGVNIPALKATDTFEYLGIPFNFKGRCSVNHNDILNQYLSEVSRAPLKPQQRIKILRDNLIPKLLYLLALGVVHKNTLKKLDRTIRAAVRKWLRLPKDTPTALFHSPIAAGGPGLQQLSSSVPLHRRKRLAGLLSARNRLLHQLPTSPTLKSYTTACQLPIVIGGNRVTSKEEANNSLIRQLHSSLDGKGLRPAQDCAESHLWLRNPGNLYPSVYINAVKLRGGLLPTKVRRSRGGRLSNGLNCRGGCAQPESIQHILQHCAQTHHVRCKRHNEVCTLISRKLRRLQLTYFQEPCIPLETTYCKPDFVIIRDSIAYILDVTISDDSNMENSRLLKISKYGNPKTVASIMRFLSASGHNVSSVRQTPVVLTYRGILNKTSHQSLRRLSFSSIDLGDLCLNAIQGSIKIYNTYMRGTHRSNA

SEQ ID NO: 19393 - protein, 1151 aa, Schistosoma mansoni
MITMPVSTSAETDITSSLPIPASSIVSPNYTFPDSSSTCLICFAVFPTHNILLSHVTAVHHTSCPPTPVQDGTQQMFCVLCTAAFSSNRGLSQHIRHRHISEYNELIRQRITGQPKSRIWSPFDDASLLSIANREAHRFPTKNDLCQHISTVLTRRTAEAVKRRLLHLQWSRSPTPTNTPSNNHTITDIPNTEALYVSPVDLDDQPEVYDATSPDASTHPLPELRIVLPPLSSPIRLQYTSELHTTDDSTTNSMHSPPTYACDSDESLGVTPSSTFPSCFNSYQDPLAEHRTKLLRVSSNLLRSNCTRLRSSSLLTFLQSGSLIMDEEHISTFLNNHAEIVFPRTWTPSRPKHTSHIPTNVSRKKIRKIEYAHIQTLFHHRPKDAANTVLDGRWKNPGSHFSSIDDFTEFWRTIFTSPSVPDDREILPVIPTNAALIDPILPSDVQWALREMRGTAPGIDRITAVDLMKYNKNSMAGYLNMLLAFAYLPLNLNTARVTFIPKTANPSNPADFRPVSVAPMITRCLHKILARRWMPLFPQERLQFAFLNRDGCFEAVNLLHSVIRHVHTHHTGASIAILDVSRAFDSVSHDPILRAAKRFGAPDLLIQYISNYYWDSTSKFNDTECHPSCGVKQGDPLSPLLFIMVLDEVLEGLDPSTHLTIGGETVNYIAYADDLVVFAPNANLLQQKLDRISQLMSKAGWSINAIKSKTISLISGGHSKLTALDDTTFTTSGVNIPALKATDTFEYLGIPFNFKGRCSVNHNDILNQYLSEVSRAPLKPQQRIKILRDNLIPKLLYLLTLGVVHKNTLKKLDRTIRAAVWKWLRLPKDTPTALFHSPIAAGGPGLQQLSSSVPLHRRKRLAGLLSARNRLLHQLPTSPTLKSYTTACQLPIVIGGNRVTSKEEANNSLIRQLHSSLDGKGLRPAQDCAESHLWLRNPGNLYPSVYINAVKLRGGLLPTKVRRSRGGRLSNGLNCRGGCAQPESIQHILQHCAQTHHVRCKRHNEVCTLISRKLRRLQLTYFQEPCIPLETTYCKPDFVIIRDSIAYILDVTISDDSNMENSRLLKISKYGNPKTVASIMRFLSASGHNVSSVRQTPVVLTYRGILNKTSHQSLRRLSFSSIDLGDLCLNAIQGSIKIYNTYMRGTHRSNA

SEQ ID NO: 19394 - protein, 913 aa, Cotesia vestalis
MVESYKAAENANENLTETPSPDSQPESLTIEATPNIEPESIPRVLVNEVTEIIAEWLQDAIKYLNTDGKSESGRFHLLSAIHDVLYHRSPELNLELWFQTRFRRTDGMDRPPQPQERPRIPMSKRARRRFEYKSTQKLWSKNMSKAAKKILDGDVEDQQHPSLEQQETFWRNLLTEQSKEFEQTCEPTPAKMHEEVLRPISVTECKKYRPDHKTAAGPDGLKAKNWLDNVSNMVKATIMNVMLLWGQTPKIWRDSRTVLIPKEAGTMDPAKFRPISISSIVLRHFHRVLAGRLTDLELFDKRQRAFIRADGIAENSFVLSSVLDDSWKNLRQLHVAAIDVRKAFDTVSHKALPWILLKNGIPHHLVDYVVKMYDEAQTQLEVDGKLSNPIQPGQGVRQGDPLSSIIFNLVMNEIIGSVGDGIGYRLGHSSINVLAFADDLLLLARTKEGLQDLIDAVIDEMKKYGLAPMPKKCCCLSLVPNGKAKLMKVMSQQLFQIDNEPVPQLGISDYWKQLGVVFGAKGPNAPIIQMNDLLGRVTRAPLKPQQRMKILQTFLLPRFMHKLTFGKLTHGALRRMDKQIRKVVKEWCKLPHDVPSAYFYAPAREGGLGITCLATKIPELVMKRINSLGKSNFPAAVEAGKSLWAHAKRKWCCLTSLRDRDWSNKLHRSTDGFDLREARNSAASYQWISDPYIRIPARDWIQFIRLRINALPSRMRTSRGVRRANLLTECRAGCKVPETTYHTIQGCHRTHGGRIERHNALVNARAKKLSSIGYKVEIEKQYRTNEGVRKPDITAKRDNKVIILDAQVVAAHRNLDESHKLKRDKYKMNNSLISLVSGYHNVPRSSVDVSTITISWRGIWSGASSQELRALGLNTSFQTSLTTRVLQGSHTNFNRFNKMTTMATRDILRNRPP

SEQ ID NO: 19395 - protein, 1114 aa, Cotesia typhae
MSSDKNALLRARVASLPVPIVVLSRLSASQLTGYEKQLRNSKLTCQSASKEDNLTDTGNKTHVERSRDGITMPSPSEDNLSVTPESFVEDPNQRNENTTASPGGPANIFRCPYCTRHFSTLRGLGVHKKSQHPIERNEEIDVTKKKPRWQDEDLRRLAMEEARAPPSTRFMNEYLLDNVKMYPARSAQAISSLRRKPAYKEMVESYKVTQNEKENLTETPSPDSQPESLTIEATPNTEPESIPRVIVNEFREIIAEWLRDAIKYLNTDGKSESGRFHLLSAIHDVLCQRSPELNLELWFQTRFRRGDGTAGLPRPQEGPMIPMSKRARRRCEYKSTQKLWSKNMSKAAKKILDGDVEDQQHPSLEQQDTFWRNLLTEQSREFEQTCEPTPTRMHEEVLRPISVTECKKYKPDHKTAAGPDGLKAKNWLDNVSNMVKATIMNVMFLWGQTPKIWRDSRTVLIPKEAGTMDPAKFRPISISSIVLRHFHRVLAGRLTDLELFDKRQRAFIRADGIAENSFVLSSVLDDSWKNLRQLHVAAIDVRKAFDTVSHKALPWILLKNGIPHHLVDYVVKMYDEAQTQLEVDGKRSNPIQPGQGVRQGDPLSSIIFNLVMNEIIGSVSDGIGYKLGHSSINVLAFADDLLLLARTKEGLQDLIDAVIDEMKKYGLAPMPKKCCCLSLVPNGKAKLMKVMSQQLFQIDNEPVPQLGISDCWKQLGVVFGAKGPNAPIIQMNDLLGRVTRAPLKPQQRMKILLTFLLPRFMHKLTFGKLTHGALRRLDKQIRKVVKEWCKLPHDVPSAYFYAPAREGGLGITCLATKIPELVMRRINSLGKSNFPAAVEAGKSSWAHAKRKWCCLTSLRDRDWSNKLHRNTDGFDLRETRNSAASYQWLGDPYIRIPARDWIQFVRLRINALPSRMRTSRGVRRANLLTECRAGCKVPETTYHTIQGCHRTHGGRIERHNALVNATARKLNSIGYKVEIEKQYRTNEGVRKPDITAKRDNKVIILDAQVVAAHRNLDESHKLKRDKYKMNTSLISLVSGYHNVPRSSIDVSTITISWRGIWSGASSQELRALGISTGFQTSLTTRVLQGSHMNFNRFNKMTTMATRDVLRNRPP

SEQ ID NO: 19396 - protein, 1043 aa, Cotesia vestalis
MPSPSEDNLSVTPESCVENPNQRNENMTASPGGPANIFRCPYCTRYFSTLRGLGVHKKSQHPIERNEEIDVTRKKPRWQDEDLRRLAMEEARAPPSTRFMNEYLLDNVKMYPARSAQAISSLRRKPAYKEMVESYKAAENANENLTETPSPDSQPESLTIEATPNIEPESIPRVLVNEVTEIIAEWLQDAIKYLNTDGKSESGRFHLLSAIHDVLYHRSPELNLELWFQTRFRRTDGMDRPPQPQERPRIPMSKRARRRFEYKSTQKLWSKNMSKAAKKILDGDVEDQQHPSLEQQETFWRNLLTEQSKEFEQTCEPTPAKMHEEVLRPISVTECKKYRPDHKTAAGPDGLKAKNWLDNVSNMVKATIMNVMLLWGQTPKIWRDSRTVLIPKEAGTMDPAKFRPISISSIVLRHFHRVLAGRLTDLELFDKRQRAFIRADGIAENSFVLSSVLDDSWKNLRQLHVAAIDVRKAFDTVSHKALPWILLKNGIPHHLVDYVVKMYDEAQTQLEVDGKLSNPIQPGQGVRQGDPLSSIIFNLVMNEIIGSVGDGIGYRLGHSSINVLAFADDLLLLARTKEGLQDLIDAVIDEMKKYGLAPMPKKCCCLSLVPNGKAKLMKVMSQQLFQIDNEPVPQLGISDYWKQLGVVFGAKGPNAPIIQMNDLLGRVTRAPLKPQQRMKILQTFLLPRFMHKLTFGKLTHGALRRMDKQIRKVVKEWCKLPHDVPSAYFYAPAREGGLGITCLATKIPELVMKRINSLGKSNFPAAVEAGKSLWAHAKRKWCCLTSLRDRDWSNKLHRSTDGFDLREARNSAASYQWISDPYIRIPARDWIQFIRLRINALPSRMRTSRGVRRANLLTECRAGCKVPETTYHTIQGCHRTHGGRIERHNALVNARAKKLSSIGYKVEIEKQYRTNEGVRKPDITAKRDNKVIILDAQVVAAHRNLDESHKLKRDKYKMNNSLISLVSGYHNVPRSSVDVSTITISWRGIWSGASSQELRALGLNTSFQTSLTTRVLQGSHTNFNRFNKMTTMATRDILRNRPP

SEQ ID NO: 19397 - protein, 1341 aa, Agrilus planipennis
MVIVAKNYKTTRSSSLATKSRGPSPLTIEEAKKYSGPPPSAPQGNICSPTLRCADCGKVYETKSGLMKHMKTCGSRSRRKCNFCTKEFSTYPGLRLHERRAHTQDYLNGLEENLPPPSNIIFEKLADIEAKAKKGEPFFKLMELATGLTKHQIRHRREKPEYKEYLARAKEIIRIQSSPFITDCCPPSTSTNTILQSQQPSHKGNDEAPPERPLNFPAGSSTPADVVNFLSHTKPRTSSGGIIEDITTYDHPSKTPTDQNKPVKLLTCTPSCSPPSTSKGGGNSSNTLLNLSTTTEKETTLTYMTPTTPEAILPIASSPGVHYSQIAGPSRPIKPNASLTNLYSLRKKIRFEGRCTQPHQSPIDDASNGDHQLPSPNTSSNQVSDNERNNLTAFFSSLKDALGELDPDKHSSLRDLISFTFSDPPKEELTSRVDAYLQGLSRKNPSHRRPEKKLPSPNTSSNLVSGNERNKLTSFFSSLKDALGELDPDKHSSLRDLISFTISDPPKEELTSRVDAYLQGLSRKNPSHRRPEKKNKINKKYTTNYAHKNSQGSERSSAFKKAQDLFARNKSSLANIIFSGRKIVSSSSEHPPLKLVEDTYSDIFETPSPSEIRPILDQKPLADIFHPITVDDIAFAKTNWHHSAPGPDGLTIPTVKSFSDTALAALYNILLSYNIIPSSWVQLRTILIPKGDVNSDINSWRPITISSSLQRLLHRILAHRIKSCIAQDINQRGFTETDGTMANALLLDQYIRSRLEQGLPYNVVSLDIRRAFDTVSHNSIDRALRRFGIPDGIRSFIISSLQCSTTTIRVGTQTTRPISIQRGVKQGDPLSPLLFNMVLDELLHLLNKGVAGGTIIDGTRCSAMAFADDLILLEDKEINLPGRLSLISSFLSSCGMAINPKKCSSIIAPAKNRICIPRSKPTLRLYDSWIPVVNTINAFKYLGHSFSSTGVLKPSLYNLPVWLEHLSAAPLKPDQKLVLLRDHLIPRLFHAFQNPRITGKTLQQADRLIKRTTKRFLHLNIHTSDAYLYAKIRDGGLGICNLRRAIPQIFSKRLTNLVTSSDPIIVAALTSTYGQNLINRISLLAGKVPWENFWREKIKSSPLSVGLEAASDDAASRGWLQSKPFGWTGKDFVKAVQLRTNNLPTVGIPSNPPEKQKCRAGCGKIESISHVLQGCHITHWDRIHRHNAIADKVARHCRSKGWHVESEPHVRHPDGQLYKPDLIIHQGERIIVSDIQVSWDGATPLGVAYNNKKLTYGNDHFLEAARKKWPGKSFSFLPIIVGARGIWPRCNSPSESVLEISPSLKAACVHLVLKWGASIHGAFMKAIWSKNPSLHSQHTRK

SEQ ID NO: 19398 - protein, 1011 aa, Orussus abietinus
MMARREMELQQQGTLFINEALKEAFPHRSIDAIKGKRRAPAYRALVAQFTEEEDRPAAHQQPPTPPPPPPPGPRPSEPPHHGRHHRPRLQRQGIEQADPRPGPSTAPIPPPGPWTRSQARRLADNEQPGTPRSPPASIQQPAPTPDEDRRIADALLEWAREDPPDHPAARDLQDICRDAATTSKDTILLRLGLLLTRHFPGQPARVPRRPPQARAVASSRQRRRAAYARTQREWAKHRDRCVKGILAPTGNSAVPPRNVMEPYWTAIMDQPSDAKPTLPPSPATIRGVWTPISDLEVRKFQMPASSAPGPDGLTARAWRSIPAGIRAAVYNIILHCQRLPEVIRHSRTVFIPKKMDAVQPGDFRPISMPSIWVRGLHKILAWRLTQGLRLDARQRGFIAADGCAENVLQLDTILGEHRASHRSLYAASVDVSKAFDSVSHPALLASIQALGVPQPMVEYLGEVYATGATRLEGPGWESALIHPRRGVRQGDPLSPVLFNCVVHHVLAQLPEDVGATAGASRINALAFADDLILFASSRTGLQRLINVTEGALNEAGMRLNPEKSFTMSMVGLGRKKKYVADSAARFTSSGGNLPAIGRTQTWTYLGVPFSMEGRRAVIPGDTITPGLEALTKAPLRPQQRLYALRTHLLPAVHHRLILGRVHLGALRKLDRVVRSYVRRWLALPQDAPNAYIHAHVDDGGLGIPALRWEMPRLRADRLEKLRRAHFPLAEDAVSYIAAEILYAKRRLKDGNELLTSAADLRARWARLLWQSVDGAGLRESTRTPGQHRWLTNPTRLLSGRDFLNSVKMRIAAIPVRSRTSRGRLHDRRCRAGCANQETLQHVLQSCHRTHDARVRRHNAVASFVARQLRNNGYTVAEEPIFRTTAGVRKPDIVATLGPTTLVLDAQVVGDQVALDAAHARKAAYYSTNPDIGQTLRANERCREIRYSTITLSWRGVWSEASAKELLELGILRTKHLPLLATQVLIGDVAAWQRFNQSTTVAPRRRDRAGIG

SEQ ID NO: 19399 - protein, 1050 aa, Centruroides sculpturatus
MDTPPAARNVPRRRRVTRSVAAPAINSQSPNCTQQSTPTHAPPPGTSQVSELTPPVSPLHQQHELPVQQSPPMEPTATQSSPHVGPATAPTPPAARPPSSPPAPQRPVAPINGTSIPSTADQPSNNDPPSWVIAWVSRFESTLDEDMLEGVLKDFLALVHQVCNIRGPQRNRRRPQQHSSSTRDQNTATEASEIQRLYRANRKRAFDRVMAGTPRFCQVDSTSVYQHFRGMYENPPSRSPTAVPVTPIAPPTTDNPFDEPFTPTEVAKRLARGHNTAPGPDKIRYLHWRKIDPRGLIISAIFNAVRRTGYIPHNWKSSTTVLIHKKGDVNCLSNWRPICLSNTLGKLYSACLADRLLRWCNDNQRLSTAQKGFLNYQGCLEHNFLLNTIIQDARRTRNDCYIAWMDIANAFGNIPHDTLWTSLRWHGLHQDAISTLQQLYEDSTTCVRTCSGFTNPIAMRSGVKQGCPISPLLFIMAMEPAIRQIQAAGKGYPIHGHHVSILAYADDVALISNSATGLQDLLNTITDWTDWAGIRFNINKCGTLAVLGKLHTAGTNTFNIKQQELPRLAKEDAYKHLGVPTGFSKCDTEEATTNNILTSIEKLNSSKLAPWQKVDALNTFIIPKLTFCLTTGTTPKKTLDRIDRLIKRCIKRWLGLPQRASTEIVHLPYKQGGTNVPPTSHLADIAQICHALYLFQSRDEDIAAISRNALADVVKHRIRRDITTDDLCCYLNGSMQEEFGRPSKDITSVWTRLRMATRRLKKKIELNWTTGPDDLPNIVACDNLIRAQDCQRTLCGLLKVYYHQKLAAKPDQGKAYKLTSASEVSNHFINNGQYTRFSDWYFIHRARLSVVALRGHKRFGNEIKKCRRCSYQRETLAHVLCHCPPNFHLITKRHNAVLNRIVAAFRPRDAKVYVNQRIPGFSENCRPDLVVVHEASKTATIVDVTVPFENGAEAFQTARDEKLRKYNSLVQFFKQQGFNTHISAFVVGALGGYDHSNDSTLQRLGINRRYASLMKKLMISDTIRWSADIYRNHLNSQGRAPYPRPNVPQN

SEQ ID NO: 19400 - protein, 1144 aa, Fopius arisanus
MTEQFSDSRPRREVGSDILPAQDCAPLSLLQQLTGRAKHHRDSKTNCQTVSSRGNLTDNHIQYKQNESGVPDSISIQSVGEHTRSLTNLNRNEADASVIPPTASEMIQCPHCDRAFKTKQGLGVHRARSHPQENNEQIVIERTKARWNPEHLRMLAAAEARAPPTVRFMNEYLFREAGTGRTLESLKKQRHSSAYRIMVQQFKDELGQPKRTAHEERNSVQLEGGPVSKDNTSPYQDQPQMTPIPIRDAPPPTQIDRLPMTESAPEADKHSQSHMELHLREDLAFLHNNASDISGGRALEKAVLEVLNGRDPEQSLVDWFHLQFPNAAHTTRLRRGRRGPVSNIQLSKRKQRQRDYRAIQVLWNKNMSKAASKILDGDADKVPHPSLKTQEKFWRPILEDKQELPSTSMDTWTIDDSLKDIFMPITTDEVIESKSDARSAAGPDGVSAGDWLRKVPERIKTIIFNAILYSGKIPPIWRDSRTILIPKENGTLDPAKFRPISISSVVLRHMHRVLSNRLLEKQLLDERQRAFIKADGLADNVFVLSTVINDARSRLRELHVAAIDVKKAFDTVSHGAIERVLQDKGFPPEFVKYIMTMYTSAVTVLEIDGERSSTIHPGQGVRQGDPLSSLIFNMVIDVIIKRIPGFYGYNLGGVQINALAFADDLVLLTESREGLQDVLDGVVRDLALHGLSPMPNKCLALSLVPSGKVKKIRTLSAKTFRIAGCYIPQIGVADTWKHLGVTFCHKGPAAARIDIEDPLMKITQAPLKPQQRLTMLKMFLLPRFTHSLVFGRSNSGMLRKLDRTVRKFVRNWLFLPTDVPLGFYHAPISDSGLGIMSFESAIPELLRRRLINLSCSDFSIARAIRNQDWVISRLKWCDQARVENSDWAKKLHASVDGWELREARNSTLSTSWLHDPFVTIPAREFIQNVRTRINALPSRVRTTRGTFRRQNESILCRAGCGETESTAHIIQRCMRTHGGRVLRHDAICGTVAKLLRAKGFEVHQEETYRTREGARKPDIIAVNDAGANIIDVQIVSGARPLQQAHNTKRQKYANNSDLLNSVSDRFQVIPASIRTSSVTISWRGIWCGESAEFLRYLGIPKSSLRGVTTRVLQGSHLNFNRFNAMTSVANHAQWPWRPRGTAND

SEQ ID NO: 19401 - protein, 1064 aa, Phoronis australis
MKCLRQVARQRLGATSSETGEGLSQVSNHSAEDLPATHQMEALVVEAEVFQNPVPASSAGPPDTAKKDRIKWPSAADKKVWSALDDDLDSILRVTLRGPAETKIEAMTRIVYQVSVDRFGTVEKRKETSNPRGPNRRQREIVTIRRELRELRRLWKSAAEHEKAGITHLTSEARKRLLSLRKAERGAQNRKKRSRQREKFIRNPYQYASRLLGKSKSGTLTCTRADLEDHLAKIHSDELKDTPLGDFPDVEAEDLPDEGFDLGDIKKSEVDSIVKKARSGSAPGPSRISYKVYKMCPKLRERLWKLFKILWRKGIVPAQWGRAEGVYVPKEEGSKQISKFRPISLLSVEGKIYLAILSGRMTDFMIKNKYIDTSSQKGGVPGFSGCLEHNSIISELIHRAKKGKKNLSMVWLDMANAYGSVPHVLVYRAMDIYHIPEKVKSIVKSYYSSCVMRFTVGNFTTKWQHLEKGIMTGCTISVILFIMAMNVLLKRAQSERRGPKLDEVRQPSCRAFVDDITIVTESPVGARTILRCLEELTKWARMSFKAEKSRSLIINRGVLLKRQTFSIAGCRIPTISEQPVKCLGKYYDSSLRDTSRVKDVKAQLKVWLEKIDKDGIPGRFKLWCYQFILLPKLMWPLLIYDVTSSSAEEMERAASRFIRRWLGLPASFSNVGLYCKSSKLVLPVSSVVEEYKVTKVRASITLRNTSDQAISGCITQSRTGSKWSTTSAISEAESRLRHKQLIGSACQGRQGLGYKTGNPARKRLKNPDRDRIIREVRLSENEGRYARAVQMGQQGAWTKWDKVLQREIKWADLWKMSPLKAKFLIRSVYDVLPTPSNLAIWGLTDNPSCIQCGRRCSLEHILSSCSASLASGKYTYRHNQVLKVFARVLVDEVKSKPKSRSHRIEFISFRRSGDEASKKKSPAQKGILHTANDWKLWVDLAGHQSSFPQHIVQTTQRPDLILYSDSSHQIILIELTIPWESRVEEAHERKNLKYTDLRSDCHVNGWRCWSFSVEVGCRGFPASSVTAMARSLGVSATGKKVLLRDVATEAEQASCWIWMKHQQQ

SEQ ID NO: 19402 - protein, 1086 aa, Folsomia candida
MSSRDGILGDPPDNESQPPGDTSSAPPRPKGPHRKSLMDRDFSAIGSVEEETSTNEVVSPVPQVHAIGSTPLDTSSLCVPTRRRTSVSPSSPGVTKKDTFLSARRWIQQSLIPDPNSRIRKANVFSRYAVFVDESGEGGVAETTLGKYIKELLPDVVSHRTTGADAHTFYEGMRWVDSPQSGEAVPHDWGEVLSRLKITTPTLRRVPKGARMEVARALTKVLEKVTTTKTEESWGKLFLFPYVSLPVPQKTDKVKNLTTWVKSGVVRWLLEQAAPPPRLPRPPAKPPREMENVTKKVEAKLADGDIRGAIRLTCSDDTIAPRSQETVDALFSKHPPHPEPTAYPEPLNNSEPPTVDPIEITTAISSFPPGSAGGLDSLRPQILKDLVATGQGEVGEKLLEAIVNFINVVLSGNVPVPFCPIFYGASLTALKKKTGGIRPVAVGNVWRRLSAKIALKRMSPDLVEYLAPHQLGVGIRGGAGAAAHAARIYWGQAHTTSKAFLKVDFNNAFNEIRRDTILYIIHERFPSMFSFLSQAYSFPSQLYYGDTPISSRRGAQQGDPLGPALFALVVQPIILAVETELNLWYLDDATIADTPEKVLVALDTIIRMGEEVGLRLNTAKCEVGVLGADEHSRLEILERFRRAAPGIQEISPEAAVLLGAPLTDESIEAVLGAKAEQLATLGARLLHLSSHSAFFLLRASVSTPRLIYFLRCAPIWRRFDSLTLYDAKLKEPMEGILNCFLSPQSWLQSSFPVSEGGLGVRRAVDVAIPCFLASAYSALPLVERLLPPYLHGTDTAQQEGEERWNPMGPAELPPLEVRGIQAAWEKPQQEAAIKHLKNSAPTPEDKARLLAMGQPHVGAWLNAVPSPQLGTLLPKETFRVACALRLGCDVCHSHKCPCGAEVTTKGYHGLKCKSSAGRYSRHTAANDVIWRALRSAGAPAIKEPPGCSRQDGKRPDGLTLVPWARGRPLVWHSTCSDTFAPSYLPQTCVHPGAAAERAEDAKIKKYEFLQDRFLFVPVVIETIGVWGKEGLSLIKEIGSRITIVTEEKRATSFLLQRMSIAVQRGNVAAILGSLPAGRELDEIFYL

SEQ ID NO: 19403 - protein, 1076 aa, Folsomia candida
MMTPTSTTAANLSTHDDQHCPISTCPGASNTDQWILCDHCQKWYHTACVAVVIIPEEEWLCPTCVISVTSSQSQVTPSSLNTTTTTKKKHIIATTQYWLKSNLVEDPLGLIPKSEIVARYAHHIQTSGEGRVVDATVGKYILQLFPSTKFSRPPTRGAANAYIGIRWKDQPPLLPHAPRNWGAELSQLKNTVPTLRRVPKGARMEVAKALAKIIEEVTTTNSEESWFKLFSFPYAVVPVPTKSDKVKNLTTWVKSRVLQWFVTPSRPRPQFAKPSRPQETIAKKVEAKLADGDVRGAIRLLTSDDTIAPNNQETLDALITKHPPHPEPTYFPNAPDKAEVLAPVDPKEVLIAISSFAPGSAGGLDSLRPQILKDLVISENGEPATNLLNAMLKFLDLVLRGDVPKSICPIFFGASMTALRKKTGGIRPVAVGNTWRRLISKIAVARMSSTLVEIFSPHQLGVGIKGGAEAAAHAARIYWNYSHDSPKAFLKLDFRNAFNEIRRDTLLQIIREKFPNFYRFVSQAYSSPSEIFFAGTPISSLCGVQQGDPLGPALYALVIQPIVDLIDTELNMWYLDDSTIADSPEKVLMAMQTITRMGTEVGLHLNTTKCEVGILGVVDDQTRDEIFELFRSTAPGIQKISPESAMLLGVPLTDEAIPTILGAKTEEMEKISTRLLKLSSHSAFFLLRASISTPRLIYFLRCAPTWRRFDALTLYDAKLKNAMEGIINCSLSPQSWLQSSLPVNKGGLGVRHAIDVAIPCFLASIYSSLPLAERLLPPHLHGIDTAIQEGEERWKSLGSSPLPPLEIRGIQAIWEIPQQEGVINHLTTNATTLEDKARYHAMSQPNVGAWLNAIPSPQLGTHLPNETFRIAAALRLRCDICQPHKCSFGEQVSTKGYHGLSCKNSAGRHSRHAAANDVIARALRSAGVPIIKEPAGCAREDGKRPDGLTLIPWARGKSVVWDFTCSDTFAPSYLPQTSIRPGVAAEKAEDRKKKRYEQLMDSFLFVPIAIETTGIWGKDGLSFIKEIGSRITNITEEKRATSFLLQRMSITVQRGNVASILGSLPKGHKLEEIFML

SEQ ID NO: 19404 - protein, 925 aa, Folsomia candida
MALLPHAPRNWGAELSQLKNTVPTLRRVPKGARMEVAKALAKIIEEVITTNSEESWFKLFSFPYAVVPVPTKSVKVKNLTTWVKSRVLQWSITQIVTPSRPRPQFAKPSRPQETIAKKVEAKLADGDVRGAIRLLTSDDTIAPNNQETLDALITKHPPHPEPTYFPNAPDKAEVLAPVDPKEVLTAISSFAPGSAGGLDSLRPQILKDLVISENGEPGTNLLNAMLKFLDLVLRGDVPKSICPIFFGACMTALRKKTGGIRPVAVGNTWRRLISKIAVARMSSTLVEIFSPHQLGVGIKGGAEAAAHAARIYWNYSHDSPKAFLKLDFRNAFNEIRRDTLLQIIREKFPNFYRFVSQAYSSPSEIFFAGTPISSLCGVQQGDPLGPALYALVIQPIVDLIDTELNMWYLDDSTIADSPEKVLMAMQTITRMGTEVGLHLNTTKCEVGILGVVDDQTRDEIFELFRSTAPGIQKISPESAMLLGVPLTDEAIPTILGAKTEEMEKISTRLLKLSSHSAFFLLRASMSTPRLIYFLRCAPTWRRFDALTLYDAKLKNAMEGIINCSLSPQSWLQSSLPVNKGGLGVRHAIDVAIPCFLASIYSSLPLAERLLPPHLHGIDTAIQEGEERWKSLGSSPLPPLEIRGIQAIWEIPQQEGVINHLTTNATTLEDKARYHAMSQPNVGAWLNAIPSPQLGTHLPNETFRIAAALRLGCDICQPHKCSCGEQVSTKGYHGLSCKNSAGRHSRHAAANDVIARALRSAGVPIIKEPAGCAREDGKRPDGLTLIPWARGKSVVWDFTCSDTFAPSYLPQTSIRPGVAAEKAEDRKKKRYEQLMDSFLFVPIAIETTGIWGKDGLSFIKEIGSRITNITEEGDILFIAENEYHCSKRECSIHFRIPSKRTQAGGDIYVIKNFIYISIVVMLILWM

SEQ ID NO: 19405 - protein, 1080 aa, Folsomia candida
MMTPTSTTAANLSTHDDQHCPISTCPGASNTDQWILCDHCQKWYHTACVAVVIIPEEEWLCPTCVISVTSSQSQVTPSSLNTTTTTKKKHIIATTQYWLKSNLVEDPLGLIPKSEIVARYAHHIQTSGEGRVVDATVGKYILQLFPSTKFSRPPTRGAANAYIGIRWKDQPPLLPHAPRNWGAELSQLKNTVPTLRRVPKGARMEVAKALAKILEEVTTTNSEESWFKLFSFPYAVVPVPTKSDKVKNLTTWVKSRVLQWSITQIVTPSRPRPQFAKPSRPQETIAKKVEAKLADGDVRGAIRLLTSDDTIAPNNQETLDALITKHPPHPEPTYFPNAPDKAEVLAPVDPKEVLIAISSFAPGSAGGLDSLRPQILKDLVISENGEPATNLLNAMLKFLDLVLRGDVPKSICPIFFGASMTALRKKTGGIRPVAVGNTWRRLISKIAVARMSSTLVEIFSPHQLGVGIKGGAEAAAHAARIYWNYSHDSPKAFLKLDFRNAFNEIRRDTLLQIIREKFPNFYRFVSQAYSSPSEIFFAGTPISSLCGVQQGDPLGPALYALVIQPIVDLIDTELNMWYLDDSTIADSPEKVLMAMQTITRMGTEVGLHLNTTKCEVGILGVVDDQTRDEIFELFRSTAPGIQKISPESAMLLGVPLTDEAIPTILGAKTEEMEKISTRLLKPSSHSAFFLLRASISTPRLIYFLRCAPTWRRFDALTLYDAKLKNAMEGIINCSLSPQSWLQSSLPVNKGGLGVRHAIDVAIPCFLASIYSSLPLAERLLPPHLHGIDTAIQEGEERWKSLGSSPLPPLEIRGIQAIWEIPQQEGVINHLTTNATTLEDKARYHAMSQPNVGAWLNAIPSPQLGTHLPNETFRIAAALRLGCDICQPHKCSCGEQVSTKGYHGLSCKNSAGRHSRHAAANDVIARALRSAGVPIIKEPAGCAREDGKRPDGLTLIPWARGKSVVWDFTCSDTFAPSYLPQTSIRPGVAAEKAEDRKKKRYEQLMDSFLFVPIAIETTGIWGKDGLSFIKEIGSRITNITEEKRATSFLLQRMSITVQRGNVASILGSLPKGHKLEEIFML

SEQ ID NO: 19406 - protein, 1051 aa, Folsomia candida
MMTPTSTTAANLSTHDDQHCPISTCPGASNTDQWILCDHCQKWYHTACVAVVIIPEEEWLCPTCVISVTSSQSQVTPSSLNTTTTTKKKHIIATTQYWLKSNLVEDPLGLIPKSEIVARYAHHIQTSGEGRVVDATVGKYILQLFPSTKFSRPPTRGAANAYIGIRWKDQPPLLPHAPRNWGAELSQLKNTVPTLRRVPKGARMEVAKALAKIIEEVTTTNSEESWFKLFSFPYAVVPVPTKSDKVKNLTTWVKSRVLQWSITQIVTPSRPRPQFAKPSRPQETIAKKVEAKLADGDVRGAIRLLTSDDTIAPNNQETLDALITKHPPHPEPTYFPNAPDKAEVLAPVDPKEVLIAISSFAPGSAGGLDSLRPQILKDLVISENGEPATNLLNAMLKFLDLVLRGDVPKSICPIFFGASMTALRKKTGGIRPVAVGNTWRRLISKIAVARMSSTLVEIFSPHQLGVGIKGGAEAAAHAARIYWNYSHDSPKAFLKLDFRNAFNEIRRDTLLHIIREKFPNFYRFVSQAYSSPSEIFFAGTPISSLCGVQQGDPLGPALYALVIQPIVDLIDTELNMWYLDDSTIADSPEKVLMAMQTITRMGTEVGLHLNTTKCEVGILGVVDDQTRDEIFELFRSTAPGIQKISPESAMLLGVPLTDEAIPTILGAKTEEMEKISTRLLKLSSHSAFFLLRASISTPRLIYFLRCAPTWRRFDALTLYDAKLKNAMEGIINCSLSPQSWLQSSLPVNKGGLGVRHAIDVAIPCFLASIYSSLPLAERLLPPHLHGIDTAIQEGEERWKSLGSSPLPPLEIRGIQAIWEIPQQEGVINHLTTNATTLEDKARYHAMSQPNVGAWLNAIPSPQLGTHLPNETFRIAAALRLGCDICQPHKCSCGEQVSTKGYHGLSCKNSAGRHSGHAAANDVIARALRSAGVPIIKKPAGCAREDGKRPDGLTLIPWARGKSVVWDFTCSDTFAPSYLPQTSIRPGVAAEKAEDRKKKRYEQLMDSFLFVPIAIETTGIWGKDGLSFIKEIGSRITNITEEKRATSFYCRE

SEQ ID NO: 19407 - protein, 877 aa, Folsomia candida
MEVAKALAKIIEEVTTTNSEESWFKLFSFPYAVVPVPTKSDKVKNLTTWVKSRVLQWSITQIVTPSRPRPQFAKPSRPQETIAKKVEAKLADGDVRGAIRLLTSDDTIAPNNQETLDALITKHPPHPEPTYFPNAPDKAEVLAPVDPKEVLIAISSFAPGSAGGLDSLRPQILKDLVISENGEPATNLLNAMLKFLDLVLRGDVPKSICPIFFGASMTALRKKTGGIRPVAVGNTWRRLISKIAVARMSSTLVEIFSPHQLGVGIKGGAEAAAHAARIYWNYSHDSPKAFLKLDFRNAFNEIRRDTLLQIIREKFPNFYRFVSQAYSSPSEIFFAGTPISSLCGVQQGDPLGPALYALVIQPIVDLIDTELNMWYLDDSTIADSPEKVLMAMQTITRMGTEVGLHLNTTKCEVGILGAVDDQTRDEIFELFRSTAPGIQKISPESAMLLGVPLTDEAIPTILGAKTEEMEKISTRLLKLSSHSAFFLLRASISTPRLIYFLRCAPTWRRFDALTLYDAKLKNAMEGIINCSLSPQSWLQSSLPVNKGGLGVRHAIDVAIPCFLASIYSSLPLAERLLPPHLHGIDTAIQEGEERWKSLGSSPLPPLEIRGIQAIWEIPQQEGVINHLTTNATTLEDKARYHAMSQPNVGAWLNAIPSPQLGTHLPNETFRIAAALRLGCDICQPHKCSCGEQVSTKGYHGLSCKNSAGRHSRHAAANDVIARALRSAGVPIIKEPAGCAREDGKRPDGLTLIPWARGKSVVWDFTCSDTFAPSYVPQTSIRPGVAAEKAEDRKKKRYEQLMDSFLFVPIAIETTGIWGKDGLSFIKEIGSRITNITEEKRATSFLLQRMSITVQRGNVASILGSLPKGHKLEEIFML

SEQ ID NO: 19408 - protein, 1046 aa, Ectemnius continuus
MPTLISPRISVIASVAAPAPQSSPVYPCPQCERVFRSKIGLGVHRRKAHEDIVNEEVSVERIKRRWTAEELRLMAREEAMATRRGVRFINQHLLILVPGRTLEAIKGARRGTEYKRLVAAAMEDLVASSSGEESFHSIGGSPGPSSMVSPLRTPSAADPTVSPSSSTSPRDWDSVYGSIDHAIRSLIPVASAINGWASNTLAQIALDCLEGVDVEERVGQWFASVFPPSDTGTRSRTARRRIVGPRRKDRRRAEYARIQRMFRAQMSRAAKEILDGPSKEAVHNVRQMSQHWGPFVAQPSGPEPPGTKQRSRRDLEFVWRPVSCEEVAAVTLPLNAAPGIDGLCVRLWRAVPSSIKALLFNVVMRMGGFPPAMIASRTVFIPKGDSPSSPSEYRPISITSVVVRHLHKLLASRLRESKVVDLRQRCFDDGCAENVAVLSTLLMEARSKRRELHVAALDFAKAFDSVNHGAVTCALKSVGMPHKFVDYVGKLYTHSSTAFEVHGERSELFGIGRGVRQGDPLSPYLFCLVVDLVLGTVPADVGYQIGEHRVNCIAYADDVLLFAATQWGLQTSLRTVEARAEEMGLRLNAQKCSVLSLVPSGKEKKIKIVSAPTFRLRSGTYLPQVASTAEWRYLGVDFQARGPKKIGADMEQYLSRISAAPLKPQQRLKILRCFLIPRLYHGLVLGSATLGKLKALDLQVRAAVRRWLRLPSDVSNAFIHASICDGGLGIPALATTVPGLVFDRLKALGQSSSPHVRAVAHAAWATRKLRWASAALTRGEEFLGTKHRRARWWARRLYGSVDGAELRECSETNLSSWWIDGGSHAVPGRDYVQYVHVRINSLPTRIRTSRGRDRTLHATGCRAGCNSTETAAHVIQGCHRTHGGRILRHNAVCRTLAHGLRNAGWTVHEEPVYFTAEGRRKPDLVCQRGDQVHVVDAQVVSGSKPLTETHEAKCRYYAENTSLRDVLCREFGVHPPKLQFSSCTISWRGIWSCKSADLLLGMGLTRGLLRGITTRVLQGSHTNWTRWNKMTGMQTTSRGIDRQGVG

SEQ ID NO: 19409 - protein, 1046 aa, Ectemnius continuus
MPTLISPRISVIASVAAPAPQSSPVYPCPQCERVFRSKIGLGVHRRKAHEDIVNEEVSVERIKRRWTAEELRLMAREEAMATRRGVRFINQHLLILVPGRTLEAIKGARRGTEYKRLVAAAMEDLVASSSGEESFHSIGGSPGPSSMVSPLRTQGAADPAVSPSSSTSPRDWDSVYGSIDHAIRSLIPVASAINGWASNTLAQIALDCLEGVDVEERVGQWFANVFRPSDTGTRSRTARRRIVGPRRKDRRRAEYARIQRLFRAQMSRAAKEILDGPSKEAVHDVRQMSEHWGPFVAQPSGPEPPGTKQRSRRDLEFVWRPVSCEEVAAVTLPLNAAPGIDGLCVRLWRAVPSSIKALLFNVVMRMGGFPPAMIASRTVFIPKGDSPSSPSEYRPISITSVVVRHLHKLLASRLRESKVVDLRQRCFDDGCAENVAVLSTLLMEARSKRRELHVAALDFAKAFDSVNHGAVTCALKSVGMPHKFVDYVGKLYTHSSTAFEVHGERSELFGIGRGVRQGDPLSPYLFCLVVDLVFGTVPADVGYQIGEHRVNCIAYADDVLLFAATQWGLQTSLRAVEARAEEMGLRLNAQKCSVLSLVPSGKEKKIKIVSAPTFRLWSGTYLPQVASTAEWRYLGVDFQARGPKKIGADMEQYLSRISAAPLKPQQRLKILRCFLIPRLYHGLVLGSATLGKLKALDLQVRAAVRRWLRLPSDVSNAFIHASICDGGLGIPALATTVPGLVFDRLKALGQSSSPHVRAVAHAAWATRKLRWASAALTRGEEFLGTKHRRARWWARRLYGSVDGAELRECSETNLSSWWIDGGSHAVPGRDYVQYVHVRINSLPTRIRTSRGRDRTLHATGCRAGCNSTETAAHVIQGCHRTHGGRILRHNAVCRTLAHGLRNAGWTVHEEPVYFTTEGRRKPDLVCQRGDQVHVVDAQVVSGSKPLTETHEAKCRYYAENTSLRDVLCREFGVHPPKLQFSSCTISWRGIWSCKSADLLLGMGLTRGLLRGITTRVLQGSHTNWTRWNKMTGMQVTSRGIDRQGVG

SEQ ID NO: 19410 - protein, 968 aa, Blastobasis lacticolella
MSQACVAPVIGSQASNASVDPVQCSKCFRYFKGVRGLRIHDARSHKTVLQGPQQASQPPPQASTSFFPSPVGCAVWEKLGVLKNSIPIIKRIPRGARTSVASSLSQIIRKVISENTASEWEHLLTFAYRILSFKKDSKHTSLTSKIKRNCLNLTSQSQPLSSVTTNKRQPNPNYVYQKVEEKAANGDLRGAAQLLFSNDVIAADCPETRLALEDKHPVPSPTLCLPDAPDASVQHVETTNDAVFAAVMSFRSGSAGGLDGLSPQHLKDLISGSSGDTGRSLLGDITALVNMMLAGAVCSDVFDVLYGANLCALKKKDGGIRPIAVGCTWRRVASKICCRYASSSLTDYFSPVQLGFGSRGGCEAAVHATRTFLEQNGGEVLLKVDVKNAFNSVDRGALLSEVKKVTPFIYHYLWQCYSKPSKLLFKSHVINSAVGCQQGDPLGPAIFSLAIHPSITKLNSKLNLWYLDDGTLGGDVDTVFNDLRSLIAEFSAIGLELNFNKCELYISDFKSEDEKNEIVSKFNSLAPNIKIQNKESLSLLGAPILTESISPLVVSLTNKFNSFQDRLLKIHPHIAITIIRFCLFAPNAIYILRCSPLWKYPHLLSSLDTAIQTTLSSILNCRFDFRSWTQASLPIRFGGLGIRKILDLSLPAFLSSVHGTRTLTMKIITPSLCGVEVSCLSEARNTWSIMCPNANFPANNNSQRLWDEPLCRLAFSKLLESTGNSADRARLLAVSEKEAGYWLHAIPSPNTGTLLTGATLSLSVCLRLGMKINELHRCHCGSIVDTLGHHGLSCQRSAGRLSRHANLNDVIRRTLATINVPAVLEPNGLARDDGKRPDGMTLVAWSQGRPLVWDATCVDTLAPSHIRATSANAGAAASTAEDLKRRKYGSLGQGYLFAPFGVETLGPWGPSAKKIFQEVSTRLIEATGDRRAGAYLGQRISLAIQRGNAASILGTLPLGSDLESIFYM

SEQ ID NO: 19411 - protein, 972 aa, Blastobasis adustella
MSQAGPSTSVAPILCSQLSNTGASVDSVQCNKCSRYFKGVRGLRIHDGRAHKTGSQGPQQVPQPSTSTSSNTPPDGCAIWERLGVLKSSNTLIKRIPRGARTSVASSLSQVIRKVVSENTLPEWEHLLTFAHRILSVKKDSKRSSLTSKIKSNCTNFNLQSQPPLTVIINRRQPNANHIFQKVEEKAAYGDLRGAAQLLFSNDVIAPDCPETRLALEDKHPAPLPTLRLPDAPEVSDQHVVTSNDAVSAAVMSFRSGSAGGLDGLTPQHLKDLISGTINDAGRSLLEDMTNLVNMMLAGSVCSSVLDVLYGANLCALKKKDGGIRPIAVGCTWRRIASKICCRYAVPKLTDYFSPVQLGFGSRGGCEAAVHGTRTFLEHSGGEVLLKVDVKNAFNSVDRGALLTEVKKVTPFIYNYLWQCYSTPSKLLFKTFAINSAVGCQQGDPLGPAIFSLAIHPSISALTSKLNLWYLDDGTLGGDVNTVFNDLRSLIAEFSTIGLELNFSKCELYISDFKSEDERNDIIAQFNSLAPNIKIQNKNSLSLLGAPILPESISPLIDSLTYKFNSLHDRLLKIHPHIAITIIRFCLFAPNAMYILRCSPMWKYPHLLSSLDASIQTALSSILNCHFDARSWTQASLPIRFGGLGIRKISDLSLPAFLSSIHSTHTLTTKIVSPSLCGVEVSCLSEARNAWSIICPNADIPANPNSQRLWDEPLCRLAFSTLLETSTNTADRARLLAVSEREAGYWLHAIPSPNTGTLLTGATLSLSVCLRLGLKVNELHRCHCGSIVDILGHHGLSCQRSAGRMSRHANLNDVIRRALATINVPAVLEPNGLARDDGKRPDGMTLVAWSQGRPLVWDATCVDTLAPSHIRATSANAGAAASSAEDLKRRKYRSLGQGYLFAPFGVETLGTWGPSAKKMFHEMSTRLIESTGDPRAGAYLGQRISLTIQRGNAASLMGTLPQGSDLETVFYL

SEQ ID NO: 19412 - protein, 968 aa, Blastobasis lacticolella
MSQACVAPVIGSQASNASVDPVQCSKCFRYFKGVRGLRIHDARSHKTVLQGPQQASQPPPQASTSFFPSPVGCAVWEKLGVLKNSIPIIKRIPRGARTSVASSLSQIIRKVISENTASEWEHLLTFAYRILSFKKDSKHTSLTSKIKRNCLNLTSQSQPLSSVTTNKRQPNPNYVYQKVEEKAANGDLRGAAQLLFSNDVIAADCPETRLALEDKHPVPSPTLCLPDAPDASVQHVETTNDAVYAAVMSFRSGSAGGLDGLSPQHLKDLISGSSGDTGRSLLGDITALVNMMLAGAVCSDVFDVLYGANLCALKKKDGGIRPIAVGCTWRRVASKICCRYASSSLTDYFSPVQLGFGSRGGCEAAVHATRTFLEQNGGEVLLKVDVKNAFNSVDRGALLSEVKKVTPFIYHYLWQCYSKPSKLLFKSHVINSAVGCQQGDPLGPAIFSLAIHPSITKLNSKLNLWYLDDGTLGGDVDTVFNDLRSLIAEFSAIGLELNFNKCELYISDFKSEDEKNEIVSKFNSLAPNIKIQNKESLSLLGAPILTESISPLVVSLTNKFNSFQDRLLKIHPHIAITIIRFCLFAPNAIYILRCSPLWKYPHLLSSLDTAIQTTLSSILNCRFDFRSWTQASLPIRFGGLGIRKILDLSLPAFLSSVHGTRTLTMKIITPSLCGVEVSCLSEARNTWSIMCPNANFPANNNSQRLWDEPLCRLAFSKLLESTGNSADRARLLAVSEKEAGYWLHAIPSPNTGTLLTGATLSLSVCLRLGMKINELHRCHCGSIVDTLGHHGLSCQRSAGRLSRHANLNDVIRRTLATINVPAVLEPNGLARDDGKRPDGMTLVAWSQGRPLVWDATCVDTLAPSHIRATSANAGAAASTAEDLKRRKYGSLGQGYLFAPFGVETLGPWGPSAKKIFQEVSTRLIEATGDRRAGAYLGQRISLAIQRGNAASILGTLPLGSDLESIFYM

SEQ ID NO: 19413 - protein, 1078 aa, Darwinula stevensoni
MARHKKKQSVSGELHRATLADKLDGATGARQCSSRSSSGATGVSTIPCLFVCPSCNKECKTKSALLSHLRFKHPPNVSPSVPEHQSPSQILQEVFSYPCTECERSFPTKIGHSLHLKARHPNKYYSEQVTTQKKSRWDEEEDLLLANAELQALKTNIKNINQHILATNILPGRTLESIKGRRKQTKYLDLLSTLQQEIFIGNNTEHKQEEETIQEPEHETLNWKINILKHLKQIPSGEGAKETELDQIIDVLNISTLDNNTIMDLLDKQAEAKPPPKQFIAKKSTSDCNSAPKITSNRVKRREQYKYIQNLYQKDRTRCAQTCYAGLWYNIQTPTSIPPDTLLNFWKQIFEAPEEVDTRAPPETPENLTFLEPITIKELTKHLKVTKTSAPGPDGMTIKQLKQMSKTHLLKLYNLWLLVGYLPKTFKKHKTTLIPKIETPTQPGDFRPITISSVLVRLFHKILAARCTELFQLNPLQRAFIPASGCEENVFLLEHFLKRDKSTFIAFLDIQKAFDSVHHNTIMRAACRQGAPEHFIKYLTNAYQGCNTTLNIIPDSQIKMTRGVKQGDPLSPILFNAVMDEVIKSIPSKLGLKIDDEHFNIMAFADDLCVMTSSVAGLQAALNCLEKEAAYAGLKFNPSKSVTISKVKINKKIIITSKEFTINNDIIPPMKPEDQVRYLGAMVSPTGKLTGKTFEILKNGIENLTRAPLKPQQRMFILRVHLIPKIIYHAGIGKMHKNTLLRIDKLIREVIRQWLKLPKDTPKAYFHTRAMEGGLQIWQLEKWIPLLKERQKQRLIKSNHPIISKLMTTSSNNTFKDVKLPEVGGKTCETLDDIYINTAQDLYRMLDGRGLRFSKEVPYNHSWKTDGNKLQSGTSFINSVKVHGNLLPTQARASRGRNETPMCDAGCNSRASLSHIAQACCRTHNSRIKRHDALVNFIEQQFHRLGYTTIKEPKIITSAGLRKPDLIVNSGLQTHVLDAQIINDYDDPETLHQKKKQYYDNEDITNWVKIKTNNPSVSFSTITFNWRGCMSNSSYNDLRALGLTKRDLVIATVRILEMTHACWRIYTQSTLKKRGRTQ

SEQ ID NO: 19414 - protein, 976 aa, Plutella xylostella
MSQLKFVQFMTRGVLELELVIYTNAIDFLSKLEINMTDSVCKAVCPHCPGLTKLYVVPRGLNVHISRLHKSLLAQSQQTPLNDSPSLIHLRILKENVRVLKHVPKGARSLAAGKLSHIIERCIQNNDTEDWYQLLTFSYSSLKIPSSEDRNRSLTSKVKENISNGETDTSPSPSATYRPRISDQRPFYKAVESKVHDGDLSGAVRILFSDGSLAPNNDDILSALRLKHPSPSRGLDFPPEPNQTNEHLMVDVPDVAQAIATFHNGSAAGLDGLRPEHLKELTSGGAGDGGVRLLHSLTKLANFMLKGVVNREVCPYLYGASLCALLKKDGGIHPIAIGSVLRRLVAKLCCRSVRDDMSALLQPKQLGFGVPMGCEAAIHATRCFAMTNRNPDNIIVKVDLCNAFNMVERDTILTKVRDRAPSLYPFLHQCYWKPSNLFFGDNLSESQVGAQQGDPLGPLIFSLAIQDVVASLSSPLNVWYLDDGTIGGSPEMVTEDLKKLIDGLREMGLQVNSNKCELFFCSEQPSQAVLDELCIMLPGIRVLSKSNFRLLGAPIFPEGIPEMLLEKVKSLLTAKQHLKNLSAHVSLTILRSCLSIPKLTYTLRTAPVWLYKDDSLVYDNALREILQEILNIEMSWPQWCQAALPIRLGGLGIRRLQDTELPAFLASSHGASELVTNILNIDGDGFRIPFVDEALDSWRARYPGSDLPEKPMFQRSWDDVASRASLDRLMDESNGAELARLRAVSKPEAGIWLHAMPSPQLGTLLDNDSLRVAVGLRLGCKICEAHICRCGAQVDAQGRHGLHCVRSAGRLSRHHAINDIIRRALVSANIPSILEPPGLSRNDGERPDGLTLIPWEKGRCLLWDATCVCTFAPSHVASTIATPGAAAELAAKQKIAKYSGLMENYIFVPVALETTGIWGHDGKTFIKSLGRRMRDCGLDIRSGAFLMQRISLAVQRGNAASALGTFASDAFRSEDT

SEQ ID NO: 19415 - protein, 941 aa, Plutella xylostella
MTDSVCKAVCPHCPGSTKLYVVPRGLNVHISRLHKSLLARSQQTSQNDSPSLSDLPILKENIRVLKHVPKGARSLAAGKLSHIIERCIQSNDTEDWYQLLTFSYSSLRIPSSEDRNRSLTSKVKENISNGEVDTSPSHSATYRPRNGDKRPFYKAVESKVHDGDLSGAVRILFSDGSLAPNNDETLAALQLKHPSPSRGLDFPPEPNQTNEPLVVDVPDVAQVIATFHNGSAAGLDGLRPEHLKELTSASAGDGGVRLLRSLTNLANFMLKGMVNREVCPYLYGASLCALLKKDGGIRPIAIGSVLRRLVAKLCCRSVRDDMSALLQPKQLGFGVPLGCEAAIHATRCFAMTNRNPDNIIVKVDLCNAFNTVERDTILTKVRDRAPSLYPFLHQCYWKPSNLFFGDNLLESQVGAQQGDPLGPLIFSLAIQDVVASLSSPLNVWYLDDGTIGGSPEMVAEDLKKLMDGFREMGLQVNSNKCELFFCSEQSSEAVLDELSAMLPGIRVLSKSNFRLLGAPIFPEGIPEMLVEKVKSLLTAKQHLKNLSAHVSLTILRSCLSIPKLTYALRTAPVWLYKDDSLVYDNALKDMLQEIINIEMSWSQWCQAALPIRFGGIGIRRLRDTELPAFLASSHGVSELVTNILNIDGDGFRIPFVDEALDLWRARYPGSDLPEKPIFQRSWDDVACRVGLDRLMDESNGVELARLRAVSKPEAGIWLHALPSPQLGTLMDNDSLRVAVGLRLGCKICEAHVCRCGAQVDAQGRHGLHCVRSAGRLSRHHAINDIIRRALVSTNIPSMLEPPGLSRNDGKRPDGLTLIPWEKGRCLLWDATCVCTFAPSHVASTIATPGAAAELAAKQKIAKYSGLMDSYIFVPLALETTGVWGHDGMIFIKSLGRRMRDCGLDIRSGAFLMQRISLAVQRGNAASALGTFASEAFRSEDT

SEQ ID NO: 19416 - protein, 931 aa, Plutella xylostella
MLLENKNIVYAYTYLYCSPSYLFKPRLDLDSQQTPLNDSPSLIHLRILKENVRVLKHVPKGARSLAAGKLSHIIERCIQNNDTEDWYQLLTFSYSSLKIPSSEDRNRSLTSKVKENISNGETDTSPSPSATYRPRISDQRPFYKAVESKVHDGDLSGAVRILFSDGSLAPNNDDILSALRLKHPSPSRGLDFPPEPNQTNEHLMVDVPDVAQAIATFHNGSAAGLDGLRPEHLKELTSSGAGDGGVRLLRSLTKLANFMLKGVVNREVCPYLYGASLCALLKKDGGIRPIAIGSVLRRLVAKLCCRSVRDDMSALLQPKQLGFGVPMGCEAAIHATTCFAMTNRNPDNIIVKVDLCNAFNMVERDTILTKVRDRAPSLYPFLHQCYWKPSNLFFGDNLLESQVGAQQGDPLGPLIFSLAIQDVIASLSSPLNVWYLDDGTIGGSPEMVTEDLKKLIDGLREMGLQVNSNKCELFFCSEQPSQAVLDELCIMLPGIRVLSKSNFRLLGAPIFPEGIPEMLSEKVKSLLTAKQHLKNLSAHVSLTILRSCLSIPKLTYTLRTAPVWLYKDDSLLYDNALREILQEILNIEMSWPQWCQAALPIRLGGLGIRRLQDTELPAFLASSHGASELVTNILNIDGDGFRIPFVDEALDSWRARYPGSDLPEKPMFQRSWDDVASRASLDRLMDESNGAELARLRAVSKPEAGIWLHAMPSPQLGTLLDNDSLRVAVGLRLGCKICEAHICRCGAQVDAQGRHGLHCVRSAGRLSRHHAINDIIRRALVSANIPSILEPPGLSRNDGKRPDGLTLIPWEKGRCLLWDATCVCTFAPSHVASTIATPGAAAELAAKQKIAKYSGLMENYIFVPVALETTGIWGHDGKTFIKSLGRRMRDCGLDIRSGAFLMQRISLAVQRGNAASALGTFASDAFRSEDT

SEQ ID NO: 19417 - protein, 941 aa, Plutella xylostella
MTDSVCKAVCPHCPGSTKLYVVPRGLNVHISRLHKSLLTQSQQTPLNDSPSLIHLRILKENIRVLKHVPKGARSLAAGKLSHIIERCIQNNDTEDWYQLLTFSYSSLKIPSSEDRNRSLTSKVKENISNGETDTSPSPSATYRPRISDQRPFYKAVESKVHDGDLSGAVRILFSDGSLAPNNDDILSALRLKHPSPSRGLDFPPEPNQTNEHLMVDVPDVAQAIATFHNGSAAGLDGLRPEHLKELTSGGAGDGGVRLLRSLTKLANFMLKGVVNREVCPYLYGASLCALLKKDGGIRPIAIGSVLRRLVAKLCCRSVRDDMSALLQPKQLGFGVPMGCEAAIHATRCFAMTNRNPDNIIVKVDLCNAFNMVERDTILTKVRDRAPSLYPFLHQCYWKPSNLFFGDNLLESQVGAQQGDPLGPLIFSLAIQDVVASLSSPLNVWYLDDGTIGGSPEMVTEDLKKLIDGLREMGLQVNSNKCELFFCSEQPSQAVLDELCIMLPGIRVLSKSNFRLLGAPIFPEGIPEMLSEKVKSLLTAKQHLKNLSAHVSLTILRSCLSIPKLTYTLRTAPVWLYKDDSLLYDKALREILQEILNIEMSWPQWCQAALPIRLGGLGIRRLQDTELPAFLASSHGASELVTNILNIDGDGFRIPFVDEALDSWRARYPGSDLPEKPMFQRSWDDVASRASLDRLMDESNGAELARLRAVSKPEAGIWLHAMPSPQLGTLLDNDSLRVAVGLRLGCKICEAHICRCGAQVDAQGRHGLHCVRSAGRLSRHHAINDIIRRALVSANIPSILEPPGLSRNDGKRPDGLTLIPWEKGRCLLWDATCVCTFAPSHVASTIATPGAAAELAAKQKIAKYSGLMENYIFVPVALETTGIWGHDGKTFIKSLGRRMRDCGLDIRSGAFLMQRISLAVQRGNAASALGTFASDAFRSEDT

SEQ ID NO: 19418 - protein, 901 aa, Dimorphilus gyrociliatus
MTSFFIESVAPPPPSYQWSPDREFLPAAAPPPDPEDVQLANEIPPALTPDTFNFESRAIDGIELTDPNHPLLRPPSRAEIVGQLKRTNNSAPGLDGITYKDLKKFDPKGLTLRAFYRLFWRHGQIPSCLKRSRTIMIPKKDLDPSLPANCRPIALLSTIYKLFSSLLARRLSRWARDNDILSKEQRGFTTAPGVFEHNFALTSALDEAKRSDKRICLGFVDIAQAFPSIPHCVIFDMLSLVGVPPSLVNLIRNVYTNATTEVITTEGCTAPISIHKGVRQGDGLSPFLFNLCFEGALRSVNASKDRDGFKIAAQAAVLGLRSVSICGLAYADDLVVVANSRRGLQHLLNVAERSAGLANLKFAPRKCATLCLHRGVADPTPLFVANEPIKALGLEETYTYLGTPIGFRKELLKDDGVIERIRSLLRLTMESNLAPWQKVSSIKAFILPRIQFALRTHRFLKEELADLDSMVIRAIRTTMATTNNAARSFFAAPAKMGGVGLIPTRVEVDIARVGHTFQLLKSEDPTIRFIACATLVKAAKARVARGTALTGDVLASYLNGSTTPPFSSSSSSAQTVMSVTRSASRRLHKSINLEWHLDDALTPTITATVSRSWHQNQPQFRHEVQSNWQELSFGDDERNLEPLAIRIRRTHEPFPLLRSAVTELNVREFAKLAEQGRSFQDTCLHPVSNHFLYTGFGLRYKDYRFIFRARLGLLQTNAVKSRYSARVRPDCRRCHFQVESVRHVLNNCRTGYGLYGDRHNAIQDRLVKGARLAPGSTITVNRTLPESSTALRPDIVIRCADDRVVLIDVTVPFERPGALARAAQEKINKYAVLKTELEGQGKAVEILPFAVGSLGAWCRGNSKVFRALGIAFAYRGMLSQLCVAEAIRGSKDAYDAHINGH

SEQ ID NO: 19419 - protein, 901 aa, Dimorphilus gyrociliatus
MTSFFIESVAPPPPSYQWSPDREFLPAAAPPPDPEDVQLANEIPPAFTPDTFNLESRTIDGIELTDPNHPLLRPPSRAEIVGQLKRTNNSAPGLDGITYKDLKKFDPKGLTLRAFYRLFWRHGQIPSCLKRSRTIMIPKKDLDPSLPANCRPIALLSTIYKLFSSLLARRLSRWARDNDILSKEQRGFTTAPGVFEHNFALTSALDEAKRSDKRICLGFVDIAQAFPSIPHCVIFDMLSHVGVPPSLVNLIRNVYTNATTEVITTEGCTAPISIHKGVRQGDGLSPFLFNLCFEGALRSVNASKDRDGFKIAAQAAVLGLRSVSICGLAYADDLVVVANSRRGLQHLLNVAERSAGLANLKFAPRKCATLCLHRGVADPTPLFVANEPIKALGLEETYTYLGTPIGFRKELLKDDGVIERIRSLLRLTMESNLAPWQKVSSIKAFILPRIQFALRTHRFLKEELADLDSVVIRAIRTAIATTNNAARSFFAAPAKMGGVGLIPTRVEVDIARVGHTFQLLKSEDPTIRFIACATLVKAAKARVARGTALTGVVLASYLNGSTTPPFSSSSSSAQTVMSVTRSASRRLHKSINLEWHLDDALTPTITATVSRSWHQNQPQFRHEVQSNWQELSFGDDERNLEPLAIRIRRTHEPFPLLRSAVTELSVREFVKLAEQGRSFQDTCLHPVSNHFLYTGFGLRYKDYRFIFRARLGLLRINAVKSRYSARVRPDCRRCHFQVESVRHVLNNCRTGYGLYGDRHNAIQDRLVKGARLAPGSTITVNRALPESSTALRPDIVIRSADDRVVLIDVTVPFERPGALARAAQEKVNKYAVLKTELEGQGKAVEILPFAVGSLGAWCKGNSRVFRALGIAFAYRGMLSQLCVAEAIRGSKDAYDAHINGH

SEQ ID NO: 19420 - protein, 869 aa, Dimorphilus gyrociliatus
MTSFFIESVAPPPPSYQWSPDREFLPAAAPPPDPEDVQLANEIPPALTPDTFNFESRAIDGIELTDPNHPLLRPPSRAEIVGQLKRTNNSAPGLDGITYKDLKKFDPKGLTLRAFYRLFWRHGQIPSCLKRSRTIMIPKKDLDPSLPANCRPIALLSTIYKLFSSLLARRLSRWARDNDILSKEQRGFTTAPGVFEHNFALTSALDEAKRSDKRICLGFVDIAQAFPSIPHCVIFDMLSLVGVPPSLVNLIRNVYTNATTEVITTEGCTAPISIHKGVRQGDGLSPFLFNLCFEGALRSVNASKDRDGFKIAAQAAVLGLRSVSICGLAYADDLVVVANSRRGLQHLLNVAERSAGLANLKFAPRKCATLCLHRGVADPTPLFVANEPIKALGLEETYTYLGTPIGFRKELLKDDGVIERIRSLLRLTMESNLAPWQKVSSIKAFILPRIQFALRTHRFLKEELADLDSMVIRAIRTTMATTNNAARSFFAAPAKMGGVGLIPTRVEVDIARVGHTFQLLKSEDPTIRFIACATLVKAAKARVARGTALTGDVLASYLNGSTTPPFSSSSSSAQTVMSVTRSASRRLHKSINLEWHLDDALTPTITATVSRSWHQNQPQFRHEVQSNWQELSFGDDERNLEPLAIRIRRTHEPFPLLRSAVTELNVREFAKLAEQGRSFQDTCLHPVSNHFLYTGFGLRYKDYRFIFRARLGLLQTNAVKSRYSARVRPDCRRCHFQVESVRHVLNNCRTGYGLYGDRHNAIQDRLVKGARLAPGSTITVNRTLPESSTALRPDIVIRCADDRVVLIDVTVPFERPGALARAAQEKINKYAVLKTELEGQGKAVEILPFAVGSLGAWCRGNSKVFRALA

SEQ ID NO: 19421 - protein, 1402 aa, Poecilobdella manillensis
MASETNRVSCVPPSSAPKKGRKIPEHIPSVSWCVAPGRMDPSLPPRGPPGSSGLGDEVGLQSGKVAPMRGADTNVVSPVSSETSPSRLIQWHGQPNPNRVCSEPPTGVTEIRDNCVVTSESAVEVRIGNASRGCPSDSGSSGSVPMACTTCNRVFNTLSGMRVHARASHPEEFHAAKVAGLSRVKPRWCEEEERLMAEKEAELIVFGSLGGLNENLHRLFPQRSLEAIKSHRKGERYKSLVLEYRRTLKVGGSPTGSATGADIAAMKSDDPRLWDMIAEKECGMSWSLHTNVNSHLARLLPELSLDLIKRARKEEGYTGAIGKIMERIRLQSIEEKEEPASDPPVKSPVRSEVKFLYENRECWKLIAEAEIACAGERHINVAITRRLPKVRHCVLVKIRKTTPYKELLEEIRQMSGLAGRNIGSPEDRKSSQEEGHCPGNENGLLREETELVTKVGNDTEIGPPPQGNGGGPKVTSEWPDLAESRSSPGTPAVGNEPGKGAVWAIVRRNSRHLCLNSKELRLLERGDEATVQGIINTEYQRWFADRFAAALASPPTKGKGVLRAAGRRINHPKKRLSKGARRKKCDYARTQALYQKGPGVCARDIFGESNSNAVELPADDVFQYWAEVFGQTSKADKRKVTPVGAVIEELAQCVTIEEARDSLKGMNDGAPGPDKVTKADLQKVELPDLATHMNLWLATGTPPDAFREGIVSLIAKTEEPKDPGDYRPITLGTVVMRVFHRVLAKRLARSWPLSERQKAFLAGDGLADNIWLLRSVIDYHKVRIKELNATFVDVSKAFDSVSHESIVLAAERMGTPRLLLRYLGNICRQNTVCLKWAGSTSSRLPVGRGVRRGDPLSPILFNGVMDWVLSALDPGMGVTAGTAKANHLAFADDIVLLTHTRPGMTKLFGQLGQSLGEVGLAMNVKKCASLTIVGDGKHKAWYNDPSSYLVVRGVEVRGMSVRECYKYLGAKVGLGEHNSYREKFHTEFNALNGARLKPEQKMHLLGKFFLPRFVHLLTFEQVSLKWLKRTDQRIRDSVRRWLKLPHDTVKPYFHAKCADGGLGVISLREWVPNLRRQRARNLLASAKSDRFLGEFLRESGLFVREAKRYGYTDLVEAASASNPVVDLRQKSARELYDETVDGKGLRSYAGAPNTSGWILDGRSHMPSHQYVSCNLVRAGVLYNKKRAARGRPQMNTDCAMMCQKTHHERHAETLSHIIQVCPKTKGPRIERHNAVVRGLAKKLEALHWVVSLEPRIPIEGGTFLKPDLVGWLPDGRTLVCDVTIVSDLARLEHEYDRKVIKYNVPLIHEWLWNHCPFPGCLRPAPLPRVMAYVSSWRGALCAETYRELRLLGFPRGLVECFQIRVPWDGYCIWSFYRGSTWRASRYGAREVLTQERQESGIT

SEQ ID NO: 19422 - protein, 1132 aa, Fritillaria borealis
MRVEHNHRFKPEVNNPEAFYNHQGIDNNGVVRMPFLIDYLEHCGCGQLFLKRGIQNHTNRCKCVAHHKRLVHNNCDCFGCSNSLKEHSICDERCGGSSLPIEMSKLLTAILFLSDKSQSDLHGIVPTIKTKIGMHSSISQANNISGTLFKRLREEFRHIPDYKMHVGNALKLALVTPTLVLRFKEKNESRASLYEAFHRFEFKQLYQKAMDFADSYNASHEAIDQDASKQRAAIRSACTGSLRKAFMRLGDEQIAEIDERAKLALKSKFPSLTDELQKLLDDALALGISDNVEKPELTLSDIQNAICKMDLNSAPGPSGMRPDHIAFVFRKNARLTSRHEIEYRDNIVYILNCLVQGDKDVCFWFRDGLLKGLLKPNGDVRPIQIAEVLVRLATKALSMKMIAKFRDVLHRNQHALMRAGVETASIQMDEFLRKHSNGYVISLDVRNAFNSALQTFILEEIMKLVPSLGHIFVNLLMGKYKAIAGPNFMIEVMKGVKQGDPLSMFLFCLVIDPILRWLNEKLAPYGMAIAYADDWYIMVTSRDHAANVNTIFAELTSKFAEIGLVLNIGKCFIFSDCNDAESHALKPDPNMKFFSLGFKMLGTLKFSSSEYLSDILDAKLNKFKLFLDRLYQIDDHPQICVLLLRSCIIPKILHIPRTLSPALLHDWALKIDYQINCFCAKLFGLPRGYLDGDAPEICPFAQWSLHFQILRLPIYFGGLGLPAMQNILHSAFVSGFMAGYQNLTELDISIPDEIIQSIWHIRSCIRQNFPYVSTDQENYEARRSTRIKSFNNLFPNGFDPGDENMTFDQFKLLFQNSDEIRVAFAGTKKLQNKLNSLIQSLQFETVLGNIKNQPDNPRTRTQAAEFLSQANPLSNKWSIAIPYCNELRINKTHYRYLVFRTLGLPIPGGNLAVSRHLRCDCRTKNPPHIDAFGTHAETCIKRRYPAHNAVQNQLARMLTSAGFKVVLQPVGLCLNPTTRPDLVVSGTSNKDILIDVTTVAATRQDLLLRSSSSPGLAAQRGIDTKIAKYSGNFDTDLYDFLPISIETSGRPSKQLSQLIKMAADNVRNMCSAEGSLPRIYASQFAFRWTLKIITVFKKSLASGATNHLDYLFRNSMKRRYNMPYSHDEIYYW

SEQ ID NO: 19423 - protein, 956 aa, Alatina alata
MKMVIDMFEPNVTQLNTILYATAKIISQKCIIKKSKRTQKRKKPEWREKIEKEIQHMRAELSILAELQRGVNVRGRSFRKLKRNYQLNKDNILEVKETIKQKIQLKAQRVQRYEKRSKFYRQNKIFKRDTKKFYREVGKQPIKVQETPEIDEIENFWKNIWSNEKGYNCKAEWIENTQYRNMNVPEQTWSDITMQEVKYSLSKAHKWKSPGIDKVNNFWLHSLDEAHGLIAEQLSRLLRIPELSPEWMSEGTTFLLPKTNETRNPKNYRPITCLSTTYKLLTSILSERIYKHLEENHLFPIEQKGCKRGSYGCKDQLLINKAILENCKSKHRNLSMAWIDYRKAFDSVPHGWILRSLELFKVSPVIINFLRVNMSLWRTTLFLSHQNGILKSNPVNINCGIFQGDSLSPLLFCLALFPLSLELNRTGYGYKLGNRSIDYLFFMDDLKLFAKDDDQLQGLLQSVKTFSEDIGMSFGLDKCAKATFKRGKMTKSSDVNLDLNDTIKDLDQEEVYKYLGVDEGNGIHHAGMKEKIRKEFYRRARAVLKTELNSANRIEAINTLAIPVVTYGFNIINWTISEIQKMDVKVRKLLTTYRMHHPKADVHRLYIPRSSGGRGLIQLELTYKTTTIGLLKYLSSSEDWMLKLVREHEETKKAYSIVKEGEKFSYELLSEGIEDNNLHCTKQAKLVKEKAKKKGLKLMEENWNSKPLHGQYPSRANKADVDTLNTHQWLRSAGLKAETEGFIMAAQDQSLFTRNFQAEILHNGTSSNCRFCDKSKETIDHLVSGCSVLAPTEYKTRHDRVGQYIHWKICQHYDLPFANKWYEHKPQQVLENDKVTLLWDFGIHTDRTIQANRPDIVIKDHQSKTCLMIDMTVPSDANVSAKEFEKLSKYKDLQIEVERMWHLKTTIVPVVVGALGLINKNTGKHIEKLPGNISLAEIQKIVLNGTAHLLRKALSI

SEQ ID NO: 19424 - protein, 901 aa, Morbakka virulenta
MRGELSVLSELHRGKNVKSRICRKLKRKYKLNRDNTSEVKETVKQKLQAKVKKMQRFEKRVKFYRQNNTFKTNRKTFYREVGKEGIKIIEAPEIEEVGQFWKNIWSKEQPHNEEAEWIKEIELSNADIPVQEWNNITTEEVKSILSKAQKWKSPGVDKVHNFWLNCLDSCHEIMAQQLSQFLSNPEKCPQWLSEGTTYLLPKTNETKKPKNYRPITCLSTTYKLLTSILTDRTYSFLEANNLFPEEQKGCKRGSYGCRDQLLIDKMVLENCRSKHRNLSVAWIDYRKAFDSVPHSWILKSLELCKVSPVIVNFIRSSMRMWKTALSLSHENGILKSHRININCGIFQGDSLSPLLFCIALFPLSKLLNATGYGYKVNGKVLDHLFYMDDLKLFAKNDSELEGLLQTVKTFSNDINMSFGLDKCAKATFKKGKLVQSSDIELDDHETIKELEPGEIYKYLGINESDGIQHNSMKEKVKKEFYRRVRCIFKTELNSNNKIEAINTLAIPVVTYSFNVINWSLSEIRKMDTKVRKFMTMYRMHHPKADVDRLYIPRKDGGRGMMQLELSYKTTTIGLCKYLESTSDWMLKLVLAHEQTKRAHSITNEGKKFMAELKVDQVVCEKSMPCTKQAKMVKQTAKNEGIRNINLNWKNKPLHGQYPKRIDDADVDKKLTHQWLRSAGLKAETEGFLLAAQDQSLPTKNFQAEILHNGANPNCRFCDSSRETIDHIVSGCPILTPIEYKLRHDRVGQYIHWKACQHFGLPYATNWYEHKPEPVTENEKSTILWDFGIHTDRTIQANRPDIIIKDHNKKTCLLIDMTVPTDKNVSIKEFEKLSKYKDLQLEVEKMWKMKTTIVPVAIGALGAINKNVEKHIAKLPGTNSLTEIQKIVLNGTAHILRKALSL

SEQ ID NO: 19425 - protein, 1110 aa, Alatina alata
MEYFNFQLIFCLALLTHQSLAVNCDFCGRDFSHLNKHLWRCKERLNHNGVVYKGGTVLNTLKQQGTASFEWIQETINTEDPLVNNNNANTSHPNMDYDPNEDKEHMFKCYCGRHFKSLRALNVHRRSCFITNQPNLRDLFVPEFYTDTNGVTDSHLSETNNNHDKVHLRQGVKLPKNKEEWDLANKFFLAHMDYTTEISNIDQTIDDFNNLVYNYFKDNYGTVGGSHSNDLVVKYNTFSKSKLKKSLSDLKTNSPCKIDEIRYVSHLLRHKMKKTKQAREYDHNKKIKKNFWSYCKGIFEKSDKTSPLFNESTCYNHFKNVFTERHKNRSFQLPSWMNLLPKPSKEFNLKPPSYKEIYKIINRMKSSGSPCAIDHISVLMLKRCPILRTQVWRICYKCWDTKYFPSAWKNSTTILIHKKDSPNDPNNFRPITLEPVLCKILTSLIRNRVYTYCLTNNFIESNIQNGFWDNISGTLEHSELLTYIIKHAKLKQRQLVVTLFDLKNAFGEVHHQLVKAVLKYHHIPEPIIDLITNLYTNNYISVITESYQTYPIRVERGLLQGDCLSPLIFNLCANTLIESIKSEQIKCLGYVYDICSPPRHWFQFADDTAIITALQEDNQLLCNSFSKWTSWADLKIRVDKCHTFGMKKAGSLSIQYEPMVLVRNQRVPPIQIGESFVYLGKEFSFSSNLDGVKNVIMGQVKTYIETIDRLPLTPLNKLAVIHRYVYSKLRWNFSIYDLSETWVSQNIDTLVSKFVRKWCQLPISVNVSHLSLSHQQLGLNFQYPKTVYRQCKLTVRRILSQSKNPEIRRLYHLTSQQNILPDSVINSTVSTYPTKSNKELSTKIRREFSKDENERCWLHFANLSEQGTIMKHITKVCSKKVIRAWQSLLQNLPNNLFCFTRKALVFGLPNGSNLKRWNISPNGLCQRCQEPDTQSHVLSHCKESLDRYKWRHDSVLYTLVHKFFRCNKDNMTIYVDLCLDQSFSCPSELFTNKRPDIVLKFDETVVVIELTVCFELNTEKSRDYKKRRYSSLRDELIISCKRFELVFIEFTTLGFISEAAEIQLRSLFKELNINADRCFYKCMEAALRSSYYIFCRRNKDWTNPDILKFY

SEQ ID NO: 19426 - protein, 1110 aa, Alatina alata
MEYFSFQVIFCLALLTHQSLAVNCDFCGRDFSHLNKHLWRCKERLNHNGVAYKGGTVVNTLKQQGTASFEWIQETINTEDPLVNNNNANTSHPNMDYDPNEDKEHMFKCYCGRHFKSLRGLNVHRRSCFITNQPNLRDLFVPEDYTDTNGVTDSHSPETNNYHDKVPLRQGVKLPKNKEEWDLANKFFLAHMDYTTEISNIEQTIDDFNSLVYNYFRDHYGTVGGSHSNDLVVKYNTFSISKLKKSLSDLKTNSPCKIDEIRYVSHLLRHKMKKTKQMREYDHNKKIKKNFWSYCKGIFEKSDKTSPMFNESTCYNHFKNVFTERHKNRSFQLPSWINLLPKPSKEFNLKPPSYKEIYKIINRMKSSGSPCAIDHISVLMLKRCPILRTQVWRICYKCWDTKYFPRAWKNSTTILIHKKDSPNDPNNFRPITLEPVLCKILTSLIRNRVYTYCLTNGFIESNIQKGFWDNISGTLEHSELLTYIIKHAKLKQRQLVVTLFDLKNAFGEVHHQLIKAVLKYHHVPEPIIDLITNLYTNNYISVITESYQTYPISVERGLLQGDCLSPLIFNLCANTLVESIKSEQIKCLGYVYDICSPPRHWFQFADDTAIITALQEDNQLLCNFFSKWTSWADLKIRVDKCHTFGMKKAGSLSMQYEPMVLVKNQRVPPIHIGESFVYLGKEFSFSGSLDRVKNVITGQVKTYIETIDRLPLTPLNKLAVIHRYVYSKLRWNFSIYDLSETWVSQNIGTIVSKFLRKWCQLPILVNVAHLSLSHQQLGLNFQYPKAVYRQCKLTVRRILSQSKNPEIRRLYHLTSQQNVLPDSVINTTVSTYPTKPNKELSLEIRRQFSKDENERCWLQFTNLSEQGAIVKHITKVCSKKIIRAWQSLIRNLPSNLFCFTRKALVFGLPNGSNLKRWKISPNGLCQRCQELDTQSHVLSHCKGSLDRYKWRHDSVLYTLVQKFSRCNKANMTIYADLCLDQSFPCPSDLFINKRPDIVLKFDETVIAVELTVCFELNTEKSRDYKKRRYSSLRDELIISCERFELVFIFFTTLGFMSEAAEIQLRSLFKELNTNPDRCFYKCMEAALRSSYYIFCRRNKDWTNPDVLKFY

SEQ ID NO: 19427 - protein, 1352 aa, Paraescarpia echinospica
MSDSLARRTPKKVQVGWSQPVHSANNRVPKNHNKALGLSADNPLPIGEESGTLSNTGDQVLAGRCPDCGKQFKGTRGLSIHARSAHSVSYHAKRTIVIGAKRAAQVRSRWDQEEIIGMAREEARLSRQGATNMNEKLKAFMPARTLEAIKARRRGQEYKAMVGSYCRVASVVRGTAVPPRAVAGRAGESVNNGAVRAIDGSEAELPPRRQTTRVVGADSLGLPSRDRAIDENTSDGCGRLGPPREKATLVAGGLVSGSPPELYECEVGLPPRSEATRVAGVCSPRLPLIRNLRKSGTQITTEGETMKPPRELATHVAGGSSLRSPLRQIESEVGPPPRRKATRVVEASSPRLPLGPTTRVSRTPITTKGEMVKPPGGSATRVAGGLTRRFPLGRTKSLLGPPPRSEATRVAEVDRGVGIEPPPGDNATRVAEAVPPTSPPREAPHRMAGTAANDPGQLLPIPVWDIFTPTHPGDAHIIGTEEFPEADDWRAPIIETILAQADEAKVCPDLLQQVIQLPHGDNECLQRLIDRDLLELLPPVERPGQGRKHGPPRQEARNARARRKAQYSRIQALYKTSRSGCARVVLDGHWKRVASSLPLSDQTAFWKPLMETASIHDRRSPPKDTNPRWDMVTPITTTEVIRHLRGMKDGAPGPDLRRKKDLTDLGVVALVCRFNIWMLAGIAPESFRHGETVLIPKTGISVEPKQFRPITMGPILCRLYHKILAERIEKGYAISERQKAFRKGDGLSDNTHILRSVISDRQTRCQATVVAFLDVSKAFDSVSHDSILLAAASAGIPSPLVGYIRSLYQSPSTRLRVDGELSQEISVNRGVRQGDPLSPVLFNAVIDLALRHLDPAIGVPVGVEVLSCLAFADDLVLLAKTPRGLQSQYSTVEKALGLSGLTLNAQKSATIRIDVLGKSKHWSCNPTDFLVSRGGEKIKALGISEGYRYLGNLVGAGRLAGTTLEILKQGVEELSRAPLKPEQRMYILRCHLVPSLLHQAVLGRLSKTTLDYMDKISRAAVRCWVKLPHDTPMGFFHAKCGDGGLGIPRLRWLIPLLRTKRMERLIGSSDPVVKAVTELKNFKKDLRRWSEPMSAFGIQMRSRRDIQRAMAECLYSSVDGHGLRGCNNTGYSNRWMTSGTGLVSGRSYVNCVKIKGNLIHTALRASRGRPEASTRCDACRGVGSLGHMLQVCPRTHNIRCDRHDNVSHFLKTVLEKKGFSTREEPSIPTPAGIRRPDLVVWRDKQCIIIDTTIVADNFNMDDAHQRKTEYYNKPAIRQWCHKETGIAATDVEFTACVLNWRGTPAARSVLDLGRLGVSKADWTLMSVKTLEGGARSIACFRSSTAFFGHRVH

SEQ ID NO: 19428 - protein, 1333 aa, Paraescarpia echinospica
MSDSLARRTPKKVQVGWSQPVHSATKRVSKEYMNTQGASADVPFPFGEESGAPSNTGNRLPDGRCPDCGRQFKGARGLAIHARSAHAESYHASRSIIIGVAKAAQVKSRWDSEELIAMAREEAILTRGGASNINSRLLAFMPARTLEAIKAKRRDKAYKARVESYCREAGHASRTMVPPRAGAGRAAGRAAVETNMDGDESETDLPPRRTTTRVVGTDLSGPPLRPGLRTASNNTGRGTLAPPRVKATRVAGGPEPSSLPVHSERGVGPPPRRKATRVVEVGPSGPPLDCADSNTSRTTIEGEIPGPSRDKAARVAEGPGPWSPLGYHEGECDQPFRDGWSRYDNKDPTGLPSGSDSRANNTVTNTKGKTPMSPRVRATRVAGGSAPGSPLRYREREVEPPPGDNATRVVGSVPPIPLIREAPTEPPLAAGPAPVDRGCERLLPVWGIFTPTHIDDAHDFGMVEDPETDDWRALIIETILAQAEGANICPDLLQQVTSVPLGDIDTLQRLIDQDLLELIPPVERPGQRRKHGPPRQEARNARAQRRAQYSRIQALYKTSRTGCARVVLDGQWKTVAPSLPLSDQTAFWKPLMEMASIEDRRSPPKDTSPRWDMVKPITTTEVIRHLKGLKDGAPGPDLRRKNDLTNLRVEALVCRFNIWLLAGIAPESFRHGVTVLIPKAEISVEPKQFRPITMGPILCRLYHKILAERIEAGYTISERQKAFRRGDGLSDNTHILRNVISNRQTRCQATAIAFLDVSKAFDSVSHDSILLAATSAGIPRPLVGYIRSLYQRPTTRLRVNGELSQEIYVNRGVRQGDPLSPILFNAVIDLALRHLDPSIGVPVGKEVLSCLAFADDLVLLAKTPRGLQSQYSKVEGALGLSGLTLNAQKSATIRVDVLGKSKHWSCNPTDFLVSHGGDLIKALSISEGYRYLGNLVGAGRLASTTLESVKKGVEELSRAPLKPEQRMFILRCHLLPSLLHRAVLGRLSRSTLDFIDKISRAAARSWVKLPHDTPMGFFHASHKDGGLGIPRFRWLIPILRTKRMERLIGSSDPVVRAVTELKNFQRDLRRWSEPINAFGIILRNNRDLQRASAECLYSSVDGHGLRGSRNVGFVSGWMTSGTGLVSGRSYVNCVKIKGNLIHTALRASRGRPEASTKCDACRGVESLGHILQVCPRTHHTRCDRHDGINSYLKTVLGKKGYTTRVEPSIPTPAGIRRPDLVVWKNGQCGVVDVTIIADNYSLEEAHERKTVYYDKPAIREWCARESGLAAADVAFTACVLNWRGTPAARSVLELGRYGITKRDWTLMSVKTLEGNARIIASFKSSTAYFGPRL

SEQ ID NO: 19429 - protein, 1352 aa, Paraescarpia echinospica
MSDSLARRTPKKVQVGWSQPVHSANNRVPKNHNKALGLSADNPLPIGEESGTLSNTGDQVLAGRCPDCGKQFKGTRGLSIHARSAHSVSYHAKRTIVIGAKRAAQVRSRWDQEEIIGMAREEARLSRQGATNMNEKLKAFMPARTLEAIKARRRGQEYKAMVGSYCRVASVVRGTAVPPRAVAGRAGESVNNGAVRAIDGSEAELPPRRQTTRVVGADSLGLPSRDRAIDENTSDGCGRLGPPREKVTLVAGGLVSGSPPELYECEVGLPPRSEATRVAGVCSPRLPLIRNLRKSGTQITTEGETMKPPRELATHVAGGSSLRSPLRQIESEVGPPPRRKATRVVEVSSPRLPLGPTTRVSRTPITTKGEMVKPPGGSVTRVAGGLTRRFPLGRTKSLLGPPPRSEATRVAEVDRGVGIEPPPGDNATRVAEAVPPTSPPREAPHRMAGTAANDPGQLLPIPVWDIFTPTHPGDAHIIGTEEFPEADDWRAPIIETILAQADEAKVCPDLLQQVIQLPHGDNECLQRLIDRDLLELLPPVERPGQGRKHGPPRQEARNARARRKAQYSRIQALYKTSRSGCARVVLDGHWKRVASSLPLSDQTAFWKPLMETASIHDRRSPPKDTNPRWDMVTPITTTEVIRHLRGMKDGAPGPDLRRKKDLTDLSVVALVCRFNIWMLAGIAPESFRHGETVLIPKTGISVEPKQFRPITMGPILCRLYHKILAERIEKGYAISERQKAFRKGDGLSDNTHILRSVISDRQTRCQATVVAFLDVSKAFDSVSHDSILLAAASAGIPSPLVGYIRSLYQSPSTRLRVNGELSQEISVNRGVRQGDPLSPVLFNAVIDLALRHLDPAIGVPVGVEVLSCLAFADDLVLLAKTPRGLQSQYSTVEKALGLSGLTLNAQKSATIRIDVLGKSKHWSCNPTDFLVSRGGEKIKALGISEGYRYLGNLVGAGRLAGTTLEILKQGVEELSRAPLKPEQRMYILRCHLVPSLLHQAVLGRLSKTTLDYMDKISRAAVRCWVKLPHDTPMGFFHAKCGDGGLGIPRLRWLIPLLRTKRMERLIGSSDPVVKAVTELKNFKKDLRRWSEPMSAFGIQMRSRRDIQRAMAECLYSSVDGHGLRGCNNTGYSNRWMTSGTGLVSGRSYVNCVKIKGNLIHTALRASRGRPEASTRCDACRGVGSLGHMLQVCPRTHNTRCDRHDNVSHFLKTVLEKKGFSTREEPSIPTPAGIRRPDLVVWRDKQCIIIDTTIVADNFNMDDAHQRKTEYYNKPAIRQWCHKETGIAATDVEFTACVLNWRGTPAARSVLDLGRLGVSKADWTLMSVKTLEGGARSIACFRSSTAFFGHRVH

SEQ ID NO: 19430 - protein, 955 aa, Adoxophyes honmai
MSSPSRVPCPYCPGSPKLYLAPRGLNVHIGRVHRDLVGSVSSADRGLGDAIPQITVTLSPSGVVRGVAGQGNLASLADLKARVRVLKHIPKGARSLAAERLCQVIEDCLRTNSIEDWYNLLSFSFASLRVPDRGLGQSLTSKVKSNICNSAISLCPEERGAWRPKSIYKTIEAKVHEGDLRGAVRLLVSDSSLAPSDEATLRLLREKHPPPSRALIFPQAPDRGSPVVSVVPAEVAEALGSFHSGSASGLDGLRPQHLKELTSVSAGDSGVRLLEVLTGLCNFLLRGSLNPEVCPYLYGASLCALSKNDGGVRPIAVGSTFRRLVAKLGCRAVRNMMAEYLQPRQVGFGTTQGCEAAIHATRSFAFAGEATGAVVVKVDIRNAFNSVERDIILKEVLDKVPSLYPFLHQCYHEASHLYFNGSLVSSQVGAQQGDPLGPLIFCLAMHKIIVDLSSPLNVWYLDDGTIGGRPDEVLADLEKLVPALKEIGLEVNSEKCELYSCGALSRESLQSFQSLIPGIKILSKTGLNLLGAPIFPEGVCSALETKRQALVLAKNHLGHLSAHVALTLLRHCFSMPRMVYLLRTAPIWLFEDEVRRVDDTIRGALEGVINVHLNESQWCQASLPVRYGGLGVRRVHDVGLIAFLASAHGVGDLVARILPDYGGRVPLTFVPEALAVWSSLSAGDRWPEDRAVQRQWDEIACERTWGDLLDRATGSNVARLRAGVCPEAGAWLQALPSPQLGTFLDNDSLRIAVALRLGCKVCERHLCVCGVMVEEDGHHGLSCQRCAGRFSRHHSINSLIQRAMVAANVPCVLEPPGLSRSDGKRPDGLTLVPWQRGRCLLWDATCVSTFAPSHLGGTSRCAGSAAENAARSKHLKYSALEPTYDFVPFAVEVAGPWGAEAKSLVGELGRRLRNRGCDPRSGSYLVQKIALAIQRGNAAGVMGTFGPGATRIGDF

SEQ ID NO: 19431 - protein, 955 aa, Adoxophyes honmai
MSSPSRVPCPYCPGSPKLYLAPRGLNVHIGRVHRDLVGSVSSADRGLGDAIPQITVTLSPSGVVRGVAGQGNLASLADLKARVRVLKHIPKGARSLAAERLCQVIEDCLRTNSIEDWYNLLSFSFASLRVPDRGLGQSLTSKVKSNICNSAISLCPEERGAWRPKSIYKTIEAKVHEGDLRGAVRLLVSDSSLAPSDEATLRLLREKHPPPSRALIFPQAPDRGSPVVSVVPAEVAEALGSFHSGSASGLDGLRPQHLKELTSVSAGDSGVRLLEVLTGLCNFLLRGSLNPEVCPYLYGASLCALSKNDGGVRPIAVGSTFRRLVAKLGCRAVRNMMAEYLQPRQVGFGTTQGCEAAIHATRSFAFAGEATGAVVVKVDIRNAFNSVERDIILKEVLDKVPSLYPFLHQCYHEASHLYFNGSLVSSQVGAQQGDPLGPLIFCLAMHKIIVDLSSPLNVWYLDDGTIGGRPDEVLADLEKLVPALKEIGLEVNSEKCELYSCGALSRESLQSFQSLIPGIKILSKTGLNLLGAPIFPEGVCSALETKRQALVLAKNHLGHLSAHVALTLLRHCFSMPRMVYLLRTAPIWLFEDEVRRVDDTIRGALEGVINVHLNDSQWCQASLPVRYGGLGVRRVHDVGLIAFLASAHGVGDLVARILPDYGGRVPLTFVPEALAVWSSLSAGDRWPEDRAVQRQWDEIACERTWGDLLDRATGSNVARLRAGVCPEAGAWLQALPSPQLGTFLDNDSLRIAVALRLGCKVCERHLCVCGVMVEEDGHHGLSCQRCAGRFSRHHSINSLIQRAMVAANVPCVLEPPGLSRSDGKRPDGLTLVPWQRGRCLLWDATCVSTFAPSHLGGTSRCAGSAAENAARSKHLKYSALEPTYDFVPFAVEVAGPWGAEAKSLVGELGRRLRNRGCDPRSGSYLVQKIALVIQRGNAAGVMGTFGPGATRIGDF

SEQ ID NO: 19432 - protein, 1238 aa, Perkinsus chesapeaki
MPARQPPRRACGRQGSDPPDLTLSHSQRMEADNDGGDIGAAYIEPTNVRHQWTTAEKRILCEALVHWEKFGGGGAKKDHLEKEFNMRCSTIQRTGTQLIAYIGQLTKRSEYETLREAATIIINRENELIINEDRNDNNEAGSNTDENDVIDDEEDDDYIDDNDVDEANNPDVDETINIISMEDNTFEQEIEHLMEESERIQVVRGRPKAPPDPRLIEDRALIEKFDYKLTEIKNIDVEDRGKIPDLRGRENDAKLLAKIIENKVIEACGEKPTIKTINDAIYAAATVIVEAIRGKINSGNTNRGKRRKLPAKRRLESKVKEIRRDLGRVTAYLERFENVPTRLKLVTREIRKKYGSTRSALMNAKGRLIIQLRSTAAKLHAWNNKEKRRELERLVKTDQRQLHRDLASDNDVEIQPDYSNVPSDGEIINFWKSIWDHKNTKEYSTETWYQDYISDLNRKRINTLTDINITGEVVKSAFMEMGSWKAAGPDKIKVFWYKILPGVYGKIAEVFSDVVTMKVKAPDWFYTGITHLIGKPISEGTKRRACDYRPISCLCCLYKALTKIIANKLMSHLEKYNILSMNQLGCRAGKRGCTHQLLLDHALMHHARNSLHRVSCAWLDFQKAFDSLAHSWILKWLTNFGIGPMLVNFIGHCMENWALQMSIDGRPLDNGVVKVNRGIFQGDTLSPCLFILSVQPISYALQRVDAGYRCGGRIQPTYKLEHLLFVDDLKLYAENPKKLSKLVKVACNVGEASGLEFGMPKCAWIDIVRGFPIENKPTDTPDELIDMKYLETGERYKYLGIPQHMLPDAQLAFNNTRKILLGRIAKVLSVKLSASNVIKTINSWCISVVYYPLQVGLIKRTQAKQLDTEIRNLFRQFHGHGYTTSTDILYLSRDKGGRGLVNIEDAWCKFSFAIGEYASKNLINLIPHLDNKNPLYKLVNTSDNIKESLNLITNNEHLSCDSNIHDILNKCLEQKRITHFYSMSVAADWFRKISKEQCNGLDVKATLGWMKNSAIPLQVEADVISLRTLSIPTRAFPIEQSDPLCRLCGTAKETLFHIVSNCPVLAHAEYFDRHNRICKLVYKTCCDLISVPFENHWWVCRPPCISVTQGDLFWDQPINTPHKLEFYRPDILAVLHSRKLVLIIEISVCADYSVVKKEGEKRNKYQALVQELALMYRGYNIKLIPVVIGVTGAVTCSLPRILEDGLLGCLNIQTCQRVASTSTIHLLRRVLGGPKVAI

SEQ ID NO: 19433 - protein, 1199 aa, Rhopilema esculentum
MRLPFAATTSRSPLGKVYYLLALPETVKCRVDVRRGLVCLMGGGDSLALVGNPPSDGVTKKIPVGNLLQRTTSFMSEMNQNSDLDNSVKETGTDGEGLSLGRCPMEEQRGPGRHPTTARTGWSKSMNVAVMECYFLSKPVNDDGKPVRGYRRRMHNIWRERHSFNLTEQRLCDQARMIRKNGWLTHVELEEIKRRVTTEEEGVIDDSSVGEETVINEIPVTEPEIEPVVTFLERSERSEANTKMIEEIIEIMKEGNISQSRSLKKADRKSVNEAVKEVNDALISIRTENITDTNKLISAVALYVARKLGIGKPKIENKTREPWWKRRISESINELRKHINILEREKRGEVSKKGKYHELSKKYNITRKGISTVIEELKQRMQAKAFKLRRYEQRTRQYQINRMFQYDQKKVYQQLQGKDKKENTTPDADESRKFWSNIWDNETQHNKKAKWLEELKNNKPNLSQNDIEITTRMVNQQAKKIPNWKAPGPDGVQGFWIKKLTSLHERIAAQLNDLINDEIEIPSWMTTGRTVLCQKDPKNGNAVDNYRPISCLPLMWKLLTGIISGNVYTFLDENEMLPEEQKGCKRNSRGTKDQLLVDKTILADCKRRHKNLAMAWVDYKKAYDMVPHSWIIECLRLYRVSDNVVNFIERSMTNWKVQLTSCGETLGLVNIRRGIFQGDSLSPLLFVICMIPLTEVLRKVKMGYTLDGVKINHLLFMDDLKLFAKNENEIDSLTSTVNLISQDIGMEFGIKKCGVVTLRRGKLTGSAGIELVNGEKIKEVGEEGYKYLGITELDRIKEEEMKKIFQREYFRRVRLIMQSKLNGRNKIKATNTWAISLMRYGAGIIKWRKDELESMDRRTRKLMTMSKELHPRSDVARIYVSRKKGGRGLISCEYCIENETNNLAWYVKHARGNIMSKVRDLGAMNTEEAVAPNEHKNETIRRLEKRWKDKPMHGQFTKNTDGIDWEKSWSWLRNGDLKGCTEALVCSAQEQALRTNYTKHYIDKTSDTPLCRMCGDKGETVSHLVSECAKLAQTEYKRRHDNVARYIHWLLAEKCGFERATKWYEQKPEGVLENHKFKLLWDFMIQCDRVVEARRPDIVVVDKEKKDVKIIDIAIPGDNRVKGKEQEKIEKYQPLKEQIGNLWNMKKVTVIPVVIGALGCISYCFEEHMEKIGIDVKLQVIQKTALLGTARILRQTLSM

SEQ ID NO: 19434 - protein, 1023 aa, Rhopilema esculentum
MIRKNGWLTHVELEEIKRRVTTEEEGVIDDSSVGEETVINEIPVTEPEIEPVVTFLERSERSEANTKMIEEIIEIMKEGNISQSRSLKKADRKSVNEAVKEVNDALISIRTENITDTNKLISAVALYVARKLGIGKPKIENKTREPWWKRRISESINELRKHINILEREKRGEVSKKRKYHELSKKYNIMRKGICTVIEELKQRMQAKAFKLRRYEQRTRQYQINRMFQYDQKKVYQQLQGKDKRENTIPDADESRKFWSNIWDNETQHNKKAKWLEELKNNKPNLSQNDIEITTRMVNQQAKKIPNWKAPGPDGVQGFWIKKLTSLHERIAAQLNDLINDEIEIPSWMTTGRTVLCQKDPKNGNAVDNYRPISCLPLMWKLLTGIISGNVYTFLDENEMLPEEQKGCKRNSRGTKDQLLVDKTILSDCKRRHKNLAMAWVDYKKAYDMVPHSWIIECLRLYRVSDNVVNFIERSMTNWKVQLTSCGETLGLVNIRRGIFQGDSLSPLLFVICMIPLTEVLRKVKMGYTLDGVKINHLLFMDDLKLFAKNENEIDSLTSTVNLISQDIGMEFGIKKCGVVTLRRGKLTGSAGIELVNGEKIKEVGEEGYKYLGITELDRIKEEEMKKIFQREYFRRVRLVMQSKLNGRNKIKATNTWAISLMRYGAGIIKWRKDELESMDRRTRKLMTMSKELHPRSDVARIYVSRKKGGRGLISCEYCIENETNNLAWYVKHARGNIMSKVRDLGAMNTEEAVAPNEHKNETKRRLEKRWKDKPMYGQFTKNTDGIDWEKSWSWLRNGDLKGCTEALVCSAQEQALRTNYTKHYIDKTSDTPLCRMCGDKGETVSHLVSECAKLAQTEYKRRHDNVARYIHWLLAEKCGFERATKWYEQKPEGVLENHKFKLLWDFMIQCDRVVEARRPDIVVVDKEKKDVKIIDIAIPGDNRVKGKEQEKIEKYQPLKEQIGNLWNMKKVTVIPVVIGALGCISYCFEEHMGKIGIDVKLQVIQKTALLGTARILRQTLSM

SEQ ID NO: 19435 - protein, 1104 aa, Hycleus phaleratus
MERVATAEAELGNRMEYARLIPITGMTREQLRRLRAKPAYKEILSQVRSNNDPRRESQLQPISNTIITSRASSSSDQETPDVSIPCGNAPRQRGEQRYRRSSNYYREISRSTPSAAQTYNSSMISVERRSLERRVSGNFVNNQIIPSIASPEAGPSTDPPPEGMLNPRRFSSCCFESGQTLPITTKVYKPTRTSLERRSLNSRMSSNFVYTTTAPSVATPEAGPSSRRPASPDSAMRSFIARASERLIRTDPSLGHLCVLALTGDDDSLLVEIDRWILKKFQPSSGSYRNRYNRAANRTSAYGPGKSGSGKRAQIYKKAQDLYLKNKKMLADIIISGRDFDSPSTQPTLTEVEDLYAGIYESIPDDYNAEEPTMTPTTIMNQPITEDDVSAAKNGWRCSAPGHDRVSVRSVLLCSNFALSVLYSIIIFRNVHPTSWRTLRTTLIPKSGDLTSPNNWRPISVGSGLQRLLHRIIANRMSNFIDLHRSQRGFISLDGTLANTMILDHFVRASTQRQTSFNVVSLDLRKAFDTVSHASIKRAIARRGLGGPLISYVLETLNNTSTVIKLGNLETRPIRLLRGVRQGDPLSPMLFNIVIDDLLKILNELKLGGRIEGEVECSSMAFADDIILMTNTKRDMEILISNTVSFFKTCGMSISTEKCHAISASVISRKIIVSNQPTFYIDSRPIPMVQQINCFKYLGHQFNCKGILRPSLPNLNVWLRRLCTSPLKPHQKLVLLKQLIIPKLLYGLENPQVTSKTLREADRLIRMAVKSFLHLNIHTPNACIHAKIRHGGLGVMELSTVVPTILLNRVERLFQASEDDILYSVLNSDRISNLVVNLGRMIGPVPADIKWKEAIATGPLSRGLEAVEQDVVSRAWLDNKPFGWTGKDYVKAVQLRTANLATMAIPSNPPERRRCRGGCREDETLAHVLQVCPLTHGLRIKRHDEIVKKVILSSRKRGIPIEEEPHVRHSDGTLFKPDIAAHIDDGLVVVADVQVAWASDSKLEDVYERKRKIYDNRKFRQAAEKKWPNKQLRFTPIILEARGIWPKVNCHAERYLKIDRSTKLSCINSVLKWGPSIHRIFTRSVWRTGPGPPQGFFQSQRYIR

SEQ ID NO: 19436 - protein, 1398 aa, Caligus rogercresseyi
MLNGFMTNTPKTPDRTELSPAAEAANTAASLIDAASTLIRTSVLNSPRGTRSPDAPTIRRLSIASEALKEAKDALTTPNKRIEVPRLSPTSPTLLDFGTPMEDLQEEQEPTQVSEKTWVQETPAHQMAQPAGEQRSILGFLTRQAMPNIDATCQKELQIIVNPSERSAAVAVLGRDEGIVQKKKRKRPKNSMTVLSDSGSSGGTRRPQPVRRRLLDSSSSEATETPQHTTTATTEQNETPKQMPEELELSSRETQGNGKERETPTANMPKVTPHQPKPDSPKKPSGKALEVGKTGQPPAATTLQELPQLREPEDPMETSEVNTGNDHGKEIRSTKQKNAHKAPATEVPRESGMETGVNGEDNTTTQRVVNNTQQDPSRQDSSLAAMLRGRMDSIRAQKPQNVKERQGETRSYAQALEAPSPPKIDVLQQRKKVAECTGDVKLEDMMGWLAAYIPTKIVKKVINEGEDTQGSRKTVPEEAHRKVLESYSLKHAKALLRDGGNIGENNKIKLLGTLLEGTENGKGTTAGVFYALINHTIFAKDKNTPLSNELKDVAKTLLGKCYSYKLGEEAITKISDKMKDRVCFNDIVNLLIEDSVHGFKHRQSEQNKPYKASNKRIQRALGSDFSNTIGMILDGKANQIGMNKRVPDQIIKDWVQKFEMASVEDARIPKMVNKVDHAMEAPISVEEIGVAMKDMGTDRDPLGMTGAEILAIPMSEMAKYFNKILIEGKIPLELLNARTTLLPKKEDPQLTGDYRPITVLPHLTRVLHRVLANRIKTARISNRQKGFREVNGCSENNMILRNLIGTATGGQRYFPLAFAFIDLAKAFDSVSHTSLLRAARRVGVPPLIINYLEYLYNNARTRIGDQEATFKSGILQGDPLSGYLFNFVLDWVLDVAYNTTPVAKRNPVRVGATHVEALLFADDAVLVSRNVEGLQKLVDAFLTQCEKAGLKANPQKCAFTAIQTVGKAHFIDACEELSVMGEKLTPMNVSDTYKYLGVVFNPKGMVSTPILETIQEGLGRLNGIGLTVYQKYIALREHLIPRLIYSLTYGKVSQSQIRQADQVVRLAVKDWMKLARDTPREFYYAPTPSGGLALMELEVRRKLIQNKRISALRESRDPIVQAIIAQDPLYVRPQKATVGGLLCKDKDTADTLYAKALWAKTDTCGLASTAQGHRNFMFMRERGQKLTDATFCAAVQMMAGAPLTKAKRARFTQLPNGNKCESCADRVKNLQHILQVCPRVRGARIKRHDQVQALLEKSLKAKQRTYHRDNVIPMGGTVRKPDLVIIDKDKISVVDPTIVSDTLSLQESENSKAATYNTTEFKKALLRYFECEESHTIEQIEVVPIVINWRGIMSERTYRALVGTVGMTPQYVKYVQLKVLTASHMIYREERDRPDRDV

SEQ ID NO: 19437 - protein, 1585 aa, Caligus rogercresseyi
MEGNQYLFNDTTCPVCGLKRLSVSAIKTHAENAHPIEWNNAKQFNYGSEFLVTKNQTINIAKAELELKKQLGHKTDFRKNINSYLQRKFPTIPVKSFLNVRKRASYIKIIKDLTEDHPDGDVEEEERLTEDFPILEIAEVEVSLIVNNSTISVAAITEVLLDHFPVLNNDSLECVRLSPDYKDLVEDMLNGFMTNTPKTPDRTELSPAAEAANTAASLIDAASTLIRTSVLNSPRGTRSPDAPTIRRLSIASEALKEAKDALTTPNKRIEVPRLSPTSPTLLDFGTPMEDLQEEQEPTQVSEKTWVQETPAHQMAQPAGEQRSILGFLTRQAMPNIDATCQKELQIIVNPSERSAAVAVLGRNEGIVQKKKRKRPKNSMTVLSDSGSSGGTRSPQPVRRRLLDSSSSEATETPQHTTTATTEQNETPKQMPEELELSSRETQGNGKERETPTANMPKVTPHQPKPDSPKKPSGKALEVGKTGQPPAATTLQELPQLREPEDPMETSEVNTGNDHGKEIRSTKQKNAHKAPATEVPRESGMETGVNGEDNTTTQRVVNNTQQDPSRQDSSLAAMLRGRMDSIRAQKPQNVKERQGETRSYAQALEAPSPPKIDVLQQRKKVAECTGDVKLEDMMGWLAAYIPTKIVKKVINEGEDTQGSRKTVPEEAHRKVLESYSLKHAKALLRDGGNIGENNKIKLLGTLLEGTENGKGTTAGVFYALINHTIFAKDKNTPLSNELKDVAKTLLGKCYSYKLGEEAITKISDKMKDRVCFNDIVNLLIEDSVHGFKHRQSEQNKPYKASNKRIQRALGSDFSNTIGMILDGKANQIGMNKRVPDQIIKDWVQKFEMASVEDARIPKMVNKVDHAMEAPISVEEIGVAMKDMGTDRDPLGMTGAEILAIPMSEMAKYFNKILIEGKIPLELLNARTTLLPKKEDPQLTGDYRPITVLPHLTRVLHRVLANRIKTARISNRQKGFREVNGCSENNMILRNLIGTATSGQRYFPLAFAFIDLAKAFDSVSHTSLLRAARRVGVPPLIINYLEYLYNNARTRIGDQEATFKSGILQGDPLSGYLFNFVLDWVLDVAYNTTPVAKRNPVRVGATHVEALLFADDAVLVSRNVEGLQKLVDAFLTQCEKAGLKANPQKCAFTAIQTVGKAHFIDACEELSVMGEKLTPMNVSDTYKYLGVVFNPKGMVSTPILETIQEGLGRLNGIGLTVYQKYIALREHLIPRLIYSLTYGKVSQSQIRQADQVVRLAVKDWMKLARDTPREFYYAPTPSGGLALMELEVRRKLIQNKRISALRESRDPIVQAIIAQDPLYVRPQKATVGGLLCKDKDTADTLYAKALWAKTDTCGLASTAQGHRNFMFMRERGQKLTDATFCAAVQMMAGAPLTKAKRARFTQLPNGNKCESCADRVKNLQHILQVCPRVRGARIKRHDQVQALLEKSLKAKQRTYHRDNVIPMGGTVRKPDLVIIDKDKISVVDPTIVSDTLSLQESENSKAATYNTTEFKKALLRYFECEESHTIEQIEVVPIVINWRGIMSERTYRALVGTVGMTPQYVKYVQLKVLTASHMIYREERDRPDRDV

SEQ ID NO: 19438 - protein, 1178 aa, Coptotermes formosanus
MIRLERSLYRHPQIAKQMMAHIPGKTAKQIRDKRKEPSYKSLVEAYNSSCGVSTSRSADPIITETSSSESESDAPQQVARLYIAGTDDEGDNTEREENSRQQSSPTTTSEERALGRGGPADTRHRSASEPPTGKGISPGRGPEAGCMLWGDGPPSPDRSVKGSGSRPDHADLTITISSGSESEIDTSQIERPNSPETGVGEQTDGVEGPPQPASLSPATDERARGRADMADYYQDHKGDEEPQVDGVEANNQDNTTKWRTEIIRQALAESRDSTALSHKYRDLHSRMISNLAAMSENGDLITQALIDDIYAEVIAHIKPKRSMRAKKRKRTRESKTQAGCKRKRNKYIYARTQELFRKNPSLLAKYMREGIPWLDEQDSRSPKVEEVKSFYTPLWGTQPEITIPFAVSESDQKALEVCEVFQTITAQDITERIKRMRKSTVPGPDGIERKHISSLDMREIMRIVFNIILVSKTQPKAWNTNRTILIPKEGKDLSRVQNYRPLTISSLICRTYWGIVDKKLREVISFSPRQKGFVHETGCFNNVHILNETIKAAKDHDGLVAVQLDIAKAFNTVPHKAIEAALCRLGLPQYVRETIMNSYTSLKTTIEYSGSQTEVALRRGVKQGDPLSPFIFNAIMDPLLEQLERMKGYEIDENHNISALAFVDDLILLATAKEDAQTLLQHTESFLCQLGMRIAAEKCATFHIKRTKDSWYVANPDLQLTTGDKMPSSSADSSLNYLGGNISPWYGLQYKDLTDQLKSTLERCRMAHLEPHQKLFLTNSNIIPHFLHKTVLATPSITTIRAMDQAVRNHTKGILHLPMSTPNGLLYCSKRDGGLGIPQLEVLASTTALKQGITLLNTLEPTIHALLHKTKLEQRLQSIAKAIRLQWPIQNYRAIDAYKRRQKKDELKSWGQLQSKGRGVASFSEDRVGNAWLYNPCLLKPSRFITALKMRSGTTSDKVTMNKVVPQTNVKCRKCRVCNETLAHILGQCVYTKAQRIKRHDEIRDFVSKRVANMSEKAQIIEEASIPTPTGSNLKPDLVVVSRGRVHVVDVTVRHEDVGYLEEGFKSKVEKYTPLLENLAIQLQVERGSVLPIVVGTRGAMPKSTEQSLREINITERGSLITISLIALRHSIELYHTFMDYNALDAYIQTTLVVEKLLQRLLPDLIFIYLRFYTYYIY

SEQ ID NO: 19439 - protein, 971 aa, Araneus ventricosus
MIRTRNSLQFRCSDCELCFGTAVGLNNHMRCHKKQNASTNNTPLEVPVPRRRTRRNRNRILDPLPETEENGHIEDPLRQLAPAEDSGFITGSSQEITEDEDIPLAEKYLRLFRVIQDGESTPEAFTLFKELVRQFCNDAKSSIEESSNTQRRVIVNNNDLPSVADDAQAIQMLFKRNRKRAIREILRNVAERCMISPTYIFDYFSTAWGPATSDPTYYTEAEDGRVEVLDRIFSVKEVATKLKKADNTSPGPDRITYHHWRQIDPSAKTLTTIFNLCLEFKKIPEDWKSATTILIPKDGDAADPRNWRPIALSNTLYKLFTKCLAARLSDWCSRYDVLSHCQKGFLPHDGVLEHNYALKNAELTAREKKKEICIAWVDVSNAFGTLPHSAIFDALHNAKVGQGFVELVRDIYCGSTTQVLTNGTRTDEIPILSGVKQGCPLSGILFNIAIDPTIRRLQGEATEHRVLAFADDVAIIAQSPDELQQQLNLISEDFERISLTLNPAKSVSFHLSGATPVGTRDTLFYINDQPLRVLKEFENHKFLGKPVGYNPIPDYNDINAIGKLGKAIAESLLAPWQKLDALKCFFYPTMQFAMRTGTFNKTVWAKLDTAMRKFITIILNLPEIASNKYLYGSRKLGCMGMPIAAEESDLNLIDSAFKLLTSRDEITAKNVLEDLCSVCRFRNQRNATDEDLAKFMSGERIGDFAPQANRHSYIWTLARAASRRLGVEWSFENKAPTIHYEDLSLQSNSRRRIMFTIRDSLRTARTQALINEYSHQGKVLDCVSMSPASSHFFFTGAYTRFAEWRFVHPARLGVVTLNGYKSWNPPEEQKCRRCNKCNRETLPHVICHCYFSSRAWTPRHNPVVTRIKKAVSPKAQILYENQRIPGFTCRPDLVIAYNNTIYIIDATVTFENGRNAYDLAWERKIETYSHIIDFFKTPSNNVQIVPFVVGALGTQETKHFYESSAQDLISN

SEQ ID NO: 19440 - protein, 926 aa, Eriosoma lanigerum
MGEVEESGGVAEDPGPITEVILRPDDTTPIHVHLEDIQSILNADVTEEGWLRFVAAMETITDAAASIVKLPVRTPRTTIVPEITDKVDDAKFIQNLYRRNRRQAVRLITTGKGKRCAIPVPEVEDHYRQVWAESQCETELYLTVEGRQEMNLSQFTCDEVSKRLKKFENTAPGNDGLTYRHWGRLDPACSLITAILNVCLRYRRIPPSWKCATTVLIHKKGDEDVINNWRPIALCRTIYKLYAGCIANRLTAWMIQNNVISECQKGFLPADGAFEHIHTLRRALEKARTGKKDKCVSWLDISNAFGEIPHIALEAAISSSGAGNFMVEIVKDIYTDSTSVICTNDGETAEIEIKSGIKQGCPLSGLLFILAMDPVVRKLQGEFINHNVLAFADDLCLLQDDPVSLQSAIDLATELLGKIRLKINAGKCASLHISERRPVGSRDTVFTINNVRMKLLGDGEAASFLGAQVGFNIVPSMSTLKDIIDIGLKITRSKLAPWQRLDAMQTFFFPSTLHLQRMGELFKSDWEQVDRIIRPELKATMYLPQEASNEYLYGSRKRGACGIRMLAEDSDLAAIDSAFKLLTSPDVRVREDARQHVGETVNRRIGRAADLEETGLYLSGEDDGVFREQRGTGVRNVWSRARMASKRTETKWTVREEDLEINCKDVCALPKQRRNIMRLLHNTLREERSTILTDKPDQGRAMECVAAHEASTHFIKDGAFTRFADWRFVHRARLNLVPLNGSSSWKVGDRRCRRCGYITESLAHVVNHCMRYTSLYMRRHNNLVARIKTAASNKFNILYENQVCGSGRLRPDLVISRNRKIFLIDVTVPFDNRLASFRSAAEEKLTKYGELKEELAIIHGDSAEVLPFIIGSLGSWFPQNDRLMKLICSSKYADLMRKLCVSDTIRLTRDIYIEHLTGITQQDMNT

SEQ ID NO: 19441 - protein, 1159 aa, Ancistrocerus nigricornis
MVRTRRNASDADDPDPGPSTAGFPAMDEGITDDDLAEQSNYETDYYISINVPLETNLTYCEICRTKNNLQCFLNLKDLINHYKEQHNKIEIKLKCIACSKTFPGLRNWNGHRPKCKGPQEETEKRFKCNECGLSFDTQIGISQHERHAHPRIRNLKRREEAERPRGIPGRSEYVWTPEETIELIRVNEIFKNSRCPNKEIQRFFPNKSLKQISDKRRLLGKNAPENYNEANSPQPEEHNEEDVWKNTMSNYIQSIEIPSESKLKTLEAPLKDIWLNNKMDSDKLFVLIDAFIEKTMIPELLDLGSTNQEENKNRNKNKVNINNKNKNNGNNNNNNRNRNKCNNNNKDKSTKRYTKKTIKNHNQRKKFGYARCQELFHKCPKKLAEYAIKNDFSFIEDRQEPPTSESIRKFYTTLWGQTEQETEHALTAIDYVPQFDISEVLQPITPEEVKNRLNNIKSKSAAGIDNIKKCHLHRVGTTELLAILYNIILLEGHFPEPWKKNRTTLIPKPDKDLNEIKNWRPITIGSLLSRTFSALIDSKIRKFITQSTRQKGFTNEDGCRINTILLKEAINEMKYGSGGVTTILDISKAFDTVPHSMITLGLKRKGVPTHIINLIKKMYQNCKTSIKAKKNEKVEIELKRGVKQGDPSSPLLFNLVIEPIIERINRETTGISINGKSISILAFADDVVLLAKDAEEAKTQIELIDSYLNNIGMALSIPKCATFQIVQKNKTWYTRNPEINIRNEQIQSIEPDQGLIYLGTKIYSWSNLIKWNEVPTIIKIIKNVKKLYLKPYQKLELIQQYILPHFIYSITVNFPHKGTLKLLDSEIRQQIKEILHLPSSTATGFFYTPKKNGGLGLTKFQNLVPLAVIKNNIKMQESEDPIVREVARNEKLNETADKYCQDLGIRTPKTLDEIKQTKILLKNRDTTSWEELQLQGQGVKYYRGDKIGNKWLSNPTLLKGSRFTDAIRLRTNTFGTRMVLSKTKPNIETKCRKCQIQKETLGHILGICTHTKQARIKRHNDIRDFITNKLAKNKTVFTEPTINDNGELKKPDIVVKDGTTVQIIDVTIRYEDKDYLKKAAEEKVNKYKTTAEVIKAKIGCTNSEVLPIVVGSRGILPNVTKTLLKKLGFSQSEMLTISMMTLRSTIEIANAFIDYDKTI

SEQ ID NO: 19442 - protein, 912 aa, Ancistrocerus nigricornis
MSKYIQSIEIPSESKLKTLEAPLKDIWLNNKMDSDKLFVLIDAFIEKTMIPELLDLGSTNQEENKNRNKNKVNINNKNKNNGNNNNNNRNRNKYNNNNKDKSTKRYTKKTIKNHNQRKKFGYARCQELFHKCPKKLAEYAIKNDFSFIEDRQEPPTSESIRKFYTTLWGQTEQETEHALTAIDYVPQFDISEVLQPITPEEVKNRLNNIKSKSAAGIDNIKKCHLHRVGTTELLAILYNIILLEGHFPEPWKKNRTTLIPKPDKDLNEIKNWRPITIGSLLSRTFSALIDSKIRKFITQSTRQKGFTNEDGCRINTILLKEAINEMKYGSGGVTTILDISKAFDTVPHSMITLGLKRKGVPTHIINLIKKMYQNCKTSIKAKKNEKVEIELKRGVKQGDPSSPLLFNLVIEPIIERINRETTGISINGKSISILAFADDVVLLAKDAEEAKTQIELIDSYLNNIGMALSIPKCATFQIVQKNKTWYTRNPEINIRNEQIQSIEPDQGLIYLGTKIYSWSNLIKWNEVPTIIKIIKNVKKLYLKPYQKLELIQQYILPHFIYSITVNFPHKGTLKLLDSEIRQQIKEILHLPSSTATGFFYTPKKNGGLGLTKFQNLVPLAVIKNNIKMQESEDPIVREVARNEKLNETADKYCQDLGIRTPKTLDEIKQTKILLKNRDTTSWEELQLQGQGVKDYRGDKIGNKWLSNPTLLKGSRFTDAIRLRTNTFGTRVVLSKTKPNIETKCRKCQIQKETLGHILGICTHTKQARIKRHNDIRDFITNKLAKNKTVFTEPTINDNGELKKPDIVVKDGTTVQIIDVTIRYEDKDYLKKAAEEKVNKYKTTAEVIKAKIGCTNSEVLPIVVGSRGILPNVTKTLLKKLGFSQSEMLTISMMTLRSSIEIANAFIDYDKTI

SEQ ID NO: 19443 - protein, 1183 aa, Formica selysi
MVKTRKSASDTDNPDSGLPVAGLPAADYGITDDNLACNMDNDNDKLITINIPLKTNVTHCDICRIKNILHGFLNLKDLIYHYKEQHNDVDILLKCNACSKTFPGLKNWNGHRPKCKGPQQITKRPFKCSECELSFDTQIGLSQHERHAHPKTRNYKRKEEAERPHGTPGRREYVWTQEETNMLRRLNEKYKDARFPNKEIQRYLPDKTLKQISDKRRCLHDRESRNIEASHDLLSETSTCSDITNVVESGTPEKTLEPSTSESNQALGSDETWRKTMSNFIESITISSDSKLASLEVPLKTLWIKHREEPSRLYSLIDEFIEKEIVPMLLHANSKNKNRKEKTGSKYKDNKYNNNNIKKDKNDNKYNDNNKRNNNSNNKRRIKNHNQRKKFGYARCQELFHKCPKKLAEYTIKSDFSFIHARQEPPPAEKVKELYDDLWGHIGQKEVDLSIPIDRIPQLDIGEVIQPIALQEIKDRITKVKNKSAAGTDGVKKGHLMRAGTVELLAILFNILLLEGYFPTPWKRNRTTLIPKPDKDISEIKNWRPITIGSLLSRTFSAVVDSKLRKFIIQSHRQKGFSNEDGCRFNTLLLREAINEMKSTCGGTVVVLDISKAFDTIPHSMIDLGLKTKGVPKYIINLIRKMYQDCRTSIKAANNENIEIELRRGVKQGDPLSPLLFNLAIEPIIKHIDKETTGVRIESEPVSILAFADDIVLIAKDNVEARNQVKIIYEYLVNIGMSLSVSKCAAFQIVQKNKTWYIKDPVIKIKNETITNIEPDEALVYLGAKIHPWSNLIKGNEVPSIVKIIKNVKKLCLKPYQKIELIQTYILPHFIYSLTTNAPSKGTLKLLDSEIRQHMKEILHLPISTATGFFYTPKKDGGLGIIKFQNLVPLAAIKNNIRMEQSMDPVMHGLVQREKLKHVINKYCEELRIVKPETIKDADKAKMLLKNREATSWEDLYLQGQGVKDYRGDKVGNRCLRDPTLLKGSRFIDAIRLRTNTFGTRIVLSKTKPNAEVMCRRCSMQAETLGHILGICIHTKPARIKRHNDIRDFLANKLSKSKTVYVEPTVNEDGELKKPDLVVKNNTDLLIVDVTIRYEDKNYLKVAAEEKINKYSTTAELIKTRTGCINSEVLPIVIGSRGILPKDTKTCLKKLGFNQQEMLTISMMTLRSSLEIANAFIDYDKIE

SEQ ID NO: 19444 - protein, 1198 aa, Tetramorium simillimum
MVRTRNNNASDTDNPDPGLPVAGLPAMEGIIDDNMASQTDNDVEKWITIDVPLMGTDVTHCEPCRIENRLRGFLSLKELVYHYKEQHNDINVVLKCRECLKTFPGLKNWNGHKPKCKGPQNALEKPFKCTECLLSFDTQTGRSQHERHMHPNLRNSKRKDEAERPHGAPGRREYVWTQKETNKLIKLNSRFKNARFPNKEIQQYLPGKTIKQISDKRRGLNREIPDDMEVQETLVEIELSTDDEEHVEVQQEIMMETEINNNEEDYIVPTMITQPKLESDEAWKKAMTEFIDSIKISSENELAELEAPLKAIWKENRDNPRELYSLMDNFIIDKIVPTLLRANIDSKKSNKNNKNNKNNKKDNKYNNQSKRNTNDNKYNDNNKKNKRDQRRNKQNRTKNHNQRKRFGYARCQELYHKCPKKLAEYVIKNDLSFMKERQELPTAENVQKLYMDLWGNKGQNEENLQIEIEQIPQFDINEVIRPIALQEIRDRISRVKSKSAAGLDGIKKDHLKRAGTVELLAVLYNILLLEGYFPVPWKTNRTTLIPKAEKDTNDIKNWRPITIGSLLSRTFSAILDNKLRKFVTQSSRQKGFSNEDGCRYNTLLLREAINEMKGNKGGVVTILDITKAFDTVPHSMINFGLESKGVPSHIRNLIRNMYQSCKTSIKAANNENVEIQLTRGVKQGDPLSPLLFNLAIEPVIKYIDNETRGVSINNESVSILAFADDIVLIAENTIEASKQIEIIDEYLTKIGMSLSVSKCATFQIVHKNKSWYIKDPIIKIKDEVITNIQPEETLVYLGMKIRPWSNLMKGSEVPSIIKIVKNVKKLYLKPHQKIEIMQTYILPHFIYSLTNNTPPKGTLKLLDSEIRQQLKEILHLPISTATGFFYTPKKNGGLGFVKFQNLVPLATMKNNIRMQQSADSVMRAMVHNDKINNTIEKYCKDLRVTKPQTLDEVERIKTLLKNRDTTNWEELHLQGQGVKDYRGDKIGNRWLKDPTLLKGSRFIDAIRLRTNTFGTRVVLSKIKPNAETICRRCSMQVETLGHILGICIHTKPARIRRHNDIRDFLVNKISKNRIVLVEPTINENGELKKPDIIIKEGTNLQIVDVTIRYEDKDYLNNAAQEKRNKYESTAELMKTRMECINSEVLPIVVGSRGIIPKDTKMCLKKLGFTQSEMLTISMMTLRSSLEIANAFIDYDRIE

SEQ ID NO: 19445 - protein, 1183 aa, unidentified
MVKTRKNASDTDNPDSGLPVAGLPAADYGITDDNLACNMDNDNDKLITINVPLKTNITHCNICRIKNILQGFLNLKDLIFHHKEQHSDVDILLKCDACSKTFPGLKNWNGHRPKCKGPQQIIERPLKCTECELSFDTQIGLSQHERHAHPKTRNCKRKAEAERPHGTPGRREYIWTQEETNMLRRLNERYKDARFPNKELQRYFPDKTLKQISDKRRCLHDRESRNVEISHDRLSETSTCSDINNVVESRTPEKTLEPSTSESDQTLGSDETWRKNMSKFIESITISSNSKLASLEVPLKTLWVKHREEPSRLYSLIDEFIEKEIVPMLLHANSKNINRKEKTGSKHKDNKYNNNNNKKDKNDNKYNDNNKRSNNNNNKRRIKNHNQRKKFGYARCQELFHKCPKKLAEYTIKSDFSFMHARQEPPPAEKVKELYADLWGHIGQKEVDLSIPIDRIPQLDIGEVIQPIALQEIKDRITKVKNKSAAGTDGVKKGHLMRAGTVELLAILFNILLLEGYFPTPWKRNRTTLIPKPDKDISEIKNWRPITIGSLLSRTFSAVVDSKLRKFIIQSNRQKGFSNEDGCRFNTLLLREAINEMKSTCGGTVVVLDISKAFDTIPHSMIDLGLKTKGVPKYIINLIRKMYQDCRTSIKAANNENIEIELKRGVKQGDPLSPLLFNLAIEPIIKHIDKETTGVRVESEPVSILAFADDIVLIAKDNVEARNQVKIIYEYLVNIGMSLSVSKCAAFQIVQKNKTWYIKDPVIKIKNETITNIEPDEALVYLGAKIHPWSNLIKGNEVPAIAKIIKNVKKLYLKPYQKIELIQTYILPHFIYSLTTNAPSKGTLKLLDSEIRQHMKEILHLPISTATGFFYTPKKDGGLGIIKFQNLVPLAAIKNNIRMEQSMDPVMHGLVQSEKLRHAINKYCEELRIVKPETIKDVDKAKMLLKNREATSWEDLYLQGQGVKDYRGDKVGNRWLRDPTLLKGSRFIDAIRLRTNTFGTRIVLSKTKPNAEVMCRRCSMQAETLGHILGICIHTKPARIKRHNDIRDFLANKLSKSKTVFVEPTVNEDGELKKPDLVVKNNTDLLIVDVTIRYEDKNYLKVAAEEKINKYSTTAELIKTRIGCTNSEVLPIVIGSRGILPKDTKTCLKKLGFNQQEMLTISLMTLRSSLEIANAFIDYDKIE

SEQ ID NO: 19446 - protein, 1198 aa, Ancistrocerus nigricornis
MDPDKKNDNASDAELPGPGSSDTDLSVSEGAIMNDLAISMERILITVPLDESEPETCKICAERNQRYVFSKLRDLERHNDEHHLLSNIRWKCKFCGKLFNKAHGWECHFGKCKRIELSTDDNRFKCTICSETFKTLVGLSMHERHRHPSLRNRRRQEQAEQANKPPGKKYVLWSEDQVQLLIDLEETYREHQFPNVEIQKYLPDKTIKQISNKRQDLKKAKAKTYRTNNNNNNENNVQPEQTNENNGNRAECRDVPMEDEHINNENIEDGHRDELAETRSDTDGRMERTIQEAVAEWRNRMNESINKQIDVSNDVSTLYENLSELCSSDNNLNRHKSIDDYIQNILIPNLLQTELENNKIEKQDKQNMHANNKSENQNNITGKPKSNKHKKKNRNNNNKSSRVRRNQCRKFTYARCQDLYNECPIKLADIACTGDLSSIEPPHARPAIEDIKNLYDNLWGLKGPDRMEGIDRSASAPITQGFSPITAEEITHRIKVINHKSAAGPDGLQKRHLLKPGLAAVLAKLFNILLLETYYPTPWKVNRTTLKPKIGKDPRDATNWRPITIGSIIARIFSSILDKRIRAVIKQSVRQKGFTAENGCQRNIMLLNEALERAKAGTGGIISVLDISKAFDTIPHSAIRKALARKGVPPQICSLIENMYAECYTVIQGNNRDSTRIKLLRGVKQGDPLSPLVFNVCIEQLLDDLEENTDGLEVGNARISVLAFADDIVLLGKNKMEAQDQLDRTKNFLQNLGMQLSPNKSLTFQIKSTKDSWYILDPKIKMEDTIIPHAAPEETFKYLGGKFSPWRGLQKNAVADIIVVVKRVRKLYLKPQQKVDLIIRYILPRFIYGLLMSPPADSVLKLIDSEIRQQIKEILHLVPSTSTGFFYTPKNCGGLGIPKLEQIIKLGVLKNGIKMKESNDQAIRDLVETDKMNKRLKSIANSLRINWPATLGDIEKARKRLKMEACEEWEQLGSQGQGVKDFKNDKIGNAWLKNTKLLKASRYIDALRLRTNTFGCKVALARAQKGIDQTCRRCHAQPETIGHILGLCMHTKALRIKRHNEVTNFLAQKLSRECDVSLEPTINAEGNLYKPDLVVKKEDTVFVVDVTVRYENRDYLHAASEEKINKYKTCLTEIKKLYNTNKAQILPIVIGSRGALPRITKDNLKTLNLKYADMLTIVTNVLRSSIEIANIFIDYDDV

SEQ ID NO: 19447 - protein, 1351 aa, Emmelina monodactyla
MKITSNKNNKTYNLRSRLVSTASSEVSQRTHRGQMPESTSASHPSSPISSTRSLFESPNSSPCSYELRSLSRISESSTITSVDAVQEASTNNPTLITGSKNTRKRWTEEMNKFIWRTYLIATSLETRQKGYLDYLYIQFNEKFPHMSSSKQRLGDQRRAIINNKLLPETTLNEIKAEVTLQLQNSEAPVQNTPLTQSNNQLSWTSEMNENIMKLYFLVTELETDKTSYRRKLHQKFIETYPNLNNLTEQRIADQRRIIIQNKYITDDRLSELRQEIAQQLNSQHNTTNTNINLTQDTIITTDPIENCSMVEESFMSALDVTLEPEQNTTTTHQYNLDTSKIEQIFNETLNFFKNTDPTKRPYIPKQKNSRRFLSSVEFLNSDVIPKHTSTNQSFLDLQTVIYSTAFTAATYNGAKLNTESTSSDTTPIRHKPRWQLRLENKVRDFRADIGRLTQYIRGNRNTRVTSAVEKIKSKYCIHAQYENPNTELSHYLDTLKQKLGTTASRLKRYLKCTNRKKQNQLFNSNEKTFYRSLSSHTPNTCNNLDTPPIADLHQFWSKIWQDPIRHNEHANWIQELGSLDCQAMAFNCIPIETFQDIINRTHNWKAPGTDHIHNFWYKKLTSIHPYLHNFVNSFIQSPTTLPDYITQGVTYMIAKDNDTKNPAKYRPITCLQTIYKIITGCISEIIYKHINHENILAEQQKGCRKNSQGCKEQLILDSIVMNESYKCKKNIHAMYIDYKKAFDSVPHSWLLEILKIYKINPVIIDFLQNTMNMWQTCLKIKQNNLTLTTEPIQIQRGIFQGDALSPLWFCLALNPLSKLLNQNKIGYKLKYNTDVFSLSHLMYMDDIKLYASTKTELYKLADITQQFSQDIRMEFGVDKCKIISINRGQIQTNTYQLNNGDTVDSLDENDVYKYLGYQQTKRIDQKTTKTDLICKFKHRLSLILKSQLNSKNTIKAINTYAIPILTYSFGIITWSQTDLKKLQRTINTQMTKYLKHHPKTCTQRITLSNLDGGKGLIDIQNLHNKQITGLRTYFYTKSQNSKLHQHASSLDKKLTPLNLQNEDKQPNEHITSTQTKNLTWSQKALHGRHLADLNQSHIDKRESNEWLRRGELFPETEAFMLAIQDQVIATKNYKKFITKELRADQPDTCRHCNRSSETIQHITGACSKLAQTDYKHRHDQVARIIHQIIAFKNKLIHEKTAYYKYEPKTVIENNNFKLYWDRTIITDKTIHFNRPDITLHDKTNKTTYIIDIAIPNTHNIQSTIAEKLTKYQELAIEIQTQWKSQKVHIIPIVISTTGIIPKSLKASLESLNIPTKTTTYQLQKAVILNTCRLTRKFLSSTSVISSSITMT

SEQ ID NO: 19448 - protein, 1063 aa, Emmelina monodactyla
MELLASHTYDTRGLQNTYKLSSQDPLACHTHVTTRNVKNYRIRPQYNLDTSKIEQIFNETLNFFKNTDPTKRPYIPKQKNSRRFLSSVEFLNSDVIPKHTSTNQSFLDLQTVIYSTAFTAATYNGAKLNTESTSSDTTPIRHKPRWQLRLENKVRDFRADIGRLTQYIRGNRNPRVTSAVEKIKSKYCIHAQYENPNTELSHYLDTLKQKLGTTASRLKRYLKCTNRKKQNQLFNSNEKTFYRSLSSHTPNTCNNLDTPPIADLHQFWSKIWQDPIRHNEHANWIQELGSLDCQAMAFNCIPIETFQDIINRTHNWKAPGTDHIHNFWYKKLTSIHPYLHNFVNSFIQSPTTLPDYITQGVTYMIAKDNDTKNPAKYRPITCLQTIYKIITGCISEIIYKHINHENILAEQQKGCRKNSQGCKEQLILDSIVMNESYKCKKNIHAMYIDYKKAFDSVPHSWLLEILKIYKINPVIIDFLQNTMNMWQTCLKIKQNNLTLTTEPIKIQRGIFQGDALSPIWFCLALNPLSKLLNQNKIGYKLKYNTDVFSLSHLMYMDDIKLYASTKTELYKLADITQQFSQDIRMEFGVDKCKIISINRGQIQTNTYQLNNGDTVDSLDENDVYKYLGYQQTKRIDQKTTKTDLICKFKHRLSLILKSQLNSKNTIKAINTYAIPILTYSFGIITWSQTDLKKLQRTINTQMTKYLKHHPKTCTQRNTLSNLDGGKGLIDIQNLHNKQITGLRTYFYTKSQNSKLHQHASSLDKKLTPLNLQNEDKQPNEHITSTQTKILTWSQKALHGRHLADLNQSHIDKRESNEWLRRGELFPETEAFMLAIQDQVIATKNYKKFITKELRADQPDTCRHCNRSSETIQHITGACSKLAQTDYKHRHDQVARIIHQIIAFKNKLIHEKTAYYKYEPKTVIENNNFKLYWDRTIITDKTIHFNRPDITLHDKTNKTTYIIDIAIPNTHNIQSTIAEKLTKYQELAIEIQTQWKSQKVHIIPIVISTTGIIPKSLKASLESLNIPTKTTTYQLQKAVILNTCRLTRKFLSSTSVISSSITMT

SEQ ID NO: 19449 - protein, 1359 aa, Emmelina monodactyla
MKKTIQNKNKTYNLRSRLISTASSNECQRTNTGQMPDDTAVSQLSSPISSTHSLFNSPNSSPCSYELRSLSRISESSTSTSVDAVQEALAINPALITDNTKTRKRWTVEMNKFIWRTYLIATSLETQKKGYLDYLCIQFNEKFPNMSSSKQRLGDQRRAIINNKLLPQSTLDEIRAEAALHLHNSEPTLQNTTHIQSSSRMCWTTEMNESVIKLYFLVTELETDKTNYRKKLHEKFVEQYPTLTHLTEQRIADQRRIIINNKYLTENRLFEIRQEIMQQLHSQNNITRNNQTFSQITQNTEPIIEIDENINASLNETFVSALDVTLEVETNTSASSNLIDTSKIEQIFIESLNQFENTDPTKRPYIPKPKINRRFFSTVNYLNSIVLPKHTNSDQTFLSLQTVIYSIVYTAAVYNGTKIKPFNETPSPHGSTPNRNKPRWQIRLENKVIHLRADIGRLTQYIRGNRNPRVKSSVEKIKAKYSTHSQHEDPNSELEHYLDTLKQKLSTTASRLKRYLACTRRKIQNNIFNTNEKAFYRNILSYQENTNSLNPPDTPLIPDLHQFWSNIWENPVHHNENANWIHELGSFDGQEMVFDFISIETFHDVIGRTHNWKAPGSDNIHNFWYKKLTSIHPYIHNHLNSFIQLPNTLPEYITQGVTYMIPKGEDISNPAKYRPITCLQTIYKILTGCLSEIIYKHVENENILAEQQKGCRKNSQGCKEQLILDSIVMNEAFKKKNNVHAMYIDYRKAYDSVPHSWLLKILKLYKIHPKIIEFLQSTMHNWKTCLKVKQNCTTQTTEPIKIQRGIFQGDALSPLWFCLALNPLSQLLNQSDSGYKLKCNNSTFCLSHLMYMDDIKLYASNEVELKKMADITQNFSRDIHMEFGVDKCKILSVNRGKIQVNSYTLDTGDTIDSLNENDFYKYLGFHQAQKICQKTTKIDITRKFKHRLSLILKSQLNAKNTVTAINTFAIPVLTYSFGIISWSQTDLKKLQCSINTLMTKNRKHHPKTCTQRLTLPKVQGGKGLIDIKNLHNKQITSLRKYFQDKSNTSMLHEHAIALDKKLTPLNLHDFHKQPNETITSLQQKITTWSLKALHGRHLADLNQSYVNKVESNEWLRRGELFPETEAFMLAIQDQVISTKNYKKFITKELRSDQSDTCRHCNRASETIQHITGACSKLAQTDYKHRHDQTARIIHQLIAFKYHLISKKVAYYKYEPRTVLENRNFKLYWDRTIITDKTIHYNRPDITLHNKTDKTTYLIDIAVPNTHNIQSTIAEKLAKYQELAIEIKTQWKSQRVHIIPIVISSTGIIPKSLKNSLETLDIPTKTTTYQLQKAVILNTCRLTRKFLSSSSVISSSVTMT

SEQ ID NO: 19450 - protein, 1359 aa, Emmelina monodactyla
MKKTIQNKNKTYNLRSRLISTASSNECQRTNTGQRPDDTAVSHLSSPISSTHSLFNSPNSSPCSYELRSLSRISESSTSTSVDAVQEAVAINPALITDNTKTRKRWTVEMNKFIWRTYLIATSLETQKKGYLDYLCIQFNEKFPNMSSSKQRLGDQRRAIINNKLLPQSTLDEIRAEAALHLHNSEPTLQNTTHIQSSSRMSWTTEMNESVIKLYLLVTELETDKTNYRKKLHEKFVEQYPTLTHLTEQRIADQRRIIINNKYLTENRLVEIRQEIMQQLNLQNNITHNNQTYTQITQNTVPIIEIDENINASLNETFVSALDVTLEVETNTTAYSNLIDTSKIEQIFIESLNQFENTDPTKRPYIPKPKINRRFFSTVSYLNSIVLPKHTNSDQTFLSLQTVIYSIAYTAAVYNGTKIKPFNETPSPHGSTPNRNKPRWQIRLENKVIHLRADIGRLTQYIRGNRNPRVKSSVEKIKAKYSTHSQHEDPNSELEHYLDTLKQKLSTTASRLKRYLACTQRKTQNNIFNTNEKAFYRNILSYQENTNSLNPPDTPLIPDLHQFWSNIWENPVHHNENANWIHELGSFDGQEMVFNFISIETFHDVIGRTHNWKAPGSDNIHNFWYKKLTSIHPYIYNHLNSFIQLPNTLPEYITQGVTYMIPKGEDICNPAKYRPITCLQTIYKILTGCLSEIIYKHVENENILAEQQKGCRKNSQGCKEQLILDSIVMNEAFKKKNNVHAMYIDYRKAYDSVPHSWLLKILKLYKIHPKIIEFLQITMHNWKTCLKVKQNCNTQTTEPIKIQRGIFQGDALSPLWFCLALNPLSQLLNQSDSGYKLKCNNSTFSLSHLMYMDDIKLYASNEVELKKMADITQNFSKDIHMEFGVDKCKILSVNRGKIQVNSYTLDTGDTIDSLNENDFYKYLGFHQAQKICQKTTKIDITRKFKHRLSLILKSQLNAKNTVTAINTFAIPVLTYSFGIISWSQTDLKKLQCSINTLMTKNRKHHPKTCTQRLTLPKLQGGKGLINIKNLHNKQITSLRKYFQDKSNTSMLHEHAIALDKKLTPLNLHDFHKQPNETITSLQQKISTWSQKALHGRHLADLNQSHVDKVESNEWLRRGELFPETEAFMLAIQDQVISTKNYKKFITKEIRLDQSDTCRHCNRAPETIQHITGACSKLAQTDYKHRHDQTARIIHQLIAFKYHLISKKVAYYKYEPKTVLENRNFKLYWDRTIITDKTIHYNRPDITLHNKTDKTTYLIDIAVPNTHNIQSTIAEKLAKYQELAIEIKTQWKSQRVHIIPIVISSTGIIPKSLKNSLEALDIPTKTTTYQLQKAVILNTCRLTRKFLSSSSVISSSGTMT

SEQ ID NO: 19451 - protein, 1270 aa, Conopomorpha cramerella
MNEYLLRTYLKLTLLNTDTTNYIQPLFTKFNERFPQIIVTPQNLGDQRRAIERRKLLPQEIIDRIYKEVGLEINSLQREVQSTGQHIQHTTTMHNSNTQHTHKTNQRMKWTTQLNEFIIKAYFRITQGETNKTAYRQQLHDEFVKEFPDLSHISEQRIADQRRAIIKNKYISEHRINELKDTYTTNIENSPLTLSNHETNENIIVSLTQINNESHSETLESCTNNIFTTSQILNSDQENETHSLSRDKEENIQTTFQEAFSIFQNITPEERPYIPKQRPSKKLFEVVQYLNYEILPNHVNKDTDFETLQKTIYCAAWTTAKVNGCKVGTSTQDNRTRTHKNLRARWQLRLEKRLEDIRSKIGKITEYIKGNVNRRAAKEAESILKDHTLHTVHENPNNQPALVLDTLKQKLSVTSSRLKRYTACNNRRKQNNQFTNNEKLFYRTIHNDTTNTHTSSNITIPPISRLHEYWSTVWENPVNHNHNSQLIDRLANNVDQTNEMHYDHITTDTFIKVIKKLHNWKTPGSDKIHNFWYKKFTHLHPLILNHINNFINNPEKIPEYVTNGTTFLKLKDENDPENPAKYRPITCLQTIYKIITACLAEQIYEHVEVNKYLAEQQKGCRRASQGCKEQLTIDAVILKQVKRNRKDLFSMYVDYKKAYDSVPHSWLVKVLEIYKVHPIIINFLSTIMTTWSTKLCMNTGNTTQTSDTIQIKRGIFQGDTLSPLWFCLALNPLSELLNNTDIGYDLKYKNENQTEQTTKLNHLLYMDDIKLYAATNDDLQELAHLTEQFSHDIAMEFGIDKCKINASKSGQQHQVYYEMQTGEVIDALDNNETYKYLGYQQSNQINVKTIKETLKTKFKHRLNAILKSQLNSKNTVKAINTFAIPILTYSFGIVPWSKTQLKSLQRLIHTSMTKQRKHHPRAAVQRSTLPRSDGGRGIIDITNLHNKLIATQRAYFHNKSLTSDIHNAIVQNDLKLTPLNLHDHNQQQNEIVIDRETKINDWTQKSLHGRHRQDLTHANVDMAASNEWLKRGDLFPETEGFMIAIQDQVIETRNYRKHIMKIANTIDICRKCNAATETIQHLTGACKAIVQTDYKYRHDQVANIIHQNLALKYNLIPSPPIPIPYYKYTPDTVLDNSSYKLYYDRAILTDRTVHYNRPDITLIDKANKSALLIDIAIPNTHNLQKTIAEKLTKYTELKDEITRIWNLQDVKIVPIVLSTTGVIPKQFKSSLESIGISPKILTIIQKSVILNTCRIVRKFMQTDKDIGITI

SEQ ID NO: 19452 - protein, 1381 aa, Conopomorpha cramerella
MNSSSNGRYSLRPLPGGRRGTPGAGAGCHSIRTIGDTESIRRARVDKYTSAEDSSSPSSPYSESSSTNYHPHISSPVSSSSSSQQSVVVVQETCEVVQSAPVTGKRSRKRWTPEMNEYLLRTYLKLTLLNTDTTNYIQPLFTKFTEHFPQINVTPQNLGDQRRAIERRKLLPQETIDRIYKEVGMEIKSLQREVQSTQIQCTTPIHNPQHTHKSNQRMKWTTQLNEFIVKAYFRITQGETNKSAYRQQLHDEFVKEFPHLSHISEQRIADQRRAIFKNKYISEQRINELIGTYSMHITEHSPLPEHLSHQETNEHITCSQTNNESHNITPDCSTHNILTTSQILNPDQENETHNISRDKEEAIRTAFQEALSFFVNITPEERPYIPKQRPSKKLFQAVEYLNCEILPIHVNKDTDFETLQKIIYCAAWTIAKVNGCKVGTSAQGNRTRTHINLKERWQLRLEKRLEDIRSKIGKITEYINGNVNRRAAKEAESILKDHTLHSVHETPNNQPELVLDTLKQKLYVTSGRLKRYTACNNRRKQNNQFTNNEKLFYRTIHNDTRNTHTTSNITNPSLSRLREYWSTIWENPIEHNHDSQLINGLTNNVQQTNVMHYDHITTETFIKVIKKLHNWKTPGSDKIHNFWYKKFTHLHPLIHNHINNFITNPEKIPEYVTNGTTFLKLKDVNDPENPAKYRPITCLQTIYKIITACIAEQIYEHVDANKYLAEQQKGCRRASQGCKEQLTIDSVIIKQVKRNKKDLFSMYVDYKKAYDSVPHSWLLKVLEIYKIHPIIIHFLTTIMTTWSTKLCINTGNTTLTSDNIQIKRGIFQGDTLSPLWFCLALNPLSNLLNNTGIGYNLKYKNEEDTEQTAKLNHLLYMDDIKLYASTNDDLQVLAQITEQFSLDIEMEFGIDKCKINASKSGQMHQVYYEMQTGEIIDALDNNETYKYLGYQQSNQINAKTIKETLKTKFKHRLNAILKSQLNSKNAVKAINANAIPILTYSFGIIPWSKTQLKSFQRLIHTSMTKQRKHHPRAAVQRSTLPRSDGGRGIIDIMNLHNKQITTQRAYFHNKSLTSHIHKAIVQNDLKLTPLNLHDQNQQQNEIVIDRETKINVWTQKSLHGRHRQDLTHANVDMAASNEWLKRGDLFPETEGFMIAIQDQVIETRNYRKHIMKIANTIDVCRKCNAATETIQHVTGACKAIVQTDYKYRHDQVANIIHQNLALKYNLIPSPPIPIPYYKYTPDTVLDNSSYKLYYDRAILTDRTVHYNRPDITLIDKANKSALLIDIAIPNTHNLQKTIAEKLTKYTELKDEITRIWNLQNVKIVPIVLSTTGVIPKQFKSSLESIGVSSKILTIIQKSVVLNTCRIVRKFMQTDKDIGITT

SEQ ID NO: 19453 - protein, 1270 aa, Conopomorpha cramerella
MNEYLLRTYLKLTLLNTDTTNYIQPLFTKFNERFPQIIVTPQNLGDQRRAIERRKLLPQEIIDRIYKEVGLEINSLQREVQSTGQHIQHTTTMHNSNTEHTHKTNQRMKWTTQLNEFIIKAYFRITQGETNKTAYRQQLHNEFVKEFPDLSHISEQRIADQRRAIIKNKYISEHKINELKNTYTTHIANSPLTLSNHETNENIIVSLTQINNESHSETLESCTNNIFTTSQILNSDQENEMHSLSRDKEENIQTTFQEAFSIFQNITPEERPYIPKQRPSKKLFEVVQYLNYEILPNHVNKDTDFETLQKTIYCAAWTTAKVNGCKVGTSTQDNRTRTHKNLRARWQLRLEKRLEDIRSKIGKITEYIKGNVNRRAAKEAESILKDHTLHTVHENPNNQPALVLDTLKQKLSVTSSRLKRYTACNNRRKQNNQFTNNEKLFYRTIHNDTRNTHTSSNIIIPPISRLHEYWSTVWENPVNHNHNSQLIDRVANNVDQTNEMHYDHITTDTFIKVIKKLHNWKTPGSDKIHNFWYKKFTHLHPLILNHINNFINNPEKIPEYVTNGTTFLKLKDENDPENPAKYRPITCLQTIYKIITACLAEQIYEHVEVNKYLAEQQKGCRRASQGCKEQLTIDAVILKQVKRNRKDLFSMYVDYKKAYDSVPHSWLVKVLEIYKVHPIIINFLSTIMTTWSTKLCMNTGNTTQTSDTIQIKRGIFQGDTLSPLWFCLALNPLSELLNNTDIGYDLKYKNENQTEQTTKLNHLLYMDDIKLYAATNDDLQELAHLTEQFSHDIAMEFGIDKCKINASKSGQQHQVYYEMQTGEVIDALDNNETYKYLGYQQSNQINVKTIKETLKTKFKHRLNAILKSQLNSKNTVKAINTFAIPILTYSFGIVPWSKTQLKSLQRLIHTSMTKQRKHHPRAAVQRSTLPRSDGGRGIIDITNLHNKLIATQRAYFHNKSLTSDIHNAIVQNDLKLTPLNLHDHNQQQNEIVIERETKINDWTQKSLHGRHRQDLTHTNVDMAASNEWLKRGDLFPETEGFMIAIQDQVIETRNYRKHIMKIANTIDICRKCNAATETIQHVTGACKAIVQTDYKYRHDQVANIIHQNLALKYNLIPSPPIPIPYYKYTPDTVLDNSSYKLYYDRAILTDRTVHYNRPDITLIDKANKSALLIDIAIPNTHNLQKTIAEKLTKYTELKDEITRIWNLQDVKIVPIVLSTTGVIPKQFKSSLESIGVSSKILTIIQKSVVLNTCRIVRKFLQTDKDIGITT

SEQ ID NO: 19454 - protein, 1452 aa, Conopomorpha cramerella
MRLRSSRRIPQAGTRANSDGQSRPESTDSGSPSCSGGDTASQSAQLPNTHTVAGSPSSSGIISHRAQSLSPFHTITTSSSYHPHPNSPSSLSGQSTDVVQESILDELPAPITDRRKRRRWSKEMNEFLLRTYLHLTQNNTDTKHYIQPLYNKFIEKFPDTTATPQNLADQRRAIERRKLLPQEVIDKLYEEVQNEMNQTYQHSIHSSNTPQTDTHPINNVGKTSQRIKWTNEMNEFIIKKYYIITERETNKTTYRQALHTQFLLKFPHLTQVSEQRVADQRRAIIKNKYISENRLNEIKRDINDTGLIQDVQNYDPETQHSTQINTQRTTDTQHDTNTLTANSQPTNISAETESVIISELPLMTDPIEAIDTLFDEALATYDNTNPVERPYIPKQRSSKKLYSIVNYINSHILPKHLNHETDFKTLQTIIYCAAWTTAKTNGSKIETTIGQANIRNNINIKAMWQLRLERRVEDIRAKIGKLTEYLNGNTNRKLVREAKIILRDYTLHTVHENLNTEPAQILDTLKQKLAVTTGRLKRYNTCTNRKKQNNQFINNEKHFYRTIHNNTTNDHTHITNSTTQNPSSDQLHHFWSSIWENRIEHNRNSGLIHKEQQKYSNLDEMHFEQITGETLVKVIKKLHNWKAPGSDHIHNFWLKKFTHTHPLLLQHINTFINDPQLLPTYLTTGTTYMKPKDDNDRSNPAKYRPITCLQSMYKIITACIAEKIYKYIEENEILAEQQKGCRKFSQGCKEQLTIDSVILKQARQQKKDLFTMYIDYKKAYDSIPHSWLIKILEIYKIHPNLIHFLSTVMKTWSTKLKLCTKDTTITTDSIKIERGIFQGDTLSPLWFCLALNPLSNLLNAKDIGYELRYKDTDNEIDKQTKINHLLYMDDIKLYASTPDDLQEIAQITETFSNDIAMEFGIDKCKINAAQSEQNHQQYYQMQTRDIIDSLQPDETYKYLGYQQAAQINHKDVKESLIKKFKHRLNSILKSQLNAKNTVKAINTYAIPVLTYSFGIISWSKSHLKSLQRVINTTMTKHRKHHPKSAVQRNTLPRSDGGRGIIDITNLHNNQINTLRSYFHNKATVSNLHRAIAHNDNKLTPLNLLDQNKQLNEIQISNQSKIQEWTQKSLHGRHRQHLTHTNVDLRASNEWLRRGELFPETEGFMIAIQDEVIETRNYRKHIMKIPGTIDICRKCNSSTETIQHITGACKAIVQNDYKYRHDQVANIIHQNLAIKYNLITPTPTPVPYYKYTPDTVLENGNYKLYYDRAILTDRTVHYNRPDITVINKTNKSALLIDVAIPNTHNLQKTIAEKLTKYTELKNEITRIWNLNNVTIVPIVISTTGVIPIQLKRSLQSIDLPTSLMTIIQKSVILNTTRIVRKFLQTDKDTIHIQDPIHMQAPIHTRDLIHTQDTIHTQNPIHTQHLIHTQDTTRTQETLHTYNIPSHLYDIRLA

SEQ ID NO: 19455 - protein, 1398 aa, Conopomorpha cramerella
METRSKSKRLGPLPGDRRGASGADAGCYSMRTIGSKKLNRRALTENNATAEDSSLQSSRTPSPFHSIDTNSSYHPQSISITTTEHSADVVQEADLAVEPSPVTENRKRRKWTTDMNAFLLRTYLELTALDTDTKNYLQPLYSKFIESFPHITVTPQNLGDQRRAIVRRKLLPEDIVAQIYTEAQNNINKYTQTNNRLSHQQHNSINNETNYTQTQTSTSSTVPLSKRNKWTTEMNEYIIKTYYELTDLETNKTAYRKPLHQKFIETFPHLSHISEQRVADQRRAIIIKKYLTDKRLNEIKNEVTQYLDTIPLPLTQTTEPHCSTSDTNTTYLQQETLTQIHLVQTQNTQVHEAMIVTEPLSNPFGRNTEIDHIFQDALTYFKNTNPTKRPYIPKQRSSTKLYSAVTYINTQLLPEHINIDSNFETLQTITYCAAWTAAKINGSKVQPTIDDALQNARNLKARWQLRLEKRLEDIRSKIGKVSEYINGNTSRRLRREVESILKDHTLHTIHENPNVQPILVLDTLKQKLAVTSSRLKRYNICTTRKKQNNQFVNNEKQFYRTLHDNTTNRQTDNYADKTPPINQLRNFWSNIWQHPIEHNLNSELITTEERNHNDISEMQFEQIRLTTFIKVIKKLHNWKSPGSDHIHNFWFKKFTYLHPFLYNHINKFIENPDLVPAYISTGITYMKLKDENDATNPAKYRPITCLQTTYKILTACIAEHIYEHTEGNNIIAEQQKGCKRFSQGCKEQLTIDSVILQQVRKQKKDLYSMYIDYKKAYDSVPHSWLLKILSIYKIHPKIILFLSKVMKNWSTSLKIPTKHHTIISDPIKIERGIFQGDTLSPLWFCLALNPLSNMLNSTHKGYKLSYKQEENNTTSTKYVNLNHLLYMDDIKLYASTKNDLQTLAKLTEHFSTDIAMEFGLDKCKINSTKSGQMHQHTFETQCGEIIESLDLDETYKYLGYHQSNQINIKTVKDKLTKQFTHRLNSVLKSQLNAKNTVKAINTYAIPVLTYSFGIIPWSKTQLLYLQRVINAKMTKYRKHHPKAATQRNTLPREDGGRGLIDIINLHNKQISTLRSYFHSKESISALHKAIIQNDLKHTPLNLHDYTQQNNEKQITREFKMQEWISKSLHGRHRQDLTHVNVDISASNEWLRRGELFPETEGFMIAIQDQIIETRNYRKHIMKIPDTIDLCRKCNSSTETIQHITGACKAIVQTDYKYRHDQVANIIHQKLALKYNLITTPKPTPYYKYIPETVLENNNYKLYYDRAILTDRTIHYNRPDITLIDKTAKSAILIDIAVPNTHNIQKTIAEKLTKYTELKDEITRIWKLNKVNIVPIVLSSTGIIPTQLKTSLQSLHLPLSLYTLIQKSVILNTCRIVRKFLQTDKDTPYQELVHDSRLA

SEQ ID NO: 19456 - protein, 1395 aa, Conopomorpha cramerella
METRSKSKRLGPLPGDRRGASGADAGCYSMRTIGSKKLNRRALTENNATAEDSSLQSSRTPSPFHSIDTNSSYHPQSISITTTEHSADVVQEADLAVEPSPVTENRKRRKWTTDMNAFLLRTYLELTALDTDTKNYLQPLYSKFIESFPHITVTPQNLGDQRRAIVRRKLLPEDIVAQIYTEAQNNINKYTQTNNRLSHQQHNSINNETNYTQTQTSTSSTVPLSKRNKWTTEMNEYIIKTYYELTDLETNKTAYRKPLHQKFIETFPHLSHISEQRVADQRRAIIIKKYLTDKRLNEIKNEVTQYLDTIPLPLTQTTEPHCSTSDTNTTYLQQETLTQIHLVQTQNTQVHEAMIVTEPLSNPFGRNTEIDHIFQDALTYFKNTNPTKRPYIPKQRSSTKLYSAVTYINTQLLPEHINIDSNFETLQTITYCAAWTAAKINGSKVQPTIDDALQNARNLKARWQLRLEKRLEDIRSKIGKVSEYINGNTSRRLRREVESILKDHTLHTIHENPNVQPILVLDTLKQKLAVTSSRLKRYNICTTRKKQNNQFVNNEKQFYRTLHDNTTNRQTDNYADKTPPINQLRNFWSNIWQHPIEHNLNSELITTEERNHNDISEMQFEQIRLTTFIKVIKKLHNWKSPGSDHIHNFWFKKFTYLHPFLYNHINKFIENPDLVPGYISTGITYMKLKDENDATNPAKYRPITCLQTTYKILTACIAEHIYEHTEGNNIIAEQQKGCKRFSQGCKEQLTIDPVILQQVRKQKKDLYSMYIDYKKAYDSVPHSWLLKILSIYKIHPKIILFLSKVMKNWSTSLKIPTKHHTIISDPIKIERGIFQGDTLSPLWFCLALNPLSNMLNSTHKGYKLSYKQEENNTTSTKYVNLNHLLYMDDIKLYASTKNDLQTLAKLTEHFSTDIAMEFGLDKCKINSTKSGQMHQHTFETQCGEIIESLDLDETYKYLGYHQSNQINIKTVKDKLTKQFTDRLNSVLKSQLNAKNTVKAINTYAIPVLTYSFGIIPWSKTQLLYLQRVINAKMTKYRKHHPKAATQRNTLPREDGGRGLIDIINLHNKQISTLRSYFHSKESISALHKAIIQNDLKHTPLNLHDYTQQNNEKQITREFKMQEWISKSLHGRHRQDLTHVNVDISASNEWLRRGELFPETEGFMIAIQDQIIETRNYRKHIMKIPDTIDLCRKCNSSTETIQHITGACKAIVQTDYKYRHDQVANIIHQKLALKYNLITTPKPTPYYKYIPETVLENNNYKLYYDRAILTDRTIHYNRPDITLIDKTAKSAILIDIAVPNTHNIQKTIAEKLTKYTELKDEITRIWKLNKVNIVPIVLSSTGIIPTQLKTSLQSLHLPLSLYTLIQKSVILNTCRIVRKFLQTDKDTPYQELVHDS

SEQ ID NO: 19457 - protein, 1400 aa, Conopomorpha cramerella
METRSKSKRLGPLPGDRRGASGADAGCYSMRPIGSKKLNRRVLTENNVTAEDSSLKSSRTPSPFHSINTYSSYHPHSISTTTTEHSVDVVQEADLAVEPSPVTENRKRRKWTTEMNVFLLRTYLELTSLDTDTKNYLQPLYNKFVESFPFITVTPQNLGDQRRAIIRRKLLPEDIIKQIYTEVQNNINNYTQTNIHSIHQQYNSINPMTTETQNQNLTSTSSIASLAKRNKWTTDMNEYIIKTYYELTVLETNKTAYRKPLHQKFIETFPHLSHISEQRVADQRRAIITKKYITNERLNEIKNAVTQSLDAILLPPTQTNEPHSNISHTNTAHLEHETLTQIDLLEAPFTPQLETMTVTEPMSTALGRNMEIDQIFQDALAHFRNTNPIKRPFIPRQRSSAKLHSTVTYINTQILPEHINIDSTFETLHTITYCAAWTAAKVNGSKVQVTIDDTLQNAGNIKARWQLRLEKRLEDIRSKIGKVSEYINGNTSRKVRREVELILKDHTLHTIHENPNIQPILVLDTLKQKLAVTSSRLKRYSTCTTRKKQNNQFINNEKQFYRTLQENTTNRQTDNSINQTPPMNQLHNFWSNIWQNPIEHNLNSPLIITEERNHTDISEMEFEQITITTFIKVIKKLHNWKSPGSDHLHNFWLKKFTYLHPFLLNHINQFIENPDLMPKYITTGMTYMKLKDENDSTNPAKYRPITCLQTTYKILTACIAEHIYEHAESNNIIAEEQKGCKRFSQGCKEQLTIDSVILQQVRKQKKDLYSMYIDYKKAYDSVPHSWLLKVLVIYKIHPKITIFLSNIMKNWSTNLKIPTKHHTIISDPIKIERGIFQGDTLSPLWFCLALNPLSNILNSTHKGYTLTYQDEENSGTSSKHVNLNHLLYMDDIKLYASTSDDLQSLANLTEQFSTDIAMEFGLDKCKINTTKSGQVHEQNFETQNGDIIESLDENETYKYLGYHQSNQINKKTVKEKLIKQFTHRLNSVLKSQLNAKNTIKAINTYAIPVLTYSFGIIPWSKTQLLYLQRVINGKMTKHRKHHPKAATQRNTLPREDGGRGIIDIVNLHNKQISTLRLYFHSKESSSSLHKAIVHNDKKHTPLNLHDHTQQNNEKQVTRESKIQEWNSKSLHGRHRQDLTHTNVDIAASNEWLRRGELFPETEGFIIAIQDQIIETRNYRKHIMKIPQTIDLCRKCNSSTETIQHITGACKSIVQTDYKYRHDQVANIVHQRLALKYNLITEPKPIPYYKYTPETILENGNYKLYYDRAILTDRTVHYNRPDITLIDKTAKSAILIDIAVPNTHNIQKTIAEKLTKYTELKEEITRIWKLNKVNIIPIVLSTTGIIPTQLKTSLQSLHLPPSLYALMQKSVILNTCRIVRKFLQTDKDSPHHASVHDSRLA

SEQ ID NO: 19458 - protein, 1396 aa, Conopomorpha cramerella
MNCRSNGRYGLRPLPGGRRGAPGADAGCLSMRTVGGSKLSRRTSIDKATTAEQSSSPPSSKSSKSSLFHSVASSTSLFIPHSKPPPSSTTSSVISVDVVQEATLAIHPTPVTDNKKKQRRRWSEEENEFLLRTYLQLTLMGTDTMNYIQPLYNKFIERFPHIETVTPQNLGDQRRAISRRKLLPQNIIDQIHKEVNSEIESFSQTLPSQSDLIQNNCTATTSQTNSIRPQGQRMKWTAHMNEFIIKAYYRITDNETNKTTYRQALHQEFIQAFPLLSHISEQRVADQRRAIIKNKYISEQRLKTIKEEIANLIENTSPPEIHNISRSQTETISSTLIPISPITTEIQSYTLNHSLNDVHIINTENVSENVNRTDAIDLLFEEALSDFKNTNPVTRPYIPKQRCSKKLYTIIDYVNTHILPNHINKDTDFETLQTMTYCAAWTIAKANGSRIAATTEQSTTQSKRNIKARWQLRLERRLNDIRSKIGKLTEYMKGNNNSRLTREVEHILSDHTLHTIHENLNTQPSLVLDTLKQKLSVTSSRLQRYNACDNRKKQNNQFLHNEKTFYRTLTHTTSNNHAAHDHITQHPPIEELHRFWSNIWENPIEHNRQSETIRREEEKHRDLIPMIFEHVTFDTFLKVLKKTHNWKSPGSDHIHNFWYKKLTHIQPVLFNHINGFITDPSSMPTYITQGITYMKLKDSKDPINPAKYRPITCLQTVYKVLTACIAEHIYEYIEQNNILAEQQKGCRRASQGCKEQLTIDSVILKQVRKQKKDLFTMYIDYKKAYDSVPHSWLLKVLDIYKVNPIIINCLSQLMSTWSTTLKISTEKSTTTSNSINIKKGIFQGDTLSPLWFCLALNPLSNILNSTELGYKLDYDTDTNKTNIKLSHLLYMDDIKLYASSPNELTELTQLTESFSNDIFMEFGIDKCKINATKCGQLHKQYYQMQTGDIIEPLDKDETYKYLGYHQSNQTNAKIIKESLTKKFTHRLNAILKSHLNAKNTTKAINTFAIPVLTYSFGIIPWAKGQLKHLQRLINTTMTKHRKHHPRAAIQRCTLPRVDGGRGIIDIINLHNKQITSLRTYFHSKSSSSPLHNAIAQNDLNLTPLNLHDQTTQQNEAQTDRNTKILEWTLKSLHGRHRQDLTRTNVDMAASNEWLRRGELFPETEGFMIAIQDQVIETRNYRKHIMKIQSTVDVCRKCNAATETIQHITGACKSIVQTDYKYRHDQVANIIHQKLVSKYNLIPTPAIPIPYYKYTPETVIDNSHFKLYYDRAILTDRTVHYNRPDITLINKTDKSALLIDIAIPNTHNLQKTIAEKLTKYTELKDEISRIWKLKSVTIVPIVISTTGVIPTQFKQSLKSLDLPEQLLTTIQKSVILNTCRIVRKFLQTDKDTPTVSQ

SEQ ID NO: 19459 - protein, 1396 aa, Conopomorpha cramerella
MNCRSNGRYGLRPLPGGRRGAPGADAGCLSMRTVGGSKLSRRTSIDKATTAEQSSSPSSSKSSKSSLFHSVASSTSLFIPHSKPPPSSTTSSVISVDVVQEATLAIHPTPVTDNKKKQRRRWSKEENEFLLRTYLQLTLMGTDTTNYIQPLYNKFIERFPHIETVTPQNLGDQRRAISRRKLLPQNIIDQIHKEVNSEIESFSQTLPSQSDLIQNNCTATTSQTNSIRPQGQRMKWTAHMNEFIIKAYYRITDNETNKTTYRQALHQEFIQAFPLLSHISEQRVADQRRAIIKNKYISEQRLKTIKEEIANLIENTSPPEIHNISRSQTETISSTLIPISPITTEIQSYTLNHSLNDVHIINTENVSENVNRTDAIDLLFEEALSDFKNTNPVTRPYIPKQRCSKKLYTIIDYVNTHILPNHINKDTDFETLQTMTYCAAWTIAKANGSRIAATTEQSTTQSKRNIKARWQLRLERRLNDIRSKIGKLTEYMKGNNNSRLTREVEHILSDHTLHTIHENLNTQPSLVLDTLKQKLSVTSSRLQRYNACDNRKKQNNQFLHNEKTFYRTLTHTTSNNHAAHDHITQHPPIEELHRFWSNIWENPIEHNRQSETIRREEEKHRDLIPMIFEHVTFDTFLKVLKKTHNWKSPGSDHIHNFWYKKLTHIQPVLFNHINGFITDPSSMPTYITQGITYMKLKDSKDPINPAKYRPITCLQTVYKVLTACIAEHIYEYIEQNNILAEQQKGCRRASQGCKEQLTIDSVILKQVRKQKKDLFTMYIDYKKAYDSVPHSWLLKVLDIYKVNPIIINCLSQLMSTWSTTLKISTEKSTTTSNSINIKKGIFQGDTLSPLWFCLALNPLSNILNSTELGYKLDYDTDTNKTNIKLSHLLYMDDIKLYGSSPNELTELTQLTESFSNDIFMEFGIDKCKINATKCGQLHKQYYQMQTGDIIEPLDKDETYKYLGYHQSNQTNAKIIKESLTKKFTHRLNAILKSHLNAKNTTKAINTFAIPVLTYSFGIIPWAKGQLKHLQRLINTTMTKHRKHHPRAAIQRCTLPRVDGGRGIIDIINLHNKQITSLRTYFHSKSSSSPLHNAIAQNDLNLTPLNLHDQTTQQNEAQTDRNTKILEWTLKSLHGRHRQDLTRTNVDMAASNEWLRRGELFPETEGFMIAIQDQVIETRNYRKHIMKIQSTVDVCRKCNAATETIQHITGACKSIVQTDYKYRHDQVANIIHQKLVSKYNLIPTPAIPIPYYKYTPETVIDNSHFKLYYDRAILTDRTVHYNRPDITLINKTDKSALLIDIAIPNTHNLQKTIAEKLTKYTELKDEISRIWKLKSVTIVPIVISTTGVIPTQFKQSLKSLDLPEQLLTTIQKSVILNTCRTVRKFLQTDKDTPTVSQ

SEQ ID NO: 19460 - protein, 1047 aa, Allodiplogaster sudhausi
MPTGPVRMPRGPAGLSFLDDSPSSSQMDRSGILPTSGRDLLSPSDSPLSHAGAAPSIERVQPSNAPPMRGRPRHCLSPSDSPLSQSLSTSLAPSQAFAPSARQSLWSNRFASANSQSDLTAALTELIESVKARVPAAPPGSRPDDRVQSTKITQRSQTIASQPSRDTAREQRNGRDNRQRQQRYDAADAARIQKLYRSNRKRAMRAINQGEAPFCPLDKETLHAHFESVHAATSHVTSPVSSPLRPLSPPSSTNPFEREFTPSEVWDRLLRCSDTAPGADGVKYSVWKKFDPGGYILSSLFNCVRRVDHVPAEWKESSTVLLYKKGDKDDPSSWRPIALSCTVSKLYSSCLANRLMVWATAEGRLHRAQKGFLPMHGLLEHNFLLRSCIDDAKRHNRELAIAFLDLKNAFGSVPHSTIDESLKWLGLDDEARDVLRQTYEGCSTRFRASDGWTDEVSIGSGVIQGSPLSPILFNLAIEPVIAMADLNLHYLLGTSSIHILAYADDLAVMSKSREGLAEMLNEITDGAKWAGLTFNAKKCASLHMVGKKVGKQSFNIQGASMPVLDEASSYQYLGVPTGHQLHFSGKEALASMNKQLDRIDESLLAPWQKLDAVRTFVLSLLPFHLHHGTVPKGPLKEFDDKLKRMAKEWTCLPQRASAELLYMPMRLGGFGLTQVNRLADISKISHALSLFSSPDPDVRKASLWLAREVAEIRAKREISDEEWAEYFNGCTDEPFFTNSNDIRSNWTELRKATARLRGYLDVKWESSPSSSSLSFACDGTLVKPKVAIHTLTNAVRTLHCQKLLAKPDQGKCFDATLLHNASNHFIATGSFTRFADWRFIHRARLNCVALNGARRFGPAGNKACRRCGHACETLPHVLSHCHTHTRAIQLRHDAIVNRLLKALKRPANGSVYTNQPVPEHGGPERPDVCVIDHAQKTCAIIDVVVTFENRKEALLAARLDKQTKYRAMCSSLEAKGYNVICDAYVQGALGAVCPLNGFGVSALGIARSYHSLMRKLVCSDTIRWARDIYIEHITGHRQYDENAPPSH

SEQ ID NO: 19461 - protein, 1226 aa, Listronotus bonariensis
MAIGEEVKHVQKAHPEITVTFRCSGCDKIFYRKQGALTHVPKCPGKRKDNSDAKKCQICGQKFKGARGLATHQRAKHPAERNTLRAKGKSEPEIPKKNTAETPRTGEQETTTVETTVSTKSEKITSNKCTNEPDYDLKPPETANNAGTSKTGYQDNTDKDTIVIDTTVIDTTILIKNASANTAGTSKTGYQDPVVVDNTLTDTTVTDTTVLTQNATANIAGTSKTGHQDIVVIDTTPTDTTVINTTVLTQNADKTPNDAQAEGNATSKRSRKVFTHEDIEKMLKLEHTYKNVPNVAQEMTKHFPHLTNTQVRNKRCESAYKKRRNAYLASLLTEVVSEEGQPTAKENQNETSKRSSSPEVTELEVAISTNDTDTTSILPSRQTKQVNMQPIHNEEELITEWRNKIIRTLRGDVNPPRTQADQTILDALEFIETNKGKVSQKDIDEWYESIFKKEIPPIQPKRTHHCKRTKGRNKRYIYARTQDLFQHDPKLLAKHTREGKDWIEESQIECDPKDVENLYHELWGTKYTGSLPELRSNDKNDVTLDNLLPGITEKEIGGKLGGMKAKSAIGTDGTSVAIAKNKKKQLKFILNIVMVAGVQPTEWRRNRTSLIPKEGKDPKKAENLRPITISSIVSRVYYGLIDQRRRRAVKITARQKGFVSEAGCYNNLQILNELMKVAKGSQSAIITQLDISKAFDTVPHEAIIKALEERGMPNPMINIVKDAYKEVNTQITVAEKAFNIRIERGVKQGDPLSPLLFNPIMDPIIRKLETTGGFTIGENTSIATVAFADDLMLVAENKECAREQLKEVEKYFNNLQMKISAPKCSTFKINKTKDSWYISDPEIKFIDGHKIPAIDAEHTFRYLGMEISPWYGVNTKGIRKRINETLHRTKRLKLKPMQKIKLITEYHIPHFSYQLSMALTSITELKAIDGDIRQTVKEILHLPNNVTNGLLYCRQKDGGLGIPRLEWQITGSQIRACHKFVNSEDRVMRALAVRSQLTRNIERMARAARINTPINMSLIKNYVDKKRREELKRWRRITTQGKAVKAFADNRVSNSWLKDEGLLKPGRMITALKMRANVCEDRIAMRRLGKENDIRCRRCGAKLETLGHIIGQCIHTKGKRIERHDEIKNIITSEIGSRHSQWDIYVEPSITAGEVRLKPDLVIKNQERVFVVDVTVRHEDNDYLAEGRRSKLRKYDVLREILKAKYKVKEPGAPAAASTEPFPDTP

SEQ ID NO: 19462 - protein, 978 aa, Tenebrio molitor
MSLSQSQTCISSENLFSVQGNNSSVWINCNKKLKNHKGLKIHNSKCHPQVESSPSANPVAPSTSSGLPGFNRLLGRYFRPIYRYAADDSDEDSYEDPKNTDTDVKSGQIIKKSQISSSIQDFDGKIACPFSPKHLFKDQKRLKTHIEKFHQEQINDVSNNGFAPTNSISEKLMAYKQKIHTIRRIPKGTRYSSADKLSSVINYCVKTNSAVAWENLLLFSYKAFNINESNTKNLTSKIKLNISNFNNPPSTNSKSRKNISKSLSTRIEAKVNDFDIKGAIKLLSSEDSLASFDDTVFQALKKKHPKPSRHLSYPDPPENNNHNLSLNESEVLKGINSFQNGSAPGIDGMRPQFLKDMISFAAGEAGKRALTSLTSLCNFILAAKIPEEIQPIFYGASLCALSKKDGGIRPIAIGCALRRLVARIVCVNQSNQIQSYLAPHQLGVATKRGCEAAIHSVRTFINIPENRDNILLKIDFENAFNSIERDSMLIPIKNNFPLIYPFLYQSYRFPSLLFFGNKTISSEVGVQQGDPCGPMSFSITVQPLVNNLLSKLNIWYLDDATLSDSPETVLNDFHTIIKMAAEIGLKVNTSKCEIFFCSQRIDSSIVSKFEKICPGIRITSKDDLQLLGAPIFEEAHVHHFKIKQHKLNLLISRLEQINPHVAYFLLKNCLFIPKMSYFLRTCALWKFSSLLEDMDSLLKESLESILNICLNTKQWLQATLPISFGGLGIRRISDICLPAFLSSSHGVQDLMSSLLPFMDIKIQVHYYEEALNKWLSVNNETPASLKTQKSWDLINIKRIIESELQFDSDFDKARFKAIQQRESGAWLHAFPSKNIGTCLDKQDFQTSVGLRLGCRLFENHICSRCSMPNETGFHGLSCVKSLGRIPRHNELNSIIQRALSSAHFHCTLEPNGLSRDDGKRPDGATLIPWSKGQRLIWDVTCVDTLASSYLNHTSMCSGAAAEIACVKKHNKYKSLKSA

SEQ ID NO: 19463 - protein, 1100 aa, Tenebrio molitor
MNDQDHSLSLSDPDRSLVLSHFLTNFLQNLAACHTAFRQKTRKKKKLMSLSQSQTCISSENLFSLQGNNSSVCINCNKKLKNHKGLKIHNSKCHPQVESSPPANTVAPSTSSGLPGFNRLLGRYFRPIYRYAADDSDEDSYEDPKNTDTDVKSGQIIKKSQISSSIQDFDGKIACPFSPKHLFKDQKRLKTHIEKFHQEQINDVSNNGFAPTNSISEKLMAYKQKIHTVRRIPKGARYSSADKLSSVINYCVKTNSAVAWENLLLFSYKAFNINESNTKNLTSKIKLNISNFNNPPSTNSKSRKNISKSLSTRIEAKVNDFDIKGAIKLLSSEDSLASFDDTVFQALKKKHPKPSRHLSYPDPPENNNHNLSLNESEVLKGINSFQNGSAPGIDGMRPQFLKDMISFSAGEAGKRALTSLTSLCNFILAAKIPEEIQPIFYGASLCALSKKDGGIRPIAIGCALRRLVARIVCVNQSNQIQSYLAPHQLGVATKRGCEAAIHSVRTFINIPENRDNILLKIDFENAFNSIERDSMLTPIKNNFPLIYPFLYQSYRFPSLLFFGNKTISSEVGVQQGDPCGPMSFSITVQPLVNNLLSKLNIWYLDDATLSDSPETVLNDFHTIIKMAAEIGLKVNTSKCEIFFCSQRIDSSIVSKFEKICPGIRITSKDDLQLLGAPIFEEAHVHHFKIKQHKLNLLISRLEQINPHVAYFLLKNCLFIPKMSYFLRTCALWKFSSLLEDMDSLLKESLESILNICLNTKQWLQATLPISFGGLGIRRISDICLPAFLSSSHGVQDLMSSLLPFMDIKIQVHYYEEALNKWLSVNNETPSTLKTQKSWDLINIKRIIESELQFDSDFDKARFKAIQQRESGAWLHAFPSKNIGTCLDKQDFQTSVGLRLGCRLFENHICSRCSMPNETGFHGLSCVKSLGRIPRHNELNSIIQRALSSAHFHCTLEPNGLSRDDGKRPDGATLIPWSKGQRLIWDVTCVDTLASSYLNHTSMCSGAAAEIACVKKHNKYKSLKSANFIFKALAFETLGPWCKEASSFIDNVGSKLIAESGDLKAKYFLRQRISLAIQRGNAASIRGALPETTPLEEIYFL

SEQ ID NO: 19464 - protein, 606 aa, Neodiprion lecontei
METRIRTKDGFTNSIAIESGVRQGCPLSPDVFNLTLEVVLRSIDGTGAGYVLGDTKVSNLTYADDIGGLASTPAEMRTLLTTAERAGQAVGIHFNPAKCATLHLKGGRVMETQFNIGGSPVRALAAGEAYEHLGIPTGYQVRQTPTNTLAELVSDLRKVDESLLAPWQKLDTAATFILPRLDFLMQGADLEKEYLKETDKVVKRLAKRWLCVPGRASAELVHIPASQGGGGLLPTTDLYDVYTLSHAYRMLYCRDPVVRTIARDALQTTVDQRLRRRPTEEEIARYLSGAMDIIQVPGKDSFWAKVRTATRRLEPKLRVSWAWSPEEQVFVLKFANNSGTTSIAPSGRDRITSVLRRRLSTFFVRSLTAKPDQGKVFQVTTSSNFPNHFLRTGRSTRFCDWRFVHRARLGVLPLNACRRWETNGDKRCRKCGYQQETIPHVLAHCGAHSAARQRRHNNVQDRLVKAASRCPGVIRVNRTMEGVDGEAGTLRPDIVVRDEVNRTITIVDVAVPFENGKIEFAAARARKFEKYGPLATQLAASGYTVRLDAFIVGSLGGWDHHNDSLLQHLRVGRYYAGMMRKFLVSDTVRWSRDIYVEHVSGRRQYQ

SEQ ID NO: 19465 - protein, 1325 aa, Celaenorrhinus opalinus
MASPSSSPERRDHHRRTTRSSIDSSLEFQTRRPPRPGQRTRAIQPILEDRPVIAEQLAVPNSPVQAAQERGERLTREGDSFVILLPLLLEDVLHCPTCRGRGKYTGQRRVENFVRHAKEHHPQVTTIYRCGNCGFEAPPRAMYPRKVVTAHAMECGNHDPQAVVRAGQVDAARRRAIRERLRPNQGAVATPTPRPRQPSMEAPHATRATPARATPRRPATRQRAQSTPMPSPSPTPSPSPPLTQRRAARRILSSEEEDAFLIPNEESPTRELNSVRAPLRQRGSNFTPEQNTEGAHASTPEVGNSSRERNGSPATPLAEAEPGILLVHSLPTAPPETHLHSQPVSPTQQADTSSIQRAQEETVARMSINNNTTPGAVSAASSISEAPALSQRIPSQRYARTRGRTRGPTEEQKRLINSLEMVSDKANLEVIFPQVSGFLSRFTKPPTERDANNNRRPRVDHNDWVRKATRIQRLYRKNRKRAVQEVLAGPNRTCTVEPAVIEQHYTALGARRDGEGTWPDVLNMAAPSQASNDLLLRPFDRSVVWRKLSSRSNTAPGPDGTSYSDIKRADPGAHVMTALYNAIWRIEATPDQWNASNTVLLYKKGDPDDIHNWRPISLGDTCPKLFAAVLADRVKEWGQKNKRFSASQKGFLEYEGCFEHNYVLQEILRDAKQQKKEVVVAWLDFTSAFPSVPHSSIHRALELMDVPPKVRNIVDSLYTGMETRIRTKKGYTNPIKMESGVRQGCPLSPDVFNLTLEVVLRAIGATGVGYNLGGTKISNLTYADDIGAVASSPEDMVMLLSAAVRAGRAVGIDFNPAKCATLHLKDGRVLESSFEIQGTTIQALKEGEAYEHLGIPTGFQVRQTPVNTLSEMLADFRRVDESLLAPWQKLDTAATFLLPRLDFILQGANISKEDLNETDRQVKKLAKKWLNVPGRASAEVVHIPASQGGCGLLPTGDLYDLYTISHAYRMLYARDSTVRDVAVHTLRATVNQRLRRQATNEEIAEFLSGSSPTSSGKESYWARVRTATRRLQPRLHVHWHWSPEEQAFVLRFVDDTRTTSIAPSERRQVTSVLRRRLTGSFVRSLTNKPDQGKVYGVTTSSRASNHFLRTGRSTRFCDWRFVHRARLGVLPLNACKRWDTRGDKRCRKCGFQAETIPHVLNHCGVHSAARQRRHNNIQDRLVKAASRCPGSILVNQTVQGVNGAEAALRPDIVIRDETTRQITIVDVAVPFENGKQEFEEARERKIEKYQPLAAQLAVRGYTVRLDAFVVGALGGWHRNNEKVIELLRIGRRYAEQMRKYMVSDNVRWSRDIYVEHVSGVRQYAN

SEQ ID NO: 19466 - protein, 1134 aa, Dufourea novaeangliae
MDNARHSYSGTKGAEGGASPELLSKLPEIESTHLSGGAKHLRHRLKNSHEHLVSSNTDEASKRGNPAENTEYNTRNIRATMETTVSITSGQSNLFLHSKSLSVQDAVTGMQEGGVERTREGLRGEHEEASTSEMENVSGYKCPQCFVIFKTKIGLGVHRRKKHEEVVNQEISTDRKKARWTDEEVRIIAEMDAKTVGRTADINKYLKETSGSMRSIEAIKSLRKRAHYREMVEHLRSRGEEINVEGDHEEEIETGRIGEDMRQNQKRPEMERQDKFERWLLEANSRLIDGMPEVDTIRQAIEAMEGGRNPIPYLESWARRIFHTRRTNASLRTRREEPMSGLSRKQRRRSEYKNFQRLWKRNMGKAARKILDGNTDEQPHPNMQTQMEYWKPIIEGPEDNKVGERSREVNTEGPQHDVMIPISEREVHENRVKRGSAAGPDGIDTDKWNASIPNIMKAIVMNIMLKVGQVPTAWIKSRTVLIPKEPGSMDPTKYRPLSIASVIIRHMHRILAKRLNQLKILDPRQRAFINEDGLADNVFTLATIIDDAKSELKHLQVATLDVRKAFDTLSRDALWRVLYDRGFSERFILYLKFIYNNACTVLQVDGNTSEEIKPKRGVRQGDPLSPFLFNIVIDKVLKALPAHIGYDVGTERVNALAFADDLVLAATTEQGLQIILNESTRILMECGLELQPEKCHTLSLQPDGHAKKMKVIGESRFKIAGSVIPTIKIGEEWKYLGVQFSNHGPTKPKVELQNYLQKIRRGPMKPQQRMKTLCTYLLPRLIHQLIFGKTSHGTLRRLDRVVRKEVRKWLHLPADVPVGFFHAAVAEGGLGIPSYESMVPEIKIKRLNNLGRSSFKGATEAGRSKYVQTARRWCNMAKVKSKDWTRRLHSSVDGYELRETRKSSASYSWFNDPYMAIPPRDWIQYIKTRINALPSAMRTTRGRNRNTGQALCRAGCGRDETTSHIIQECHRTHGGRIMRHDAVAKKVAEALHRKRYQVERENIYRTEEGLRKPDIIAIKDGMVNVIDVQVVSAYEQLTKTNKRKIDYYARNSSLIRGIASMTRIEPRNVHVAAITISWRGVWAKESEDLLRRLGLATGTMKSLTTRILQGSHTNFTRFNQMTTMAANNTSRRVR

SEQ ID NO: 19467 - protein, 1074 aa, Henneguya salminicola
MKGDFTAINDLANHIKLCEGKITQGSEREIIIKKNELSKQFQSSPKLKHHIVKAASISKKVPEPIESIKPVIKVSSITETNLRGTQTQAFKQTRSSPHIKPVKPPPRIRVSEVIPRNIIVSQIIPRDTSNFEKANKIRDSFIADLQGLLALPGPELNAALTHWLSNFKKHADTLKINIRGKTAFKFREPSTAYHMRKKDHRQSSDRSTTSGGKENLSPVNANSRSNQLMKLFKSDPKALFRILTEDSPLALHKFDKKTLEDTYKQIWDCAPNRSPILISKTPSRFPGLLRSFTDIEISKKINFMNANSAAGPDGLYISALKWLFEGNNVSHLADLFNNFLSNNYIPTCFKEARTILIPKGDEDPNDINNYRPISITGTLYRLFAGILADRIQTVSKELFNKSQRGFLRMDGCFQNTQEIFNIIRKSSHCKTSPACLLFVDFSKAFDKVNHAALLEEIEKQLGFKEAEFFSSLLLDCSTYFVDDTGANCRVNLSNGVRQGCPLSPLLFNIAMNPLLESLNGHEGLKFSAYGESESRCCLAYADDLILMAHHPDDVLKMQSSFMEWCEKFNMSLNEKKSALLHVVKAGPVCKEFCFCDKIIPLIEREQVYKYLGVKVGLCFDTYNDQVVELMSAAIEALKKVSNAKIPPYIKLSLTKSFILPKLDHVYRLKDINKELLEKFDAQIREHVKNFMNLPLTTNSAFFHSPCWKGGLGLREFGIDGVFSDIRRFLLCLNDKSLLGLFSREKLIKSRKSVGEEAPANRSNAELLNLPSASCKHLGHLSKSIKRVKDLGVEFITCELDNFTTLLKLPYTSRSKSTVSSLEWKIIRDFLSEKSFSKFTNMSLQGATAKCVSQNASSNAFITKGNLPIDVYSWCFLARLDLLPTKSSLKIRQIINPGGENSLKCKLCGAEEETLSHILNGCAVNKHLQTTRHDAVIKKLILGSNLPSSSNVRINKAYPFAGQSRPDIIILNNKGDKDYLLEVSCAFDNIKNYLESFKIKKEKYALLTNVHKEKTGRDLTIVPVIIGSLGSVPTNVSEIAEALNISLFKAKQLLEKIATNTIIKSKSIYDSYVAG

SEQ ID NO: 19468 - protein, 1581 aa, Lophius piscatorius
MKTLFQASSEREICSPFSVSSSLVFLQDLWCTIDLRHGKCFGELQELAFKVRDQAHKVVSLVGDSRLGLERDKLKRLVEIFENLVKSDEQNLDVGSVQMSLSDESCSFLTQDSVEKRVQRLEDNNKKTIDEVRENLNKIDDCFLVDSAYQFYLIRAVNKSKQGVKLSRLESYVDILERGMQNLSALRDIIKEPGVRDKYNSIETEVRDQYGAFVSCILYGFERWKIDVMPEECIKSVELERLKHKEFENRIVELGAKMAEQSLLKRDLSSFNLTTDLHLEKVDANINEANIKIKQVLDKAAVKPLKRPCMRKKEVSVQQSLRRFIKVTDLVRNKKKLRPPVTTTIEVSSSKSKVTRVRDRRFQPNLKAALGPLYTPVAGGKVRAIVCAEDLAIRPVHHELMDGKDEIAVPCAVWPPLRVSKERKDAIASYRAKDKNREKRNSNLVVVGPGIRVTDCTKRRKQENPVPESVPNLRDSDKNVASVDCANNVECGSYNQELIDKALQDLASCRRPTLADKVKDKLDKNKSKNVVDKKGTNTSIVPFTSKIGVTSVLKKPKINSKEFGANNNCPKMFGKSKENVVVKGFAGKSTESVVVTDVTGKLGNKNRVANKVIMTDPKTIDCDKELVSVANEIPKQISANIGRGGQSREAFNNKLVDARDRLKLVMSRNKNRDIEFLYSAFIDEVTFVAEGLDMMQFVMKKKPLKDPLATMDPEEETRKLRALFRRNRKKCYMKVTADRPVWCDASASDIKSGLASDMREVQGEFCELEQFDNGFFDQRMYEDLFMSVDEIDVSLRRAKMDSSAGTDGVLMRFWKKVPQMGEILVVLFNKIIKECRVPSDWNESRLVLLPKVPDPNFIGVNDYRPISITQCIYRLFMSTLNRKLSPSIKLSVNQKGFKSCNGCAEHTFVLQEVLDACRRECSDLSICWVDIKKAFDSIPHYRILEKLQELGVSSACIRLIQNIYSRGFISVSDLDGGHEEIYMNGRGVRQGCPLSPLLFNIVIDSFLEDCRNSMYGVSVKGHVFSALAFADDIVLFGKNASELQMNLNQLDSFLVRNELDVNISKCASLQVTYKSKKRCVGAHPCVQLSGNNIQVLVDHYKYLGTASNLLTFKGEHETLKEFQALFDKVSMCSLLPFQKLDIVRIYLFPKLDFLMRTTILKVRELNLLDNYIRGEVRKWIRMPHYVNKSMFYVPVKCGGLGLRSLRFDYFVLRLATTLELFDCCDSRIVDIAKKVLSNVVSKRTGSALGIREYLDCSIPAKMKTTSDIRSRMSHLRQCFSALEVNFKYDTKENGDFTLDLEAATLRKPLAIQTFGEAPASRTTRLRWNTQQNFLDSWSRFPDQGRSVRCFSEDPLANSFIRTCRIKIKTHRFAILGRCNVLPTMVSLFKRKVVRCTKCRRCECSAETLGHILGGCHYERNLRTKRHDEVVHYLATKLGKMKRHKKRTIIQNKIVPEDDVSMGRPDIIIKDNREQCAFIIEIGIKYEDSQERLDQLRETKLMRYQPQKEALERSGYRTTIFPLIYGSLGTHHPENDKVLDAIGFYSIKMRALVKKDLTEMILGFSQSIWAKHVTDTVLLRTR

SEQ ID NO: 19469 - protein, 1170 aa, Pristis pectinata
MIFYNSQLKKREVEEVVGDTMDDSLVETSLRTYKKCSTPLRKSEQGCEKVVAIVNIPFTPQKCPVEGCNEIYNIMATMRNHLKKSHLIRSIKAVCTLCGKLGELHSTVCHASKCKGSVNQEPAKPFACGYCDLAFKTKIGLGQHERHCHPAERNVKRAAALTGRNKPGRKEIWTKEEVALLMELEERFKNVRYINVEIAKELTSKTNKQISDKRRLLARNRAVVSGPNNEASPVVQTAVAQEKVQEVKDSPLKIQLKPKGDGGRILLQEFDATFREVDGLLRNKRNKSDYARGLSLIEAMSSTLVQELGKNIKKKPKRKVDREKALVSNNTGNLRRRARKKAEYRTTQILFQKDRKRLARQLMGAPMQNSCPLKVDDVFKCFQEKLGVANDRADLSKLEDYHQEFDEQHLLCEIGQEEVAEALKGMKEDSAAGPDGIVKRDLQQLVANDETVLARLFSLWLRSGTIPECLKKSRTVLIPKTDNEELLKSLDNWRPITIGPMLLRLFTKIVAKRLSESVKISLRQKGFLSNTPGCNENISILKNIIRGSKKNGKELTVLFVDLAKAFDSVGHKLIMKALQRVGAPKVFIDLVLDLYSNTTTVVEIGAKKTSKIQIKRGVKQGDPLSPILFNIAMDPLISTLEQRGRGVEMVTPGGRSRCTALAFADDIAILSESYNGMLSNISILSTFCDATGLEVNVRKTKGFHFLSGRKTHVYNLKEPWQFGNDKIAYIPPGEIEKYLGARIDPWCGISIEDVKSKLKHWFDALRRAKLKPIQKIELLKTYIIPRVYYQLILTEASQNELMDLDRLVRTTAKEILHLPNDTTNGLLYSRSRDGGLCLPRLEVQIPVAIIRKRQSLEQSEDVVIRHSFEWAGEDNSAVIEKLKGLAVFKECNISDNVILQPLSESFIGYMAERGIQLDDGEGRVANFNIDWRSAEFVRWAAQIYQGSGIKEFKNDKISNGWLRRHTAWKGYQVVNALLLRCGQYPTRCTRGRGNPEAVKTCRRCGIANETLAHISGRCLAVKNIRIKRHNKILERLRSKAEQYQWVPYMEPHLRSEDGLLWKPDVILVKGDRAAVVDVTIRYEDKNQSTSRAWAEKRNKYRHLTAQIKELTKTKIVKYFGFVIGARGLWEKDNNTLFSFLGIQKYKTFAEDTCSLAIRLTTDLLQVFMDY

SEQ ID NO: 19470 - protein, 1019 aa, Coelopa frigida
MPPPLDGVPTPHSCEICASMFSSHAQKVQHQRRRVCESVLSNNNCQHCQRHFSSYAGLRQHIRRAHPVQYNESIAAESSTRRRLWTKDEQEALANLEARMDSSNTAAVIDHLTANSNRSRDAIKKRRQRRSYIELVDRVRQNLADVEATVEEDSSHSEYESADEQPSVLERGFEELILSLQVDPCDEALRRSIISQTSSSREALDEWTCRLLESYGSRRTNVSWYSNSVQRLNSTMSGRRRRALEYQLTQREFRKNPRRLAERIINDRGWGVGSGVPSASSVSSHFSQVFSTRSSSDETPITDKFQRSTTISDPITENEIVSAIKGIKTNTPGVDGVTLRSLRRIPTSKLMLLFNGMLLLEYTPNILKNCRTTLIPKNDQNRGSNDMDAWRPITITSIIIRVLHKILYKRLERLDLHRNQRGFSKLDGCFANVFTLHTLIKRHRARGDPLCVISLDVSKAFDTISHNSLVRALQRANVDEKFIRYIIGSLEGVKTNIDTSSGTVEIDIKRGVKQGDPLSPLLFNIVLDELICQLEGFSGISIGDTSLRSLAYADDLLLFARSREDGERMVSAANAFFMERGMFLNANKSRMLCLDTVPSKKKLYTDVTPLVCGNFSIPAVGVEEQLSYLGTEFSPFGENECSSDSLLVHLQRLRKAPLKPAQKFLMLRTYLLPRYIAHFQRPTVTRKTLKVADKKLRVFVRAVLHLNAHAHNSILYAPVRDGGLGLFCLSERIPAIIASRIERLKEADDLFRTIEELGQSIVDRVKKMVTSISPKQANGDHHARALNNSFSGCNGLRQVSAHPECNSWIARPPPFWSGSDYIKSILLRFNLLPCLSIPSNPRNMRRCRAEHCRRQETLCHILQACNSTHIDRINRHNHVQNQLVAVARRNGWSYVIEQHVYGYDGVLRKPDIVMWKGTRLIVCDIGIHWEGDEPLSHFHQQKIIHYSAHHFITKVQTLYPGKSVSILPLIIGARGAWCAENDHLAQSIGLNRDDVRRMVTGVLRGGWMTHGRFMRCVWR

SEQ ID NO: 19471 - protein, 795 aa, Anastatus disparis
MRNPPARRRRNHGRTKKPPRSCEIKRYSYARCQELFDNEPKKLAEMVAANDLSLISKHTPPEKEQVYNLYSSLWDVEGLLQVGDVFQDQEEAWPEELFFTPVTAEEVRNKIRKLKSSTAAGPDKIKRSYLISGVEDILPGFYNLLLLASVFPEEWRKNRTTLIPKTGKDLKDVKNWRPITIGSILSRIFSALIDARLRRMIKQNDRQKGFTAENGCYANVAILGECIRNAKRDGATFTVQDVQKAFDTVPHAAIAPALSRKGVPRAACRYIAEMYRGCETIIKTADEDVSIKIRRGVKQGDPLSPLVFNLCMEPLLVELQSRTKGLKLSDENVAALAFADDLVTIGFSPSDGQEQARIIYDYLARLGMSLAVEKCRAFEFRCREKTWIVQDPEIRVCDQAIPFADAESAIRYLGTKITPWRGVIEGYELEAIRDLIRRTSVLPLKPMQKLDLLTTYMLPRCTYGMIVSPPSKMRLMKVDQWIREEVKDMLHISSKTSTPFMYVARRRGGLGLPNMEKLVLLAVLRNGVKALSSRDTVTATVMSGESQERKLAGYAKALDIQWPTTLAELDQEKINIKTKFLKEWAAQKVQGQGAYEFGNPASNEWLRRSGFLKHSRIADALKMRTNTYPTRVMLQRSGYSNNEALVVQCRHCGHPRETLGHVLGECTYTKPKRIHRHNEIKNFIAERLSQSEDSSVLVEQTFVTAQGEALRPDLVVRTNEACVVIDVSVRYENHNFLRKAGEEKIAKYKPLRSVICSKLKAKSCSIILIIVGFRGAMPSQRLVNFASWVLIMTTS

SEQ ID NO: 19472 - protein, 1140 aa, Oxygymnocypris stewartii
MLVTDNKIKKKPGPSGIQVLSNSEVKARAENPTLNRGTITCENCERAFPSLRSLGMHRHHQHQEVVNEERVQLLQKKRRLWSEAEDKKLLDMANEEWMEGMLKKDHLALLQAYFSHRTTDGLKKRLQHLAWRPSQIHRQEQVLPAAVSPQLPPPSRSTRTIPPASATPVQPPRPRAMKWTSEEDAKLQAQASVIWRPDLPKGDLAKALAATTRGRTAGAVRKRLQLLKWSNPEQVLPRSPQYNTEAGEVETDDAANNSGTSPSTGAVASGDSGELTTGQSPEEEWRAKLLETALATLEDPRVGALKLKGIAEGLLGGWVSKEQAAQSLESAIRECIPLKWNPVKRRRVFSKKPRSNREIRRARYAHMQRLYRLKRKDAAHSILEGRWKEAYRGMDCKVEGVEEYWAKVFETGTTESEPSETSPLSSGQSKWELISPITAEEIRLALNTMRKTSVGMDRLSAQELLTWHLPSLAGLMNMILAVERLPSHLATARVTFLPKVDSPVEPGDYRPIAISSVLARALHKILARRMRDHFKFSPLQYAFLQRDGCLEASALLHAVLRRSHEEVKPMAAAFLDISKAFDSVSHTAILAAGRKAGTPPPLLRYLSQLYENATLHLGTSSTKCKKGVKQGDPISPILFILAMGEVLEEALPEIGIGWGAEQLGSIAYADDLILLADTPGDLQMKLDGLSKGLSKAGMALNIRKSASLTILKDGRRKHLLLAPSTYDSKDGTIPAMGVADTQRYLGVYFTWKGRTTPKQTKEVERMLMEITSAPLKPYQRMELVRDFMVPKLQHELVLGCAHRNTIGRIDMMIRRSIRAWLRLPKDTSLGYLYAPVKSGGLGMPSLGTTLPLLQKRRFEKLLSCQTSTERTLVKLPSFQSTLRRVNLPCRVGKETICSPQDGNDEWTRVLVSSADGRSLVTEDIDPASYHWIRKPHSVFPRLHLRGIQLRGGTLYTKARASRGRERSSEEVACRGGCQARETLEHILQNCEITHNARCARHNRIVKLVEKGLRRKVERTWIEPIIPTTKSFIKPDILVETEHHITVLDVSVVANPRMEMSQQLKVKKYGSQENTEAIRTWIDTDKPIKHQPVILSSRGLMYGPTGRGLRSWGLTTRDLSDLCLLAVAGSLRCYDTYTRGT

SEQ ID NO: 19473 - protein, 1392 aa, Sardina pilchardus
MLEQDIADSELRSIAVPPPPSYVKAKIAAANARARENEPVSTPEEVKQSAALRDKQERIQKRSAEYRKKRAEIFERLSNQLRSIVNSPSTMTTDELYSLFIKTAYDGAKELKMVYHPRIPDSKKDKAVVLNSQETPEIQNNGEKDISQNSQPVPSEISQSQNSKNKNEAKRLRILYRANQKRCFREITEVRPKWCEASAKEIVQALSFVTDKDTENILCGPDAEDLSPIHIPALDNTVSDNTKQPNENSQEPLGNVLSFPFNFSFGKRSSNDGAVTSQPELGGDLVPEAEAAASEQPNSDVLSNKEKDQDQDKDQDKEPFNFSEGFRAFQEHLKGAKTSGSPPSSFPYDFTAAKSALAVGMVKDSANVDLAEVEKVLEKDKDEAAPQPSSVHFGHTNQSIVHNNVQSEQSNNGEDGNRISASALYQSGNQFSDFYIADEDVSVALDRAKKDTAPGPDGIHMVFWKKVPSMDSFLARLFNKISQAGRVPEDWRMSRLILLPKSEDPDVHNPIDYRPISITQTIYRLYMSVMNRKFSALIDLSPSQKGFVGGDGCVEHAFVLQEILDDVRRRRRSLAAVWIDLKKAFDSVPHEEIINQLKKKGIPANMVSLLEDMYATSYNIVTDNDGNTDRLYHFGRGVRQGCPLSPLLFNLVIDPFLCQIDESNQGYLLHGQKFGSLAYADDIILLSHEHTQLRSLLLRFEKFLDSLNLRINHPKCASLTVVHKGSVRIVNPDNINKYTIQHGQIPLMEDFYKYLGTCKNLKSFKDLPPCFPKFHEMFEKVSQSPLLHFMKINLTKTYMLPTLEYSMKNNIVRIEDLKKVDGVIKSNVREWLSMPHSVTKSLLYTPCSVGGLGLRCLKFDFPCLRLASALNLIHSRDERIAKLSCDAVDFIVDKRSNNSLSPEEYFNRDTELIVSRDVRSIFSSIRLNAKALEIQVRQADPNVPAKIDIDPEFLNPPSHLPPYQQRGATRIRRLRWHVQGMYLDTWKSQRVQGRSVECFIGSKAANSWITKGDVSPYVYRFGLLGRVNALPTKCVLQVRKLSSDANCRRCHVATEHLGHILGGCRFGEKLIAARHNHVVELISEQIRPTKGWVLFLDTIFPMIASNRRPDIVLIHEGKKQVIVCDVSVSFESDSQRLMQVHSHKVNKYTEEQAQWMEIGYSVSLHALVFGSLGAHLDVNHENFKALFIKNKFRTNKLKKSITRSILLDSSSIWRAHVHGTAPTPLSWTLLSEKPNPTDSRILSAPRRRPPPKSNSKSSVNLGVIKTKQIAIPTIQIDSQNNPKSISPPPTTNQSDFLSFTDDKFQKPPSTKNKKPRVIRATPVMTLAPPSPTRRKSQPKPKKSTSKPSQNSQRKPATTVASQQPPTTAIASGSAKIIKTPLSQPSLQRTARE

SEQ ID NO: 19474 - protein, 1407 aa, Sardina pilchardus
MKAKRAAAKQREPQPFRESDAEEVDKETAVKTKQDRMRKRAAEFRKKKEATMELVSSQLKSILLHNDKKTTEELYRLFLDSAYNGAKELKMIYHRKSKEELEALKAEKEASALLKAEKDKKNDLPSNSQDTAILEPSNDNSNDKTSPKNSKHSPKNNKNSKEEARRLRILYRANQKQCFRQITEARPKYCEATARDIVQSLSFISDKDVKNILYGPDVDDNSPIRIPALDNISVADSTKETQNPSPKDPAEIILDNLDISASDPKTSFPSAANLAPNDGNPASHQESGDIPEAGGIFGEPTKLDRFLTHLEEMEKDSFLKDQEKSIFEFSPINSQDPSIERPKGNKFCIESSQSSKGASQESYKFSPLKNFDVNPLNFDFDFNNNVNPDINIEAKDSEEHHSLSQSKRKRPSDEQRAALYNSGNKFRDFYIADEDVSSALDRAKKDTAPGTDGIHMVFWKKIPSMDSMLAKLFNKIAQGGKVPEAWYEGRLVLIPKSDDPIVSDPSQYRPISITQTIYRLFMSVMNRKFQSVIELSPSQKGFVGGDGCVEHAFVLQEILDDVRRKYDTLAAVWIDLRKAFDSVPHDEIFNQLRQKRIPPNLISLLEDMYKNSNNLVTDKEGNTDVLLPYGRGVRQGCPLSPILFNLVIDPFLRQIDESNKGYCLYGQRFGALAYADDIVLLSKEQSQLRAILRQFEAYIQPLGLRINHSKCATLNVLHDKRKKRLINPDSIFPYVVQGEQIPPMEDFYKYLGTCKNLQSFKDLPPCFSNFHENLEKVHNSDLLHFMKINLLKTFLFPTLEYTMKNTILRIEDLKKVDSAIKSGVRSWLSMPESVTKSLLYTPVAVGGLGLRCLKLDFCALRLASALNLIHSRDERIAKLSCDAVDFIVDKRTNNSLTPEEYFNRDTELLASRDLRSIFSSIRLNTKSLELQVTQSDPNVPAKVDIDSEFLNPPSHLPPYQQRGATRIRRLRWHVQGMFLETWKSQRLQGRSVECFVGNKFANSWISQGDVSPYVYRFGLLGRVNALPTKCVLQTRKLSIDANCRRCVKVTEHLGHVLGGCRFGENARIARHNHVVELVSEQMKPNKGWVTFLDTTFPMISSNRRPDIVLINETKKQVVVCEVSVTFESDAERLRNVHAHKANKYAEEQAQWMQEGYSVSLNALVFGALGAHLDANQESFSNLFIKNKFKQNKLKKAITRSILEDSANIWRAHVIGTAATPQGWAMSENQSIRPGPSTLKNSILHAPKKRKDLFSKKTNPVNVVKTNQISIPTINISDSKISTNTQPSSQLFLSHTDDIFRSQPNPPPNQQKSAKAKAKARYEAPLMTLAPPPLPKKNTKTAKLIPPTNPPTENSRKPRQRKPAAKTASQPISQISINASGEARIMKTALSQPLSSKGEGKGYPPTHQ

SEQ ID NO: 19475 - protein, 902 aa, Machilis hrabei
MLAALKDECSEETSESDAQELIGLVSDDEPTTPVITPAEFKMNPDDLAQLLLGVDPATQEELMTAYNTSVDNLYQMVISMKSKKPDGTDKRRNPPGVRKARQAQLGQLNHAKRKRMEYLRLQELFSRDRKLAYQDIIHDRPPDAPAGNNDNLISEIYDVYAPILSTVPAPIAAERPRNQPTGGPTADPLSITSAEVKMAISSFKARTAIGDDRLSLSELRSIPAVVIALMFNQWLERGLIPSKLKKCRTTFVPKVPCPQNPGHFRPITIASLLYRAYMKIIATRLNDAITLHPRQVGFQVGRSTSENIYALSLLVRQQHQRRRGIHIAFLDISKAFDSVPHQSINEALEDKGIHSAYRAVICDSLQGCTTTFSVDGKQDKRAVPIMKGIKQGDPVSPLLFNLVIDPLLYKLQSITAPVINDVPVSVVAFADDIALIAASAGELEIACESTISFYADHHMKVNPAKTVYVGTVYSGIAKKITTSRLPISVAGVPIPALAPASHAKYLGIYISGLGKFEFRQHELNEKLRRISSAKLKPRQKVQLIREQLLPATLYQAAYLLNPYGLLRKIDKTVRLAIKRILHLPDQIASEILYLKEADGGLGILQLSVTGPMVRLKYISGLNQSEDPLLLHISQHPHVQRMMRSDYRQLGFDDFGYDVAKIKAISTQHYKRRIEVLRNNKSALAASLNSREANRALNLPARFLDEGQFAWALRLRANILPTRSLTNKYSTNPESRKCRRCNRADEYPSHVLQQCESVRIERIRRHDMCVKYICEAIRNKKPDDTTIILDVHGTRCKPDALVVTSDRVLILEVAIPFDMSADQVYHSIQQKEAKYRDLVPAVAAQYSRPAVLTPICIGARGTVIPSMYKELSKTLGLRSLQVSALVANVLQHSMKIYRAFMHT

SEQ ID NO: 19476 - protein, 1111 aa, Pissodes strobi
MVRPTQEEDNNRRRLKWTNDMNEYLYRTYLTITRMETTNEPYSVELYERMAAKFPELRVKSRQNILDQRRQLFTRNRLDVNRIQEIRTEVEIDIGMRPPDHQDRAPGPLHQNEDADPRVDEARGYLERNLTLYRGLDPLSRPGLPRLTTKRDTTNILSAINRLMAEKADEINSILDYHDLIYSGARTALEMHGQRIMKTDRNGEPKKPKWEVRIERKIESLRQAIGQLHQFTQTDTPTKRLTNKVREIIRKHEDQDSQTPPQILDKLKQKLAVYSNRQKRYKESYQRKYENRLFHTSQKHFYRSMSQPQRDEAGELPSSEDAIKYWADIWENPRTHYHNASWLVEEKKAADGTPMMVYNTVTEIDVRKAVSNTANWKAPGPDGIHNYWLKKFHALHKRLADLLTIAIRDPSQLPTFLSTGTTYLLPKSSPASKDPAKYRPITCLPTLYKVLTSIICTQIYEHLDRHKLLPKEQKGCRRGSQGCKEQLTIDAVVSEEAKQRGKDLYVAYIDYKKAFDSVPHSYLIEILKVYKISPSIVTLLQHLMPQWKTNLHLQSGRSNTHVGRVNIRRGIFQGDSLSALWYCITLAPLSRMLNKQKVGFRLNNGQQIDHLAYMDDIKLISATKKGLDTLLRTTRKYSEDTRMEFGLDKCKISAMKRGVWEQHPGFHLEPDKVVTAMNRAESYQYLGLDQARGISHTKMKTVIRQRLTDRVKAILKTHLSATNKIKAINTYAIPTITYSFGIVKWSKTDLHEINRAVRVLFTKYRARHPKSSIERFYLPRSKGGRGVVDLTESHQRQIEELRKFFYRKSETSAYHRNLVRSDRGLTPLNLADEEYNPLQEVATVEQKMRDWKSKELHGRYPSILDLDQIDTDASNAWLKKGSLFAETEGFMMAIQDQVLPTLNYRKYIIKDPTVREDKCRICHNKSETIAHIISGCTSLAPTEYLKRHDSVARVIHQEVCKNANLLTEVLPHYTYTPEPVIENDAYKIYWNRTVFTDHPIEHNRPDIVVQDKGNKTTYLIDIAVPSAHNIVDTQVEKVRKYMPLAAEIKAIWNQEKVVVAPVVVGATGEIPLKLHKSIETLHLPPKLYMELQKFAILGTCHIARKVLNVET

SEQ ID NO: 19477 - protein, 807 aa, Pissodes strobi
MSQPQRDEAGELPSSEDAIKYWADIWENPRTHYHNASWLVEEKKAADGTPMMVYNTVTEIDVRKAVSNTANWKAPGPDGIHNYWLKKFHALHKSLADLLTIAIRDPSQLPTFLSTGTTYLLPKSSPASKDPAKYRPITCLPTLYKLLTSIICTQIYEHLDRHKLLPKEQKGCRRGSQGCKEQLTIDAVVSEEAKQRGKDLYVAYIDYKKAFDSVPHSYLIEMLKVYKISPSIVTLLQHLMPQWKTNLHLQSGRSNTHVGRVNIRRGIFQGDSLSALWYCITLAPLSRMLNKQKVGFRLHNGQQIDHLAYMDDIKLISATKKGLDTLLRTTRKYSEDTRMEFGLDKCKISAMKRGVWEQHPGFHLEPDKVITAMNRAESYQYLGLDQARGKSHTKMKTVIRQRLTDRVKAILKTHLSATNKIKAINTYAIPTITYSFGIVKWSKTDLHEINRAVRVLFTKYRARHPKSSIERFYLPRSKGGRGVVDLTESHQRQIEELRKFFYRKSETSAYHRNLVRSDRGLTPLNLADEKYKPLQEVATVEQKMRDWKSKELHGRYPSILDLDQIDTDASNAWLKKGSLFAETEGFMMAIQDQVLPTLNYRKYIIKDPTVREDKCRICHNKSETIAHIISGCTTLAPTEYLKRHDSVARVIHQEVCKNANLLTEVLPHYTYTPEPVIENDAYKIYWNRTVFTDHPIEHNRPDIVVQDKGNKTTYLIDIAVPSAHNIVDTQVEKVRKYMPLAAEIKAIWNQEKVVVTPVVVGATGEIPLKLHKSIETLHLPPKLYMELQKFAILGTCHIARKVLNVET

SEQ ID NO: 19478 - protein, 1111 aa, Pissodes strobi
MVRPTQAEDNNRRRLRWTNDMNEYLYRTYLTITRMETTNEPYSVELYERMAAIFPELRVKTRQNILDQRRQLFTRNRLNVNRIQEIRTEVEIDIGMRPPDHQDRAPGPLHQNEDADPRVDEARGYLERNLTLYRGLDPLSRPGLPRLTTKRDTTNILSAINRLMAEKADEINSILDYHDLIYSGARTALEMHWQRIMKTDRNGEPKKPKWEVRIERKIESLRQAIGQLHQFTQTDTPTKRLTNKVREIIRKHEDQDSQTPPQILDKLKQKLAVYSNRQKRYKESYQRKYENRLFHTSQKHFYRSMSQPQRDEAGELPSSEDAIRYWADIWENPRTHYHNASWLVEEKKAADRTPVMVYNTVTEIDVRKAVSNTANWKAPGPDGIHNYWLKKFHALHKSLADLLTIAIRDPSQLPTFLSTGTTYLLPKSSPASKDPAKYRPITCLPTLYKLLTSIICTQIYEHLDRHKLLPKEQKGCRRGSQGCKEQLTIDAVVSEEAKQRGKDLYVAYIDYKKAFDSIPHSYLIEMLKVYKISPSIVTLLQHLMPQWKTNLHLQSGRSYTHVGRVNIRRGIFQGDSLSALWYCITLAPLSRMLNKQKVGFRLHNGQQIDHLAYMDDIKLISATEKGLDTLLRTTRKYSEDTRMEFGLDKCKISAMKRGVWEQHPGFHLEPDKVITAMNRAESYQYLGLDQARGISHTKMKTVIRKRLTDRVKAILKTHLSAANKIKAINTYAIPTITYSFGIVKWSKTDLHEINRAVRVLFTKYRARHPKSSIERFYLPRSKGGRGVVDLTESHQRQIEELRKFFYRKSETSAYHRNLVRSDRGLTPLNLADEEYNPLQEVATVEQKIRDWKSKELHGRYPSILDLDQIDTDASNAWLKKGSLFAETEGFMMAIQDQVLPTLNYRKYIIKDPTVREDKCRICHNKSETIAHIISGCTSLAPTEYLKRHDSVARVIHQEVCKIANLLTEVLPHYTYTPEPVIENDAYKIYWNRTVFTDHPIEHNRPDIVVQAKGNKTTYLIDIAVPSAHNIVDTQVEKVRKYMPLAAEIKAIWNQEKVVVTPVVVGATGEIPLKLHKSIETLHLPPKLYMELQKFAILGTCHIARKVLNVET

SEQ ID NO: 19479 - protein, 1111 aa, Pissodes strobi
MVRPTQEEDNNRRRLKWTNDMNEYLYRTYLTITRMETTNEPYSVELYERMAAKFPELRVKSRQNILDQRRQLFTRNRLDVNRIQEIRTEVEIDIGMRPPDHQDRAPGPLHQNEDADPRVDEARGYLERNLTLYRGLDPLSRPGLPRLTTKRDTTNILSAINRLMAEKADEINSILDYHDLIYSGARTALEMHGQRIMKTDRNGEPKKPKWEVRIERKIESLRQAIGQLHQFTQTNTPTKRLTNKVREIIRKHEDQDSQTPPQILDKLKQKLAVYSNRQKRYKESYQRKYENRLFHTSQKHFYRSMSQPQRGEAGELPSSEDAIKYWADIWENPRTHYHNASWLVEEKKAADGTPMMVYNTVTEIDVRKAVSNTANWKAPGPDGIHNYWLKKFHALHKSLADLLTIAIRDPSQLPTFLSTGTTYLLPKSSPASKDPAKYRPITCLPTLYKLLTSNICTQIYEHLDRHKLLPKEQKGCRRGSQGCKEQLTIDAVVSEEAKQRGKDLYVAYIDYKKAFDSVPHSYLIEILKVYKISPSIVTLLQHLMPQWKTDLHLQSGRSNTHVGRVNIRRGIFQGDSFSALWYCITLAPLSRMLNKQKVGFRLNNGQQIDHLAYMDDIKLISATKKGLDTLLRTTRKYSEDTRMEFGLDKCKISAMKRGVWEQHPGFHLEPDKVVTAMNRAESYQYLGLDQARGISHTKMKTVIRQRLTDRVKAILKTHLSATNKIKAINTYAIPTITYSFGIVKWSKTDLHEINRAVRVLFTKYRARHPKSSIERFYLPRSKGGRGVVDLTESHQRQIEELRKFFYRKSETSAYHRNLVRSDRGLTPLNLADEEYNPLQEVATVEQKMRDWKSKELHGRYPSILDLDQIDTDASNAWLKKGSLFAETEGFMMAIQDQVLPTLNYRKYIIKDPTVREDKCRICHNKSETIAHIISGCTSLAPTEYLKRHDSVARVIHQEVCKNANLLTEVLPHYTYTPEPVIENDAYKIYWNRTVFTDHPIEHNRPDIVVQDKGNKTTYLIDIAVPSAHNIVDTQVEKVRKYMPLAAEIKAIWNQEKVVVAPVVVGATGEIPLKLHKSIETLHLPPKLYMELQKFAILGTCHIARKVLNVET

SEQ ID NO: 19480 - protein, 707 aa, Cantharis rustica
MSFPNESAGGMDGISPQHLKDLLVTSNGKSAKKLLQALLKLSNLMLNGKINNQFLSYLYGTNLIALKKKEGGIRPIAIGCTFRRITSKIVCKALKDPLVNILSPIQLGFGVKCGCEAAIHAVRSFIQNDSEVEVILKVDVSNAFNSLDRDSILNSVKTEIPLAFPYIYQNYSSPSVLLKGNHIISSAVGCQQGDPMGPALFSLAINPTVSLLKSSLNAWYLDDGTIGGKSEDVLKDLNILIHKFGEIGLKLNPTKCEDFFSSSFLLAKQHHIISQFDNLIPGFRVVSKDNFFLLGAPLFEESVKPLFEEKIIKIKFFIERLHNIQPHVAFFLLRHCFLIPRLIYFLRCSPIWKNTSLLIKMDNCIRSGIEEILNIQLNNVNLWQLASLPIKFEGIGIRRVSDVALPAFLSSSHSSYNLVGKILSPSLHSGFEISSMDEAVNAWRSLCPGLDLPASPNLQSSWDSPNMEILHKTILESSLDVNRARILASSQFEAGAWLQAFPSPNLGTLLDKNVLRICLALRVGAKICQPHRCVCGTSVSSLGIHGLSCQKSAGRILRHSSLNNIIKRSLASGNIPAVLEPPGMFRDDGKRPDGMTLVPWCRGKALVWDATCVDTLAPSHVLSSSRSAGAAALNAQNLKSSKYAGLRDNFEFLGFAVETLGTWSSDSKQFANDIGKILIEKSGDRRAKSFSFNVLAWKFKGVMRRAF

SEQ ID NO: 19481 - protein, 1045 aa, Aelia acuminata
MERKFLSAAEINEIRENVARSFNIISDQVQVSNDAEQQLDMQTDQVDQQREQLAEILMREHMKYDGIPLQNRPPLPRVPYGKMTLKVVKAVDQVLSDHLTNNMMLHEICHWIYVGARTVALRLGLIKQRPSKDKAPAKNKSAIPPWKRRLLCKIDSLRCKIVILTNFLKNPRNASIKLKTKIDEIIVSHMEGLQESLMTQELTKLMENLKQKLAVYANRVRRYTEAAERRRQNMAFATMENIFYRQLSSKEIINCDRFPKTELMINHWKNIWGTEKSYKTDAYWLGEVKESMVNVPMMENVVIQETDVTMALKELRNWKATGPDKLHNYWLKNFNCIHQPLAAYFQNLIENRIEIPEDFCTGRTFLIPKGQKENYEPKDFRPIVCLNGTYKLLTSVIHNKIKEHINQYKLIADEQLGTRENAKGCKELLVIDSFIASQVKSKKRSISMAWIDYQKAFDSVPHDWLLEILKIYKIEKKIVTLLARLMKLWKVSLSMLGNRDALSDEKIPIKRGIFQGDSLSPLWFCLAINPLSTLLNSSGKGYHLGADALISRSFYMDDIKLYAKNENDLRSLLEIARVFSEDIQKKMGLDKCGVLHVMKGKLEDATNMELSNNEVIKSLKENESYKYLGMYQLLEFKRDIKKLFEDKFKRRVNIILKTYLSGKNIIKALNTWAIPGLTYSFGILKWTNTNLDAMDSYLRVQLVNSRKRHPKSSVVRMYLPRKDGGRGLLNLLKVCSREERQLQNYFRANERSRVIAAVATLDFGYTALNLRGEHFPLLGSNESLIGTWKSKELHGRFYHSLSATGVDMDASLMWLRKGRLFPETEGFVIAIQDQVIATKTYRHRICGEVVDETCRLCRTASESIQHITSGCQVLAGREYLQRHDIMAKIVHQEHAKKYKVIEDTKPYYKYRPQPFIDGKHIKLYWDQAIITDHTVQHNKPDILLILKDEKLKIIEIGVPSDDNLHKVVAEKIRKYQDLSEELRQLYKLDRVTVLPLIISTNGLIPETTVNSITTLDLPPKSLEQMQKAVLLGTASIVRKFMNIKE

SEQ ID NO: 19482 - protein, 1205 aa, Aelia acuminata
MSGAVDIISPGSRYKMHLPIKMVRTRRQIASDESRVRAALEGMDHQPSTSAGSASGAPMPYGTVRPAAIGTLNSNSELGLEAPIEHPARGRGPPRQRNVQSRMKWTRNMNIAVIRAYFLATKIETEKTGYRSRITEHWHALFPELQVTSQRLADQVKQIMERKFLSAAEINEIRENVARSFNIISDQVQVSNDAEQQLDMQTDQVDQQREQLAEILMREHMKYDGISLQNRPPLPRVPYGKMTLKVVKAVDQVLSDHLTNNMMLHEICHWIYVGARTVALRLGLIKQRPSKDKAPAKNKSAIPPWKRRLLCKIDSLRCKIGILTNFLKNPRNASIKLKTKIDEIIVSHMEGLQESLMTQELTKLMENMKQKLAVYANRVRRYTEAAERRRQNMAFATMENLFYRQLSSKEIINCDRFPKTELMINHWKNIWGTEKSYKTDAYWLGEVKESMVNVPMMENVVIQETDVTMALKKLRNWKATGPDKLHNYWLKNFNCIHQSLAAYFQNLIENRIEIPEDFCTGRTFLIPKGQKENYEPKDFRPIVCLNGTYKLLTSVIHNKIKEHINQYKLIADEQLGTRENAKGCKELLVIDSFIASQVKSKKRSISMAWIDYQKAFDSVPHDWLLEILKIYKIEKRIVTLLARLMKLWKVSLSMLGNIDALSDEKIPIKRGIFQGDSLSPLWFCLATNPLSTLLNSSGKGYHLGADALISHSFYMDDIKLYAKNENDLRSLLEIERVFSEDIQMKMGLDKCGVLHFKKGKLEDATNMELSNNEVIKSLKENESYKYLGMHQLLEFKRDIKKLFEDKFKRRFNIILKTYLSGKNIIKALNTWAIPGLTYSFGILKWTSTNLDAMDSYLRVQLVNSRKRHPKSSVVRMYLPRKDGGRGLLNLLKVCRREERQLQNYFRANERSRVIAAVATLDFGYTALNLRGEHFPLLGSNESLIGTWKSKELHGRFYHSLSATGVDMDASLMWLRKGRLFPETEGFVIAIQDQVIATKTYRHRIWGEDVDETCRLCRTASESIQHITSGCQVLAGREYLQRHDSMAKIVHQELAKKYKVIEDTKPYYKYRPQPFIEGKHIKLYWDQAIITDHTVQHNKPDILLILKDEKQAKIIEIGVPSDDNLHKVVAEKIRKYQDLSEELRQLYKLDRVTVLPLIISTNGLIPETTVNSITTLDLPPKSLEQMQKAVLLGTASIVRKFMNIKE

SEQ ID NO: 19483 - protein, 1169 aa, Synstelium polycarpum
MDTNLRLNPERVSRVAGSLDLQRKVMVRRKWTIEEINVLRESLRKIGWQTGRSAKKAELQDILNEFRGKTQSLGLDLPERTISSLKGFIERNKYSLDLNIVEKPMSKPVEAEIADILVDSSNTKSIGAKKEFDLRNREIKAELMLAAEETFMILLRKKKQRLALRLNDIPNWLWELGEEVAKDLWEKIKVHSYWSLNCLAYAIGKVLENKWKHLRLTNNKNKKFFRESIELIKVLTERIGWLGFEVFRRKNHNPIKTAKERKIVGQIRKHYGRKGTKELVNHREYMVSLREKIQRRVDQRKADVKRGFQKWIPTSRLLTQRSCKSELNEGEVYKYWKRLIGRERKEEKDFFVDQFFDNLRSKSARIQQCLRLDKLTNWWTDVITKMKPHKAAGPDGIPGSVWKRLPTLHNDLRDKVIGRILGEKRCKLPNWWATGRIVLIYKSGNLNDPSNYRPIACLNTAYKLQSGLLHRIMLDRVNELELMPKEQLANRKEVWGCVEAHLMDMMIVQSHIKDKKDLTVTFVDFKKAYDSITHTHIRKLVTALRLGGNSQRVFCDLIARWRVYFEIASENGNRKTTEIQVKRGILQGDTLSPLLYCLAAACISNVLKETSGARVNFGKRAKTYTHIAYMDDIKIYSNTQENAVLAFQDLKRTAYSIGLEVNEKKCATVSSVGTRYSDLPTLHRKDIYKYLGIESGLVVDEGALLTRIRNTVMERVMKITSLSVPVCRIRQMLKAVVSPVIRFAFGNLVVTEKTLKEYISWAEDLDKDIRKVLKTFAKNEKRERFIPNACINERIYLPVELGGLGFMSIRDDVIIALCYTWCYYKLAPGLSDVRRKLSQVSYKKLKTIQTLFEEVLEYLDITEPIECENGLSINGKMCLRPTEAAQTLVKALTIDEKRWAKAFQYPTGKHILDRGNKEFHLQHLWLKKGMINAGVHCTCIAIQEGRLISGRADGGNNTKCRRCGVIGENVIHIVSGCPATRSNVIRERHNLITRYLQEIIGKQFGLEIGSKSNPAPKAYNDYVTLYYDTPMVMTEAKLLHNRPDLVLFNKKRKTIHILEIAVSWPTVVKTQYNIKLNRYGLNSNTENVSVPPLPGPNLAGELGKIYGKDFARGVFVKPVVFGVTGELYQISIDGIEDAIDRKLSSLELELLSRKIAIGTHWVVKAHLTK

SEQ ID NO: 19484 - protein, 975 aa, Callirhytis sp.
MGVHRRRAHPDFADQLVNTEKVKERWSLEEEKMMARREAELIVLGTRAVNDALTQEFPLRSKDSIKSHRRLACYKQHVAEALQQIREEREEIIRPENLNEPALNGIEEEGDPFRLYFMSLSPPKAEDTAYNEQELHQICTDALRITKEQLAARIALYLSHIIPTPKPGFLNVKRPQANVKRSRRKERRRQYRSMQILYNKNRSRCIHDILRGSMETVQPPREVMEPFWNHVLIQDSQDAPNFGEQEDKILNVWSPVTIEELDKNMLESQTAPGPDGLTAGDYRKIPKGVLVRLFNLLLWSERLPESLLASRTIFIPKRGHEDEPDKYRPITISSVIVRGLHRILAARIEKAIEIDPRQRGFRSHIDGCRDNVFQLDYILKQQHQMFKPLYMASVDVQKAFPSVSHPALLAAMKSFGIPKQCLNYVRFVYEKGYTILQGQGWTSAKIVPKRGVRQGDPLSSPIFNMLTHRLLEVLPTEVGIKIGSKTTNASAFVDDVNLYATTPSGLQTALNKLVGFLGECGLSINVDKSFTLGFKPSGKRKITAMDVTTKFLVKDRTLRTMKRGDTWIYLGIPFSWAGRVKISPREALEQDIESLTKAPMKPQQRLFALRTVVIPKLYHQMALGNVLLGTLKSADRIIRNAVRKWTNLPHDCPNAYIHAQIQDGGLGIPSLRWIAPLLRKNRLETLRGGTNTAAHDFLDKEIHICERGLTDKGKQLRTQKDVNEWWANNLYKSVDGGGLLHSNRTSGQHRWVGDGTKFLSGRDFINSCRLRISALPTRSRTSRGRHNDRRCRAGCEANETLNHVLQRCFRTHVKRMDRHDAVSKYIAKRLCDQGYMVEIEPRIKTHDGLRKPDLIAIKEQEVLVIDSQIVGDQFNLQVAHNNKRKYYQDNPGITSYIRTKSSNANIAFSSATLNWKGVWSPDSAADLRGWGITQNDIKILSSRVIIGGISAFRMFNQTTAVRRGTQSRQARQGIG

SEQ ID NO: 19485 - protein, 1130 aa, Tetramorium parvispinum
MEAEDNGEASEARDLVLASGGSGAACVANRRRGANDARVPGTSSVGQWDQAIRIRDAQHISVKANPSAAVSCPVCLEGGHQISCLGSKQLSDHIAKEHPAMNVHWSCDQCDRAFDKIHAWRCHYPKCKGKPCDTPKAHKCDNCPLSFDTRIGLSQHERHVHPKVRNAKRTTEAEKPAGRAGSRLTVWTEVELTELERRSLELEGSRNINVKLMEYFPGKTNKQISDARRRFKTTAALSPNGAATQEPVVFATEEIQVARQGQVSQEPDWEAAVAEELRKAYDVPDKWMALASSLMRSTSAEEMDLLYRDLTMELRKGNNRGRNDKAHARRHRREGRPRPPGRGERRRHAFARCQELMGKCPKKLADAVAANDLSLLQFRQEPDAIDTEKLYTSLWGIRGPQQKPLAQVAAAIKDSDIWLPITPEEVMVKIKRISSSSAAGLDGITKEALRGGGTCVVLSKLYNLLLLHQAYPQEWKANRTTLIPKAGKNPEDVKNWRPITISSMLGRIYSSLLDSRLRKVIKQTERQKGFTNENGCFANTRLLSRAIDEAKSEGGVFIVLDVSKAFDTVPHEAIRFALERKGISAAIAEYIVGMYDGCRTIIKTRKGEVPIELERGVKQGDPLSPLLFNLVVEPIIETIQSKSRGISIEGRNLSAMAFADDIILLARDRVTAVGQAEFAHQQLRDKGMALSVEKSMAFEYIPRSRTWYVKDPELTIGGAPIPYGEPEESFKYLGASVTPWRGLISGTELETLRETLERVKALPLKPMQKVDLLQRYLLPRYTYGLVMRPPSKVILESIDSAIRAGVKKILHLHETTCNAFLYTPRKEGGLGLCEVSKMVLLAALRCAAKAAESADTMVRNSVGDERSYKLYGAYAAALRLPWPATSKQIESRKRQIKRAYRTEWSRLTAQGQGVNDFAQEPLSNAWLSRKNLLKSSRIIDAIKLRTNTVPTRTVMKRVYESTNTTCRACGKNNETLGHILGQCMSTKAKRIKRHNEIVDLLRERLAKHNTVLVEPTIGINGERFKPDLVVKNEVEVLVLDVTVRYENKDYLVAAAEEKIEKYKAISHKLREDFNVPRTRVIPIVVGSRGALPSSTTGELTLLGIGKPDWLTISLIALRSSIEIVNSFMDQ

SEQ ID NO: 19486 - protein, 923 aa, Tetramorium simillimum
MKYFPGKTNKQISDAKRRFKPKPNNTETPSPTHEVALPELVTPASNEILSEHEQVAQEHSWKAAVIEELQRAYEVPDRWTALAASLTGNTGIDEIDPLYGGLVGKLMENDTSNGGDSGCTRKGKRRRDRTRPPKRGERRRHAFARCQELMSKCPRKLADAVAANDLSLLQFRQEPDMIETRNLYVNLWGIPGPRQNPMAHRETVIDDSEILLPVTPTEIMGRIRRIAGSSAAGPDGITKSALRGSGTCVVLSKLYNLLLLHGAYPQAWRDNRTTLIPKAGKNPAEVKNWRPITISSMLGRIFSSLLDSRLRNVIRQTERQKGFTNENGCFANTRLLSSAINKAKDEGGIFVVLDISKAFDTVPHEAIRFALERKGVSAAIADYIICMYSGCRTAIKTRTGEVPIELKRGVKQGDPLSPLLFNLVIEPIIEAIQNGSQGISIGDRNLSAMAFADDMVILARDRNTATGQLEFVHRELKSRGMTLSVEKSFAFEYIPRNKTWYIKNPELTVGGIPIPYSEPENTIKYLGASATPWRGLISGIELDALQEIMKRVKALPLKPMQKLDLLQRYLLPRYTYGLVMRPPSKVVLDNIDSAIRAEVKKILHIHETTCNAFLYTPRREGGLGLCEVGRMVHLASLRCAAKAAESADVAVRNSVTDERSVKLYGAYAAALRLPWPATSEQIESRKRQIKKAYRVEWSRLTAQGQGVNDFAQESVSNAWLSKSGLLKPSRITDAIKLRTNTVPTKTVMKRAYGGADTVCRACGRTNETLGHILGQCLTTKAKRIKRHNEIVNLLKERLARRNSVMVEPTIEVNGERFRPDLVVKNEVEVLVLDVTVRYENKDYLVGAAKEKTEKYNAVSHKLKADFRVPRTKVVPIVVGSRGALPKITTEELTALGIGRSDWLTISMIALRSSIEIVNAFMDQ

SEQ ID NO: 19487 - protein, 1112 aa, Teleogryllus occipitalis
MATPRGGDAAFLSSYLCPYCKAASFTTRKGLGVHVAAKHKVERNDAVPVRTAKCRWTEEERELLAREEAGLVVRGGCGVDVNARLRAAFAASGRSLEAIKKQRQAQAHKERVRRHVARLRGSCGEVAPVLHQEVGDVDGGPRLGDSPVGSPASPISEGVSEGRGDDLVPPSPPPQASSCLSPFLPSPILPEANGDLEAPDVLYPAPPPRESPNLDPRVHTSPPAEESQPNCSDTIEQSDGAPDHGFASWWRGLREGPEAMDASDPAWAALLSARGLLDRGVSPLGEILRWADLVARPLPERGARPPRRPLEPIMGTSRAARRARRRREYAEIQHLMKRDFRRAAHKVIDGGNSGPPLYDRDAMEGYWGDLISASSSAAPPVRPPKRETLRGVWGPVSSAEVGSSRVWSSTAPGPDRVTAAVWGRLPPAQVAAAYNLILEWGQVPERWLLGRTVFIPKSATAVQPSEHRPISITSVAHRQLNKILARRLAEVGIIDLRQRALWDGCSDNCTALAAAMHDARMRHRGLYGALCDVSKAFDSVSHVALWRLMEYEGIPSALISFVKGQYQRAAVRFDLGGVLSRPYHPGQGVRQGDPLSGILFCLAMNHVIGAIPSEVGYCLGDERLGALAYADDLVVLAASVVGLQKALDAAVGAAEQLGLRFNPKKSLVIGIYANAKDKKTKLVEVPIRVAGEPVRSVRPDSAWTYLGVEFSGTVPVKVRPRVEEGLSNITRAPLKPHQRLEVLRAYLLPRYLHSMVLGSVRMSDLRAVDVVVRRSVRGWLCLPHDVPNAFIHAAVRDGGLGVPSLALLAPGLVHSRMGQLGASGFPGAGAVAGAPWVVGRLDWASRSLPHDGNGPVSSAEGRRGHWAAALHRSVDGRELVGASKDPASTAWVRSPPPQWSGGQYINAIKTRINALPTAVRTARGRPGVPVGCRAGCRQTETAAHVLQVCPRSHVARVRRHDVAARFLAEHLRARGFRVVEEPIYRVSSGTWKPDIVVARNGRATVIDVQVVGGSERRLAEASREKEAVYNKPEIKQAVSDALGVSAVEVRAMTLTWRGVVAPGVGRWFADLGGQRWALAGLVTRVMVGSYGAWVDWNRSTARTDRRSLPLTT

SEQ ID NO: 19488 - protein, 947 aa, Beroe forskalii
MRKKKKESKRRYKELLRQAASDSEVNDERVKWLKLVRLHNKLRLQEMNIRGKDQQASNNAEFEKNPFEFVKNNITSTESKQQPSPKCDVKEATRFFTERYSDDKRDEKIEYPWFVKPPLPPKHVLSTEPPSREEVDSYVKSRRNKSAPGPDGIPYVVYKKCTTIRSFLHLALVECWEQCSIPEGDQIALKFLIPKTASSRKLEDFRDITLFNASIKVMYGVWSRRVTKYMTQNRYIDTTIQKGFIPKVAGCVEHNQTLHDIMRTDRERGKAVQVSFIDLKNAFGSTKHNLIVAALQWYHVPPEIINILKTLYSNFHVLVSVNNELTEPIPVLIGSLQGGPEAGICFNIPWNIILDGLCRKALEIGIAEGEKPVSAFADDLTTKTHCMAKQQKLLDYTGWMFKWSKSFQLNTKKCKSLCIDESGIPTEHSLNINGQKFGSLHKSPFKFLGRWIYPTLSDKANLKNVTDKVENILKKINDLALDGVKKTWIYQFGLLPYISWDLMMYPLMETTIQALEAVINRYLKRWLGIARCADPSIIYRERAGLNITNIRLYVLSNCLNTQLTTATSRDPLVRRTAKRKRDDHMDQDGWNPSKKLKAAVEEIDFEKKFMVNVRMKGDRRGLDKEKKINLNKKNVIAKAKDLTNDEKIGKILRLASQSKWTEWDELINLDLKWKELLYSFSPSMLSFLLNSIQGTLPDPMNLRRWKKTAEARCHLCGWKYCSQVHILCSCKVALQQGRISWRHDSLLGSILKWLKTSKKKKEERRNEEGTKKIPSLNDSFVAAGKPIPRKKKLPQRNGQWWGDAQDWKFLCDKRNEQYQIPPEIACSPLRPDICIYSLDRKSCLFVELTSPFEDNIADWKIKKSTKYEDLVRRSKEKGWNTKLFTVEVGARGFVNTSSMALFRFVGLTTKQCKVIRKELSIIAVRASYFIWLNRENKEWIQPAKVVS

SEQ ID NO: 19489 - protein, 841 aa, Tetramorium simillimum
MAELVRICRTLSNSSSEEVLRDLEIYLRKVFPLKKRENRENESPSVTRPELSKKQKRRAEYARTQDLWRKNRNKCIRMLLEDVGDVRVPPKDTMVPFWSEVMSGQNNTSPGVKNTRTVNNALWAPITGREILRAIPPNTTSSGPDGLSARVLRKVPLEVLVRIFNVIAWCGRAPVYLLESVTILIPKKSNASTPSDFRPITVSSVLIRTLHKVLAGRLLREIPLDQRQRAFRPTDGCSDNVFLLDLVLRHHHRRHKPLFIASIDIAKAFDSVTHRTIQETLQVAGLPPPMVEYIVDVYNRSTTSLCCNTWTSGKIHPTCGVKQGDPMSPIIFNLVMDRLLTELPEHIGADIGDRTINAAMFADDMVLFASTPMGLQKILDITTNFLEKCGLTINAAKSLTAALKNVPHEKKTVIDKDTVFQCGGRMLPAMRRTSEWTYLGIPFTPEGRMKIDAIPKLRVALGKLARAPLKPQQRMFALKTMVVPGIYHQLELGSVNVSVLRKGDKVLRGAVRNWLALPGDVPNAYIHADVKDGGLGIPSLRWSVPVRRMKRLNKLPIHNPVDGSVPGSFWRQEVERCRHRLRDGSQQLNTLMDVRARWGAQLYSKIDGIGLRESAKVPQQHKWVEEGTRFLSGRDFLQSCKLRINALPTKSRTTRGRPQERHCRAGCNRAETLNHVLQQCHRTHGFRIRRHDAVMTHVCRSLGNKGYEVSEEPVIVIGTEKRKPDVVAKLGRTAVVIDGQVVNDQYDLDTAHKKKVDYYSNLADTIRQKYSVQDVIFTSCTLNWRGVWSEMSANHLVEVGVLRKKDLKIVSSRVIVGGLALFHIFNKSTAVKGTSGRRGRT

SEQ ID NO: 19490 - protein, 841 aa, Solenopsis fugax
MAELLRICRALSNSNEEEVLRDLEIYLRRVFPPSKRRNRCQEPPNENRPELSKKQKRRAEYAKTQDLWRKNRTKCIRMLLDDVGNVKVPPKDVMIPFWKEVMSGSNDISPEIKNTRAINSVLWAPISIAEIKRARPPNNTSSGPDGLTARLLKKVPLDVLVRILNLIMWCGRAPTYLLESVTTLIPKKSNASAPSDFRPITVSSVLIRTLHKVLAGRLSLEVPLDQRQRAFRPTDGCSDNIFLLDLVLRHHHKQHKPLFIASIDIAKAFDSVTHRTIRETLQVMGLPRPMVKYIMDVYSKSTTSLCCDSWMSDKMHPSCGVKQGDPMSPIIFNLIMDRLLMELPTDIGAKVGDMTINAAAFADDMVLCASTPVGLQKILDITTNFLGKCGLKINATKSMTVALRNVPREKKTVIDKDTVFQCGGRMLPALKRTSEWTYLGVPFTPEGRVKIDIIPKLRLSLNKLTKAPLKPQQRLFALRTMVIPGIYHQMELGNVNISVLRKGDRTLRNAVKEWLALPGDVPNAYIHANVKDGGLGISSLRWTVPVRRANRLRKLSIHNPVDGSIPGAFWRQELEKCRNRLQDGNRQLRTLGDVNVKWAEQLYGKFDGTGLRESSKVPQQHRWIQEGTRFLSGRDFLQSCKLRINALPTKSRTTRGRPLERHCRAGCNRPETLNHVLQQCHRTHGFRIRRHDAVMSYICRSLEVKGYRVSVEPEIKIGALTRKPDVVAKLERTAIVIDGQVINDQYDLNAAHRNKIDYYSNLADEIKQKYAVEEVILTSCTLNWRGVWSQHSAEHLIELGLLRKKDLKTLSSRVIVGGLALFHIFNKSTTVKGTNGGRGRT

SEQ ID NO: 19491 - protein, 1108 aa, Owenia fusiformis
MADIERTVQKFLITPRVYILFFILFLFKNELGVKIHQGRKKQCKALLQQRIAANTTKSAASKSEEDPGPEAPHSAQDLQAVANPDTASQRRRERMEPVIERKPRLKFPPAADPRWKELDDSLDTILGMTLKGNPQKKLALMTTIVFDECKDLFGDKDKRRQARQPAGPSRRQQQIAELRRELRGLRRQWRRADDIQQVGLKQLIDHHRKRLIQLRQVENLRKKAKEKRRSREAFFKNPYKFTSELLGKPKSGQLECTQAEAEENVSRAHSDPGRDTPLGDCPVKLLTPEPDTPFDLSDITQDEVKAIVKKARAGSAPGPTGITYRVYKNCPKLLHRLWKLLRLVWKDKALPPTWTLAEGCYVPKEENSTTLDKFREISLLDVEGKIFWAIVAKRIAAFLLKNGYIDTSVQKGGLSGQSGCLEHTATITQLIKEAQRDKSTLAVVWLDLAKAYPSVPHQLIKTALEQYHFPQEIVDLAMQHLGSMRMQFTTAKFTTKWQQLEKGIMAGCTVSVVLFITAMNLILKAGEAQCRGPKARDGTRHRTCLAFMDDITAMTQSIPGTRWVLGGLEQMANWARMEFKPKKSRSLVIYKGKTQPSTFFKIQGSRIPTIQEQRIKCLGKYFDKSLKDVNSITDVVNQLKGWLKVIDQSKLQGRFKAWCFEFGIIPRLQWPFLLYDFPLTTVKAMEKLCSKHLRRWLGVPPSFSAVNLYSTSSKLSLPLSSVVEEFKVAKVRAVATLRSAHDSNVHGTGETITAGRKWKPQVAVSEAEERIQLEQIVGVTCQGRLGLGNYGPQQWEQPTPKDKRDRIVHQVRRKEEEERLVRAIGLTKQGDWTRWDSILDRSLGWRDLWSVDQGRLSFLLRAFTDLLPSPTNLRTWGKEETSNCPQCLAAHCSLSHILSGCTKALAEGRYRWRHDKVLEEIAKWVDRERLEANQQKVSTKPRFIEFRKEGQAKSSKQKTITEPPSTLSKASDWDLQVDIRRKLVFPQDIVVTTQRPDMVLLSRNSKTILVIELTVPSEERIEVSHQLKIARYQDLVDEAKSRGWNCRHHAVEVGCRGFPAASLRHMLKDLGIRSSHLRKAVKDIGATAESCSRWLWLRRKEKWTPTTT

SEQ ID NO: 19492 - protein, 1246 aa, Symmachia rubina
MNKFIWRNYLILTQMQTNTRGYLSSLHHQFTEKFPEMIASRQRIGDQRRAIVNKKLLPQRTLDEIEKEVSIGLPMNGSQSYINYSQTQPLSGRMCWTTDINETIIRCYYEVTELETNLTGYRKLLRQRFLQYYPALEHLSEQRISDQRRAIVNNHMISQDKINLLKLEVAQHITTRSQQEDAYQNTTQIHNTSNQDIEELEINTSNINIGERTMDEIIINPVDLDTTNNQNNVLCGIQDMTEKNKIKFQEAIDKFKNTDPTSRPYIPKQKTSRTFANIVSFLNEKVIPEYLSFDHDFLTFQTVIYSAAYTAAVCNGARIGREISQKGHKPSWQRRLENDVHRLRVNIGRLTEYIKGNRSKKVIATVEEIKIKFEMHAQNENFNSDPNHFLDSLKQRLNAKASRLRRYLKCAERKQQNKIFQNNEKKFYRNITAKTTFSGQHNYQAPTPDALRQFWASIWENPVEHDKQANWKNDINFNSTTMEFDNIPIDTFIQVIKRTHNWKAPGTDKIHNYWYKKLTRIHPYLHEHLNTFIQIPHTMPSYVLHGLTYMLPKDTDTINPAKYRPITCLQTVYKILTACISELIYAHLDKYNILTEQQKGCRKNSQGCKEQLVIDGTVMNQALKEKKNIHTMFIDYQKAFDSVPHSWLLEILHHYKINPTIIKFLETSMQNWQTTLNLKQGSLSLTTEPIKIRRGIFQGDALSPLWFCLALNPLSELMNNTNIGYKIESNNNSYYLSHLMYMDDIKLFASDQEQLYEIANITQQFSKDIRMNFGIDKCKILSVERGTIVPTNYTLETGEIIESIDSNSCYKYLGFYQSRNIHHKNIKTELTKKFKSRLNLILKSHLNSKNTTKAINTFAISILTYSFGIINWTQTELKNMQRIVNTHATKYRKHHPKACIQRISLPRQEGGRGVIDISNLHNKQISTIKNYFYRKREISELHKFIIGADQRLTPLNLSNKQTQQNEKIISPSQKIASWAEKIIHGRHRSDLCQKHVDKEKSNEWLKRGELFPETEGFMLAIQDQVIATRNYCKYIIKDPRITNDLCRHCNCAPETIQHITGACKSLANTDYKHRHNQVGAIIHQFLAHKYKFIIKKVPYYKYKPETVLDSNNYKIYWDRTIITDKTIHFNRPDITFYDKTNKRVLLIDIAIPNTHNIMNTISEKLSKYQDLAIEIKTQWNVDKVQIVPIVMSSTGIIPKSLTQSLSTLGIPTQIIHTLQKATILNTCRITRKFLSSSLISSTQTII

SEQ ID NO: 19493 - protein, 1077 aa, Apodemia duryi
MITRERINIIKEEVDLKLKQNILPESYNTQISTHELEISDETTNNLEEDLQPIEIGLYHQVTIAETNINTFQNKINTQFNEALEKFKDTDPTLRPYIPQQKSSRNLAAIVHYIDTNILPAHISFDQNFLSFQTIIYTAAYTAAICNGAKIDSINGKTNKDTLKPSWQTRLETQIDKLRYNIGHLTQYMRGNRNRKIIVTVEEIKTKYQLHATNENFNTELEHFLDSLKQKLSAKASRLRRYLKCTIRKKQNNQFWKNEKKFYRHLLSDHTSANVNNSITPSPEILRDFWANIWENQAEHNREATWMNDITSNSPEMDYEYLPVDTFKQVLTRAHNWKTPGTDNIHNYWYKKFTRAQPYLHEHLNEFIKTPSIIPPYVMHGITYMLLKDTDRQNPAKYRPITCLQTIYKLLSACVSELIYKHLVKNNILTEQQKGCRKNSQGCKEQLTIDAVVMNQALKQKRNIHTMFIDYQKAFDSVPHSWLLQILHIYKIHPIIVNFLETSMQHWKTTLKLTLGSTNIVTEPISIRRGIFQGDALSPLWFCLALNPLSILLNKSTCGYNFMNSSYNISHLMYMDDIKLYASDKEQLFILADITQRYSNDICMQFGINKCKIFSMEKGTIINSNYVLESGENIESMDETNIYKYLGFNQSRQIHHKEIKTELTKKYKYRLNIILKSHLNSRNTIKAINTFSISILTYSFGIIKWTQTEIKNLQRIINTYATKNRKHHPKSCLQRLTLPRKEAGRGLIDLVNLHNKQITTLRNYFFRNSEQSELHKYVVQADFNLTPLNLANKTTQTNEKLTDPSQKIATWADKTLHGRHRIDLCQPHVDKDKSNEWLRRGELFPETEGFMIAIQDQVIGTRNYCKFIIKDPTVTSDTCRHCHSAPETIQHITGACKALANTDYKHRHDQVASIIHQYLAFKYKFIEKKFPYYKYKPETILEDNSYKIYWDRTIITDKTIHYNRPDITVCDKQNKNVYLIDIAIPNTHNILTTISDKLTKYQDLAIEIKTQWKAEKIHIVPIVLSSTGIIPKNLLKSLETLQIPLHVIHTLQKATILNTCRITRKFFTTSVVTSSYLI

SEQ ID NO: 19494 - protein, 1363 aa, Emesis temesa
MRLRNRDIPQAGTCKGESRPESLDSGSPSYSGGGNVSLITPHSSYSTITTHRTHLSPSQSVSSNNLFSSPSTSSYSFEQDIYSPNSDSSDAVVQEAFRTTSVPTSDKKCARKKWSLEMNKFIWRTYLIITNMQTNTRGYLDKLHKEFIEKYPHMQISKQRIGDQRRAIINKNLLPKNILQDIENEVSSHINKNQCNTDSPLKQPPTGRMHWSNDLNEAILRCYYEVTELETNMTAYRNKLRRKLLTIYPNLNHLSEQRLSDQRRAIMNNNMITREKIEVIKKEIDLKLQQAKKHYLQPETNNIINTQILQISEKPSQYLEEELQLSEKNLEEELLLSERNSSCHHEVSLIENSINSFQSKLKAQFSESLEKFKDTDATLRPYIPPQKPSRKLATIVNFIDTNILPMHLTFELNFLTFHTLIYTAAYTAAIFNGAKIQLNNEKGNKDTYKPAWQRRLETQIHKLRHYIGHLTQYIQGNRNRKVIASVEYVKTKYQIHATNENYNTDLEQFLDSLKQKLSAKASRLKRYLKCTARKTQNKQFSNNEKKFYRNLSSNCTPTSSNNNLPPSPEALREFWANIWENQIEHNRDAKWINNIMTNNPVMDYEFLPIETFRLVLMRAKNWSAPGTDNIHNYWYKKFTRAHSYLHEHLNEFIKTPSTIPSFIMHGITYMLPKGIDKQDPASYRPITCLQTIYKLLSACVTKVIYNHLVTYNILTEQQKGCRQNSQGCKEQLTIDGVVMNQAIKQKRNIHTMFIDYQKAFDSVPHSWLLQILHLYKIHPLIITFLETTMKHWKTTLKLTSESTNIVTEPINIRRGIFQGDALSPLWFCLALNPLSVLLNKSNCGYYFKDVSYNISHLMYMDDIKLYASDQEQLYYLVDITQQYSNDICMQFGINKCKIFSMEKGTIINNSYTLENGKNIESIDETNTYKYLGFNQRKQIHHKETKTYLTKKFKYRLNIILKSFLNSRNTIKAINTFSVSILTYSFGIIKWTQTELKNLQRIINTHATKHRKHHPKSCIQRMTLPRKEGGKGLIDVVNLHNKQITTLRNYFFRKSQQSELHKFVNQADTNLTPLNLANKDIQTNEKLMDHSQKIATWAEKSLHGKHRTDLCQAHVDRDKSNEWLRRGELFPETESFMMAIQDQVIATRNYCKFIIQDPKVTSDVCRICNSSPETIQHITGACKTLANTDYKHRHDQVASIIHQHLAFKYNFLKTKVPYYKYKPEIILEDNSYKIYWDRTIITDKTIHFNRPDITLYDKLKKSVYLIDIAIPNTHNVLTTISDKLTKYQDLAIEIKTQWRAEKIHIVPIVLSSTGVVPKSLSISLETLHIPLHIIHTLQKATILNTCRITRKSVTTSVISSTHLF

SEQ ID NO: 19495 - protein, 1323 aa, Apodemia hypoglauca
MRTIGDGELSRRASIEEHATADTNHTHLSPSPSVSSKNLFSSPLTSPYSFEQEINSTNSDDVVQEAFETTPVPTSDKKRARKRWSQDMNMFIWRTYLIITNMETNTRGYLDRLHQKFTENYPHMQVTKQRIGDQRRAIINKKLLPKNILQHIESEVSLYINHNQPNTESPLTQSSTGRMRWSNDLNEAILRCYYEVTELETNMTAYRKKLRHKFLELYPNLEYISEQRLSDQRRVIISNNMITSERIDIIKEEVNLKLKQDNRIHSSPPEINYTQKSTQELEIFDETILNLEKEIQPSEISLFQHEATITETNINPFQEKISTHFNEALEKFKDTDPTLRPHIPQQKPSRKLAAIVHFIDTNILPRHMTFEQNFLSFQTIIYAAAYTAAICNGARIEFFNISRNKDTYKPAWQRRLETHIAKLRHNIGHLTQYMRGNKNRKIVATVEEIKTKYQLHATNENLNTELEHFLDSLKQKLSAKASRLKRYLKCTLRKTQNKQFWKNEKKFYRQLLSDHTLASVDNSIGPSPERLREFWANIWENQVEHNREAEWMKDITSNNPDMDYEQLPIDTFKLVLMRAHNWKTPGTDNIHNYWYKKFTQAQPYLHEHLNEFIKTPSTIPPYVMHGITYMLPKDTDRQNPAKYRPITCLQTIYKLLSACVSELIYNHLSKHHILTEQQKGCRKNSQGCKEQLTIDAIVMNQAHKHKRNIHTMFIDYQKAFDSVPHSWLLQILYTYKIHPLIIKFLETSMQHWKTTLKLTLGSINIVTDPISIRRGIFQGDALSPLWFCLALNPLSVLLDKSTCGYNFKDSSYNLSHLMYMDDIKLYASDKEQLFILADITQKYSNDICMQFGINKCKIFSMEKGSILNSNYTLETGENIVSIDETNLYKYLGFNQRTQIHHKDIKTELTKKYKYRLNIILKSYLNSRNTTKAINTFSISILTYSFGIIKWTQTEIKNLQRIINTHTTKHRKHHPKSCIQRLTLPRKEAGRGLIDLVNLHNKQITTLREYFHRKSDQSELHKCVVQADFNLTPLNLANRNTQTNEKQTDLSQKIASWADKTLHGRHRTDLCQPHVDKDKSNEWLRRGELFPETEGFMIAIQDQVIGTRNYCKFIIKDPTVTSDTCRHCHASPETIQHITGACKSLANTDYKHRHDQVASIIHQHLAFKYKFINKNSPYYKYKPETVLEDNNYKIYWDRTIITDKTIHYNRPDITVCDKQNKVVYLIDIAIPNTHNILSTISDKLTKYQDLAIEIKTQWKAEKIHIVPIVLSSTGIVPKNLLISLETLNIPLHIIHTLQKATILNTCRITRKFLTTSLVSSSHLI

SEQ ID NO: 19496 - protein, 1232 aa, Nymphidium onaeum
MGSENKQVHMAHVSLTKMQTNSRGYLHSLHQQFTPKFPQMNASKQRIGDQRRAIINKKLLPQTTLDEIEVEVSSKHQNQFRVNSSNTQLLTGRMHWSDDMNESIIRCYYEVTEMETNMTAYRKKLRQKFIQLYPNLEHLSEQRLSDQRRVILNNKMVSDEKITSLKAEIELQFKSRHLQYENSSQTINHPESQTLDNFVETDACISINYLMDMNNAPKNTILDLNEEIQHKINKQFNEAIIKFKNVDPTSRPYIPKQKTSKKFANIVSFINNNVIPEHLQLDQDFMCFQNIIYSAAYTAAVCNGARIGTETPRKSYKPSWQTRLEKDINKLRAYIGRLTQFIQGIRSRKVLQAVEEIKLKYQVHAQHEDNNTDPHHFLDSLKQKLNTKASRLKRYLKCTARKQQNKTFMSNEKKFYRNISSNRTLTNTDNTDAPTPEALREFWANIWENPIEHNKAARWITETNSRNPEMDFEEIPIHIFLQVIKRAQNWKAPGTDNLHNYWYKKFTHAHIYLHEHLNTFIKSPHKIPIYLLQGLTYMLPKDTDTANPSKYRPITCLQTIYKLLTACISDLIYAHLDEHNIMTEQQKGCRKNSQGCKEQLVIDGVIMNQAAKGKQNIHTMFIDYQKAFDSVPHSWLLEVLNHYKIHPTIVNFLKISMQNWITTLKLTSTNLTTEPIRIRRGIFQGDALSPLWFCLAINPLSQLMNISNLGYEIKHQNSSYHLSHLMYMDDIKIFATDEVQLHKLADITQRFSADVRMNFGIDKCKILSIEKGIIKSADYILECGNKIESMNENSAYKYLGFYQSRLIHHKEVKSELTKKFKHRLNLIFKSHLNSKNTTKAINTFAIPILTYSFGIIKWSQSDIKNMQRILHTHASKQRKHHPKACVQRMTLSRDEGGRGFIDIVNLHNKQITTLRNYFYMKGELSNLHKHIIDTDHKFTPLNLYDRQVQINETQIEPKQKVAIWAGKTIHGRHRSDLCQNYVDKEKSNKWLKSGELFPETEGFMLAIQDQVIATKNYCKYIIKDPKASNDLCRHCHSASETIQHVTGACKSLANNDYKHRHDQVAAIIHQHLALKYNFKQKMVPYYKYKPDTVLEDNSYKLYWDRTIITDKTIHYNRPDITLHDKINKTVFLIDIAIPNTHNIMSTTSDKLSKYQDLAIEIKTQWNADKIHIVPIVLSSTGIIPKSLSQSLNILDIPVSIFKTLQKATILNTCRITRKFLSSSLITSTQITT

SEQ ID NO: 19497 - protein, 1161 aa, Apodemia mormo
MNQNLLNTPPIQSSKGRMHWSNDLNETLLRCYYEVTELETNMTTYRKTLRQRFLEIYPNLKHLSEQRLSDQKRVILKNNMVSEEIVNFIKKEVALKLKQERQFHMQSQNDVSQITLQESLITAEATQILEVEPEISCTNLRNQEVSIIETSTSGSSSLSPFHYKLQIKFNDALEMFKDTDPTSRPYIPRQKTSRKLAAIVHFIDTNILPNHLTFDQNFSSFQTIIYTAAYTAAICNGAKIEAINVRRNKEIFKPTWQRRLETEIKKLRHDIGHLTQYLQGNRNTKVIATVKRIKAKYQTHSRHENLNIKLEEFLDSLKQKLSAKANRLRRFTICTVRKRQNQQFLNNEKKFYRHLISNNAPSFDTQKTPSPERLKEFWANIWENQVEHNQEAQWVNEIIPNNPEMEYECLPIDTFRQVLMRLHNWKAPGTDNIHNFWYKKFTQAHPYLHEHLNDFIKNPNIIPPYVMHGLTYMLPKNTDTQNPANYRPITCLQTIYKLLSACVSELIYKHLDKHDILAEQQKGCRKSSQGCKEQLTIDGVVMNQAFKQKRNIYTMFIDYQKAFDSVPHSWLLQVLHNYKISPIIINFLKTSMQHWKTTLKLTLGSKNIITESISIKRGIFQGDALSPLWFCLALNPLSVLLNKTNLGYNFTDTLCTLSHLMYMDDIKLYASNKNQLSYLADITQKYSNDICMQFGINKCKTLSIEKGKITTYNYTLESGEYIEAMDATSIYKYLGFNQGRQINHKEVKKDLTIKFKQRLIAILKSYLNSRNTVKAINTFSISILTYSFGIIKWTQSEIKNLQRVINTYATKHRIHHPKSCLQRLTLPRKEAGRGLIDITNLHNRQISTLRSYFHDKSWHSELHKYITQADEKLTPLNLANRDLQTNEKLTDISQKIATWAGKSLHGRHQADLCQPYVDKDKSNEWLRRGELFPETEGFIIAIQDQVINTRNYCKFIIKDPQVISDTCRHCHSSSETIQHITGACKTIANTDYKHRHDQVASIIHQHLAFEHKFIEKKIPYYKYKPDIILEDNNYRIYWDRTITTDKTIHYNRPDITLHDKTNKTVYLIDIAIPNTHNILTTISEKLSKYQDLAIEIKTQWKAKTVHIVPIILSSTGIIPKSLPKSLETLHIPSYIIHTLQKATILNTCRITRKFLSTSIIA

SEQ ID NO: 19498 - protein, 1042 aa, Apodemia zela
MQESQITGGTTQISEQESEISYIEPRNQDVVITENNNFNCLHDKLKTQFNDAFEMFKGTDPTSRPYIPRQKSSRKLAAIVHFLDTNILPNRLTFDQNFLSFQTIIYTAAYTAAVCNGARVDSNYARKNKETFKPAWQRRLETEIDKLRHDIGHLTQYIQGNRNTKVIATVKGIKTKYQTHAPHENINTKLEDFLDSLKQKLCAKACRLRRYIKCTARKRQNQQFSNNEQKFYRHLISNNAPTNSDSYETPSPERLREFWANIWENQVTHNQEAQWMNEITPNNPEMEYEYLPIDTFSQVLMRLHNWKAPGTDNIHNFWYKKFTRAHPYLHEHLNDFIKTPSTIPPYIMHGLTYMLPKDTDTQNPAKYRPITCLQTIYKLLSACVSELIYKHLDKQDVLAEQQKGCRKNSQGCKEQLTIDGVVMNQAFKQKRNIHTMFIDYQKAFDSVPHSWLLQVLHIYKIHPIIINFLETSMQHWKTTLKLTLGSRNIVTEPISIKRGIFQGDALSPLWFCLALNPLSVLLNKTILGYNFTDSSYTLTHLMYMDDIKLYASNENQLSYLADITQEFSNDICMQFGINKCKTLSVEKGKITNNNYTLENGESIEAMDANSMYKYLGFNQGRQINHKETKIDLTTKFKHRLNIILKSYLNARNTVKAINTFSISILTYSFGIIKWSQSDIKNLQRVVSAYATKHRKHHPKSCLQRLTLPRKEAGRGLIDIKNLHNRQISTLRSYFYNKSWHSELHKHVTQADEKLTPLNLADRELQTNEKLTDKSQKIATWAEKSLHGRHRADLCQPHVDIDKSNEWLRRGELFPETEGFMIAIQDQVINTRNYCKFIIKDPKVTSDICRRCHSSSETIQHITGACKTLANTDYKHRHDQVASIIHQHLAFQYKFIKKNVPYYKYKPEIILEDNSYKIYWDRTIITDKTVHYNRPDITLHDKANKAVYLIDIAIPNTHNILTTISEKLSKYQDLAIEIKTQWRAEKIHIVPIILSSTGIVPKSLSKSLETLNIPSYIIHTLQKATILNTCRITRKFLTTSLIA

SEQ ID NO: 19499 - protein, 1349 aa, Apodemia mormo
MSTLKCYNLRPLPGGRRGTSGAGAGCLSMRTIGDGELNRRTHIEEYVTADNNHIHLSPSQSLSSKSHFSSPLSSSYSFDQAICSPKSRLSDVVVQEASAIIPTPTSGTNRARKRWSQDMNKFIWRTYLIITKMQTNTRGYLDSLHKQFSDKYPHMNASKQRIGDQRRAIVNKKLLPQNTLKEIENEVSLFINKNTNLLSTPSTQYLKGRMQWSKDLNETLLRCYYEATELETNMTGYRKTLRRLFLEKYPNLGHLSEQHLSDQRRVISNNNMVSEERVIIIKREVDRKLKQEQQVHLQSHNELSQISMQESQITEGTTQITEQELEISYIESRNVDDVITENNNCTALQHKLKIQFNDALKMFEGTDPTSRPYIPRQKSSRRLAAIISFLDTNILPNHLAFDQSFLSFQTIIYTAAYTAAVCNGARVEINKVRKNQEYFKPPWQRRLETEIKKLRHDIGHLTQYIQGNRNTKVIATVKRIKTTYPTHAPHENINSKLEDFLDSLKQRLSAKASRLRRYIKCTARKTQNQQFSNNEQKFYRNLISNNAPTNSDSHETPSPERLREFWANIWENQVKHNQEAQWMNEITSNNPEMEYEYLPIEVFSEVLMRLHNWKAPGTDNIHNFWYKKFTRSHPYLHEHLNDFIKTPNIIPPYVMHGLTYMLPKDTDTQNPAKYRPITCLQTIYKILSACISELIYKHLDKQNILAEQQKGCRKNSQGCKEQLTIDGVVMNQAFKQKRNIHTMFIDYQKAFDSVPHSWLLQVLRNYKIHPIIINFLETSMQHWKTTLKLTLGSRNIITEPISIKRGIFQGDALSPLWFCLALNPLSVLLNKTNLGYNFTGTSYTLSHLMYMDDIKLYASDKNQLTYLADITQKYSNDICMQFGINKCKTLSVEKGKIMSNNYTLENGKNIEAMDDNSIYKYLGFNQGRQIYHKETKKDLIIKFKHRLNIILKSYLNARNTIKAINTFSISILTYSFGIIKWSQSEIKNLQRVVNTYTTKHRKHHPKSCLQRLTLPRKEAGRGLIDITNLHNKQILTLRSYFFSKSWHSELHKHVTQADEKLSPLNLSNRELQANEKLIENSQKIATWAEKSLHGRHRADLCQPHVDKDKSNEWLRRGELFPETEGFMIAIQDQVINTRNYRKFIVKDPKVTSDICRRCHSSSETIQHITGACKTLANTDYKHRHNQVASIIHQHLAFQYKFIKKQDPYYKYKPEIILEDNNYRIYWDRTIITDKTIHYNRPDITLYDKENKTVYLIDIAIPNTHNILTTISEKLSKYQELAIEIKTQWKAEKIHIVPIILSCTGVIPKSLSESLETLHIPSNIIHTLQKATILNTCRLTRKFLTTSLII

SEQ ID NO: 19500 - protein, 1343 aa, Curetis bulis
METRSKTKLKGPLPGGDRRGTPGADAGCHSMQTVGDEELSRRAPVGNEPEFITADTNTTNLSSPISSNYSLFQSPSSSPHSYENPSTPESSSSISYNVAREAFANQTAPIYDTIHPSQIVNSVNSNDCEIPILRDYNNTQHRETPVRSVLRDMLPSTTLAGRNRQRMKWTHEINRELLRCYYIVTNCETDKTAYRPLLHKIFTETYPELTFLTEQRLADQIRVIHRNNRIPPTEREEIKKEIAQNRIEPEIPEEVTTPITQPIIRTQTHRDELHNTEDNDVQNSNINIPIEMQSNSLINTIADAIPINHFNDAQQTLHTNESLDNINNTQSNNNENQEQYNKLSETFQEMFTKYHHTDPSTRPSIPRPKSGGKLYVIIEKINTILKNILTEIAEPTLEDIQTLTYVAAITTINNHNQSSIEKQGERQGRNRVNKPPWERRLENNIRDLRKEIGQITQYIFGNLSVKKRQKINPSNKPIEQLKEELDRKKQTLQAKSKRLKRYIKSKKRRQDNNKFISNQKLFYRQLDPQPDIKNTPDIEEITKYWSDIWENTVQHNTDATWIHEEENRINDVEQMSEIKVTMEDITEAIKKSQNWKAPGPDKIHNFWLKVFTAVHLPLVNIFNYIIRNPEQVPTFFTTGITYLKPKDDDTTNPSKYRPITCLPTLYKLLTSLISSKIYSHTKENKIIAEEQKGCRKGGRGCKELLVIDTELHGQVKVKHRNLFYAYIDYQKAFDSVPHSWLFHILKLYKIDPTIINFLEKISQTWRTNLNIKTKTQNIQSHPIHIKRGIFQGDSLSPLWFCLALSPLSQTLNNTKAGYLIKKQNDTKITHLLYMDDIKLFAATRSQLNYLLHITERFSTDIQMNFGINKCKINSIIKGKHVDQEPYTLSDNTNNILGLGFNDTYKYLGFHQSSEIDHTRIKDELKKKYSQRLHAILKTELSARNKTKAINTYAVPVLTYSFGIIKWSDTDLERLNTLTRTTCNKYLTHHTHSAIERFTLKRKDGGRGFIDIKNLHYTQLINLKKYFQHRSTNSPLYEAVCTLSTSSTPLKLHLPNLDFTKKIIKDEEKINNWKKKALHGKFPHQLSQNYVDQQSSNTWLVKGNIYGETEGFLIAIQDQIIKTRNYAKYILKENIETDRCRLCHQSSETIDHITGGCNTLAKKEYTLRHDNVGKQIHQQLALKYKLIDNYTPYYKYRPSNVLDNDQAKLYWDREIVTDRTTVNNRPDITLTIKSTKTTYLIDISVPNTHNLQQKHTEKIQKYIQLADEVKQMWHQDTVRIIPIIMSSVGVVPKTLHTALKVLQLQDNIYIPMQKSIVIDTCSIVRRFLNPSTLPLHIETEQEQN

SEQ ID NO: 19501 - protein, 1190 aa, Curetis bulis
MLPATTLAGRSRKRMKWTDQINRELLRCYYIVTNCETDNTAYRPLLHKTFTEIYPELASLTEQRLADQIRVIHRNNRIPQSEREEIKKEIQQTHYVTEEFTALTPQTSRTQIDTNPQINNSNSTELDCSNNIVMPITIQTDNLININPDTLSMTHLDDRGQNSHSEEVPESTSLPYSNDSEYQQEYKKIFEIFQEMYIKYNNTDPILRPFIPKPKTGNKLRLTIDKINTILKNKLSETAEPMLEDIQTLLYISAITATTYHNQAPKEVQSEGRIGKTNKAAWERRLENNIKQLRKEIGQLTQYIKGNLTQKKMKKLNPENKTTEQLKEDLDRKKQTLQAKAKRLRRYIKSKQKRQDNTLFTNNQKLFYRKLDAQPDIKNPPAIEEITQYWRNIWENTEAHNKDALWIDEEETRLNRIDHMPEIKITLDDLSEAVRKTHNWKAPGPDKIHNFWIKVFTAAHLPLVNIYNYLIKNPERVPSFFTTGITYLKPKDDDTTNPSKYRPITCLPTLYKLLTSLITNKIYTHTKQNKIIAEEQKGCCKGGRGCKELLVIDTEIHAQVKVKHRNLYYAYIDYQKAFDSVPHSWLFHILNLYKIDPAVIKFLKKISCNWKTNLNIRTTTHNIRSPYIHIKRGIFQGDSLSPLWFCLALSPLSQILNNTKAGYQLNKQNNIKITHLLYMDDIKLFAATRPQLNTLLNITERFSTDIRMNFGIDKCKINSIIKGKHIDQEPYALNDNTNNIQGLGAHDTYKYLGFHQSSEINHTMIKNELKNKYIQRLHTILKTQLSARNKTKAINTYAVPVLTYSFGIVKWSDTDLERLNTTTRTACNKHLIHHTHSALERFTLKRNDGGREFTDIKNLHYSQLINLKKYFQIRSTNSPLHEAVCTMTTSGTPLKLNIHNLDFTKNIITDEQKINNWKKKALHGKFPHHLSQSHVDHKSSNTWLVKGNIYGETEGFLIAIQDQIIKTRNYAKYILKESIPDDKCRLCHQCTENIDHITGGCNTLAKKEYTQRHDNAAKHIHQQLALKYKLIDNYTPYYKYKPESVLDNEHAKLYWDREIVTDRTTTNNRPDITLTIKSSKTTYLIDISVPNTNNLQQKHTEKIQKYIPLADEVKQMWHQDSVRIIPIIISSIGVVPKALHTALKILQLQESLYIPIQKSIILDTCSIVRRFLNPSTLPLHIEPDHHQIEL

SEQ ID NO: 19502 - protein, 1329 aa, Curetis bulis
METRSKSKLRGPLPGGDRRGTPGADAGCHSLRTVGDEELSRRAPVGRESENTTADIIIPTPSSPTSSSYSLFQSPSSSLHSFENPSTSDSSSLISYDVAQPALATGCSPTHDTMYLTHDSIPNNNLIDRVSPILRNSTNIYTHIATTARSVLQEMLPTTTLAGKNRTRMKWTDQINRELLRCYYIVTNCESDLTSYRSLLHKKFITVYPELSVLSEQRLADQIRVIHRNNRISLIAREEIKKQVSQTNLSIEAMHQDISQQHVTAQDILLHNTLHISPCTTPIIPDTNTEITQSNRNNYSSDHIQLNISPTTVPNSNIYDEEYDNIYDTFQEFYTKYSDVDADARPIIPKLNLTGQYKKTIDKVNTVLHNMISDISNPTLEKIQTLAYVAAVTTVKIHNPPSNRPQQTPQQYKSNKPAWERRLENNIKDIRKEIGQLTQLLNGNLNERKRKKLNRSNKTEQELRDELDKMKQKLQAKAKRLKRYIKSKQRRQDNKNFNINQKLFYRKLNTQQFIKTPPQIEHITEFWSSIWENSVEYNDNAKWIEEETVRAADVQPMMEIDITIDDLLQAVKKTHNWKAPGPDKLHNFWLKVFTAIHRPLVTIFNFLLKNPTQIPKFMTTGITYLQPKDNDTTNPSKYRPITCLPTLYKLLTSILTNKIYTHTNQNRLIAEEQKGCYKGGRGCKELLVIDTELHNQVKVKHRNLHYAYIDYQKAFDSIPHSWLLKVLEIYKIDPTLVNFLKTTMLSWKTTLKIRTDTLNLQSRPIQIKRGIFQGDSLSPLWFCLALSPLSQILNNSKSGYLIHKQNNVKLSHLLYMDDIKLFAASRAQLNQLLKLTEQFSTDIQMNFGIDKCKINSIVKGKHMDQEPYPLNNIIDKTQIDSLNINESYKYLGFYQSHEINHTKVKEELKNKYLQRLKTILKTELSAKNKTKAINTYAIPTLTYSFGIVKWSDTDLDRLNTLTRTSCNKHLIHHIHSAVERFTLKRKNGGRGFLDIKNLHYTQVINLRNYFYIRNADSSLHKAICLMTTSGTPLKLNDTTLNFENKIIKDEEKLENWKKKTIHGRYPQFLEQNHIDKESSHSWLTKGNIYAETESSLIAIQDQIIKTRNYARYILKETIPTDKCRLCNLQTETIDHITGGCSVLAKKEYTDRHNNVAKQIHQQLALKYKLIETHTPYYKYKPANVLDSINAKLYWDRDIITDRTTNHNRPDITLTIKSTKTTFLIDISVPNTSNLQQKHTEKIHKYIQLADEVKQMWHQDTVRIIPIILSSTGVIPKSLHTAINILQLNKSTYVSLQKSIVLDTCSIVRRFFNPSTLPLHEVQENSQDVP

SEQ ID NO: 19503 - protein, 1118 aa, Emesis fatimella
MERHMTYGKTYDSWKDRRGQWPSKPCPGKFKAKSPKKKNTPGTVREGGRKICPPVENNNDLGDKTELKCPSCGKTYKRRAWYNKHLKTHGGVEARQSSVSTSAITADRVNPHISQGEPLSENYQESIDIRTRLSIPSLKNSTWKVHDQNLAILLEHPGSNQDLNSQVDTLQDTVYTYFCERYPPPTYYAHKTKENTFKLKMRRKKRELIKQLRKAKAMGDNHLSHQLSRALRSILKLIQGISLQITNDRDKFNRAKHEVDFDKNPFQYSKNIFNTHGGKLFLTNEQIYDHFKSTYEVPKRGRPYEDPNIKKPNDPLSNFQSSPPTLEEISTQIKKKPSKSAPGPDGIPYVVYKKCPSIRKHLLNIFGKIWSRKQIPTAFGKAVFVLIPKKVEVTHPKDTRPIALTNTMSKIFFSILQTKMTQFMLNNRYFRPNHQKGFLPGISGCLEHNTLLAESLKDARAHERQITVCWIDLENAFGSVQHELMIFALKWYNFPDVVIDIITSYYSILKFTIAANKEHSKPLQYNVGLFQGCCLSPIIFNIVINILIDKLISHEKQWGYRFKLNNKYTESILAFADDLAILTRNPKQCQKILNEIDEFCTWTDGLRAKPSKCQSLCLGRRNTKYTSYDPELSIRGQKVTTVAEGVPFKFLGRKIDYKGRTPSLETVVENFLNDLNKVDEQPLSNIKKVWIYDNYLTSHLTWPFLVYDISKTLLNKLDANVIKMLKLWLGLAHPADPSTLFRDHNNFGMKLKKPSELYKHLRVTKMHILGKSQDESLTSLPKAKCAMELESRLQFHKQFMAGAQANRAGLGSRKAREDRDIIKSFLHQDENDNYKVHAMNLEMQSEWLTIGEFCIPLALKWRTLLHDWSPALLKFYLNAFQMTLPDQSNLVRWGKASEKSCYTCGEAIGTARHLLVGCKVLLDRGHYSRRHDRVLQIIREAVSLSVARAQKGLTTNRREIRFVKAGSSVHTKSNKPFSILGPAPDWIILMDTYEKHYKIPEDVGVSSSRPDIFLFTRKNKHTILIELTVPWETNIPKDHAIKTNKYYDLINVLTKNDYTVNLYAVEVGARGIPAKSLYNLLKDLGLSRTAVSSILERVSKAALAGSYEIWLGREGKPE

SEQ ID NO: 19504 - protein, 699 aa, Heliconius aoede
MTQFMLNNRYFRPNHQKGFLPGISGCLEHSTLLAESLKDARAHERQITVCWIDLENAFGSVQHELMIFALKWYNFPDVVIDIITSYYSILKFTIAANKEHSKPLQYNVGLFQGCCLSPIIFNIVINILIDKLISHEKQWGYRFKINNKYTESILAFADDLAILTRNPKQCQKLLNEIDEFCTWTDGLRAKPSKCQSLCLGRRNTKYTSYDPELSIRGQKVTTVAEGVPFKFLGRKIDYKGRTPSLEIVVENFLNDLNKVDEQPLSNIKKVWIYDNYLTSRLTWPFLVYDIGKTLLTKLDANVIKILKLWLGLAHPADPSTLFRDHNSFGMKLKKPSELYKHLRVTKMHVLGKSQDEALRSLPKAKCAMELESRLQFHKQFMADAQANRAGLGSRKTREDRDTIKSFLQQDENDSYKVHAMNLEMQSEWLTIGEFCIPLALKWRTLLHDWSPALLKFYLNAFQMTLPDQSNLVRWGKASEKSCYTCGEAIGTARHLLVGCKVLLDRGHYSRRHDRVLQIIREAVSLSVARAQKGLTTNRREIRFVKAGSSVHSKSSKPFSILGSAPDWIILMDTYEKHYKIPEDVGVSSSRPDIFLFTRKNKHIILIELTVPWETNIPKDHTIKTNKYYDLINVLTKNDYSVNLYAVEVGARGIPAKSLYNLLKDLGLSRTAVSSTLERVSKAALAGSYEIWLGRGGKPE

SEQ ID NO: 19505 - protein, 920 aa, Junonia grisea
MKMRRKKRELIKQLRKAKAMGDNHLSHQLSRALRSILKLIQGISLQIINDRDKFNRAKHEVDFDKNPFQYSKNIFNTHGGKLFLTNEQIYDHFKSTYEVPKRGRPYEDPNIKKPNDPLSNFQSSPPTLEEINKQIKKKPSKSAPGPDGIPYVVYKKCPSIRKHLLNIFGKIWSRKQIPTAFGKAIFILIPKKVEVTHPKDTRPIALTNTISKIFFSIIQTKMMQFMLNNRYFRPNHQKGFLPGISGCLEHNTLLAESLKDARAHERQITICWIDLENAFGSVQHELMIFALKWYNFPDVVIDIITSYYSILKFTIAANKEHSKPLQYNVGLFQGCCLSPIIFNIVINILIDKLISHEKKWGYRFKINNKYTESILAFADDLAILTRNPRQCQKLLNEIDEFCTWTDGLRAKPSKCQSLCLGRRNTKYTSYDPELSIRGQKVTTVAEGVPFKFLGRKIDYKGRTPSLETVVENFLNDLHKVDEQPLSNIKKVWIYDNYLTSRLTWPFLVYDIGKTLLTKLDANVIKILKLWLGLAHPADPSTLFRDHNSFGMKLKKPSELYKHLRVTKMHVLGKSQDDALTSLPKAKSAIELESRLQFHKQFMAGAQADRVGLGSRKTREDRDIIKSFLQQDENDNYKVHAMNLEMQNEWLTIGEFCIPLALKWRTLLHDWSPALLKFYLNAFQMTLPDQSNLVRWGKASEKSCYTCGEAIGTARHLLVGCKVLLDRGHYSRRHDRVLQIIREAVSLSVARAQKGLTINRREIRFVKAGSSVHSKSNKPFSILGPAPDWIILMDTYEKHYKIPEDVGVSSSRPDIFLFSRKNKHIILIELTVPWETNIPKDHTIKSNKYYDLINVLTKNNYTVNLYAVEVGARGIPAKSLYNLLKDLGLSRTAVSSTLERVSKAALTGSYEIWLGRGSKPE

SEQ ID NO: 19506 - protein, 897 aa, Spilarctia lutea
MSRALRSILKLIQGISLQITKNRDNFNRAKHEVDFDKNPFQYSKNIFNEQKGKLLLTNQQIYDHFKSTYQVPKRGRRYEDPNVQKPHYPLVDFESCPPTLEEVDHQIKKKTSKSAPGPDGIPYIVYKKCPSVRKHLLNVFCKIWSKKQIPTSFGKAIFVLIPKKDEVIHPKDKTRPIALTNIISKIFFSVLQTKMTKFMISNRYFRPNHQKGFLPGISGCLEHNSLLAESLKDARMHERQITVCWIDLENAFGSVQHELMIFALKWYNFPTVVIDIITSYYSKLQFTIAANKEHTEPLHYNVGLFQGCCLSPIAFNIIINILIDKLISHEKKWGYRFKINNKYTESILAFADDLAILTRNPKQCQKLLIEVDEFCTWTDGLRAKPSKCHCLCLGRRNTKYTSYDPGLSIGGQCVTTIAEAVPFKFLGRKIDYKGRTPSLEITVENFLNDLNKVDQQPLNNIKKVWIYDNYLTSRLTWSFLVYDIGKSLLAKLDANVKKILKLWLGIAHSADPSTLFRDQNNFGMKLKKPSELYKHLRVTKMHVLGQSQDEIVSSLPKDKYVTELESRLQFHKQFMAGAQFNRVGLGFAKKKGDREIIKSFIQQDENDIYKVHAMNLEMQNEWLTIGEFCIPLALKWRTLLYDWSPALLKFYLNAFQMTLPDQSNLVRWGKASEKSCYTCGEAVGTARHLLVGCRVLLDRGYYSRRHDRVLEIIREAVSLSVARAQKGLTTNKREINFIKDGSTTKSKSKPFSILGTAPDWTILMDTYDKHYKIPEDVGVSSSRPDIFLFSRQIKHIILVELTVPWETNIPKDHRIKLNKYYNLTTELNKNGYVVNLYAVEVGARGIPAKSLYNLLKDLGLSRSAVSSILERVSKAALTGSYQIWLGRAGNSSSEGER

SEQ ID NO: 19507 - protein, 922 aa, Spilarctia lutea
MRRKKRELIKQLRKAKAMGDNHLSHQLSRALRSILKLIQGISLQITKNRDNFNRAKHEVDFDKNPFQYSKNIFKEQKGKLLLTNQQIYDHFKSTYQVPKRGRRYEDPNVQKPHYPLVDFESCPPTLEEVDHQIKKKTSKSAPGPDGIPYIVYKKCPSVRKHLLNVFCKIWSKKQIPTSFGKAIFVLIPKKDEVIHPKDTRPIALTNTISKIFFSVLQTKMTKFMISNRYFRPNHQKGFLPGISGCLEHNTLLAESLKDARMHERQITVCWIDLENAFGSVQHELMIFALKWYNFPTVVIDIITSYYSKLQFTIAANKEHTEPLHYNVGLFQGCCLSPIAFNIIINILIDKLISHEKKWGYRFKINNKYTESILAFADDLAILTRNPKQCQKLLIEVDEFCTWTDGLRAKPSKCHCLCLGRRNTKYTSYDPGLSIGGQCVTTIAEAVPFKFLGRKIDYKGRTPSLEITVENFLNDLNKVDQQPLNNIKKVWIYDNYLTSRLTWSFLVYDIGKSLLAKLDANVKKILKLWLGIAHSADPSTLFRDQNNFGMKLKKPSELYKHLRVTKMHVLGQSQDEIVSSLPKDKYVTELESRLQFHKQFMAGAQFNRVGLGFAKKKGDREIIKSFIQQDENDIYKVHAMNLEMQSEWLTIGEFCIPLALKWRTLLYDWSPALLKFYLNAFQMTLPDQSNLVRWGKASEKSCYTCGEAVGTARHLLVGCRVLLDRGYYSRRHDRVLEIIREAVSLSVARAQKGLTTNKREINFIKDGSTTKSKSKPFSILGTAPDWTILMDTYDKHYKIPEDVGVSSSRPDIFLFSRQIKHIILVELTVPWETNIPKDHRIKLNKYYDLTTELNKNGYVVNLYAVEVGARGIPAKSLYNLLKDLGLSRSAVSSILERVSKAALTGSYQIWLGRAGNSSSEGER

SEQ ID NO: 19508 - protein, 922 aa, Spilarctia lutea
MRRKKRELIKQLRKAKAMGDNHLSHQLSRALRSILKLIQGISLQITKNRDNFNRAKHEVDFDKNPFQYSKNIFNEQKGKLLLTNQQIYDHFKSTYQVPKRGRRYEDPNIQKPHYPLVNFESCPPTLEEVDHQIKKKTSKSAPGPDGIPYIVYKKCPSVRKHLLNVFCKIWSKKQIPTSFGKAVFVLIPKKDEVTHPKDTRPIALTNTISKIFFSVLQTKMTQFMISNRYFRPNHQKGFLPGISGCLEHNTLLAESLKDARMHERQITVCWIDLENAFGSVQHELMIFALKWYNFPTVVINIITSYYSQLQFAIAADKEHTETLHYNVGLFQGCCLSPIAFNIIINILIDKLISHEKKWGYRFKINNKYTESILAFADDLAILTRNPKQCQKLLIEVDEFCTWTDGLRAKPSKCHCLCLGRRNTKYTSYDPGLSIGGQCVTTIAEAVPFKFLGRKIDYKGRTPSLEVTVENFLSDLNKVDQQPLNNIKKVWIYDNYLTSRLTWPFLVYDISKSLLVKLDANVKKILKSWLGIAHSADPSTLFRDQNSFGMKLKKPSELYKHLRVTKMHVLGQSQDEIVSSLPKDKYVTELESRLQFHKQFMAGAQFNKVGLGFAKRKGDREIIKSFIQQDENDKYKVHAMNLEMQSEWLTIGEFCIPLALKWRTLLYDWSPALLKFYLNAFQMTLPDQSNLVRWGKASEKSYYTCGEAVGTARHLLVGCRVLLDRDYYSRRHDRVLEIIREAVSLSVARAQKGLTTNKRGINFIKDGSTTKSKSKPFSILGTAPDWTILMDTYDKHYKIPEDVGVSSSRPDIFLFSRQIKHIILVELTVPWETNIPKDHRIKLNKYYDLTTELNKNGYVVNLYAVEVGARGIPAKSLYNLLKDLGLSRSAVSSILERVSKAALTGSYQIWLGRAGNSSSEGDR

SEQ ID NO: 19509 - protein, 922 aa, Spilarctia lutea
MRRKKRELIKQLRKAKAMGDNHLSHQLSRALRSILKLIQGISLQITKNRDNFNRAKHEVDFDKNPFQYSKNIFNEQKGKLLLTNQQIYDHFKSTYQVPKRGRRYEDPNIQKPHYPLVNFESCPPTLEEVDHQIKKKTSKSAPGPDGIPYIVYKKCPSVRKHLLNVFCKIWSKKQIPTSFGEAVFVLIPKKDEVTHPKDTRPIALTNTISKIFFSVLQTKMTKFMISNRYFRPNHQKGFLPGISGCLEHNTLLAESLKDARMHERQITVCWIDLENAFGSVQHELMIFALKWYNFPTVVIDIITSYYSQLQFAIAADKEHTETLHYNVGLFQGCCLSPIAFNIIINILIDKLISHEKKWGYRFKINNKYTESILAFADDLAILTRNPKQCQKLLIEVDEFCTWTDGLRAKPSKCHCLCLSRRNTKYTSYDPGLSIGGQCVTTIAEAVPFKFLGRKIDYKGRTPSLEVTVENFLSDLNKVDQQPLNNIKIVWIYDNYLTSRLTWPFLVYDIGKSLLAKLDANVKKILKSWLGIAHSADPSTLFRDQNSFGMKLKKPSELYKHLRVTKMHVLGQSQDEIVSSLPKDKYVTELESRLQFHKQFMAGAQFNKVGLGFAKRKGDREIIKSYIQQDENDKYKVHAMNLEMQSEWLTIGEFCIPLALKWRTLLYDWSPALLKFYLNAFQMTLPDQSNLVRWGKASEKSCYTCGEAVGTARHLLVGCRVLLDRGYYSRRHDRVLEIIREAVSLSVARAQKGLTTNKREINFIKDGSTTKSKSKPFSILGTAPDWTILMDTYDKHYKIPEDVGVSSSRPDIFIFSRQIKHIILVEFTVPWETNIPKDHRIKLNKYYDLTTELNKNGYVVNLYAVEVGARGIPAKSLYNLLKDLGLSRSAVSSILERVSKAALTGSYQIWLGRAGNSSSEGDR

SEQ ID NO: 19510 - protein, 922 aa, Spilarctia lutea
MRRKKRELIKQLRKAKAMGDNHLSHQLSRALRSILKLIQGISLQITKNRDNFNRAKHEVDFDKNPFQYSKNIFNEQKGKLLLTNQQIYDHFKSTYQVPKRGRRYEDPNIQKPHYPLVNFESCPPTLEEVDHQIKKKTSKSAPGPDGIPYIVYKKCPSVRKHLLNVFCKIWSKKQIPTSFGKAVFVLIPKKDEVTHPKDTRPIALTNTISKIFFSVLQTKMTQFMISNRYFRPNHQKGFLPGISGCLEHNTLLAESLKDARMHERQITVCWIDLENAFGSVQHELMIFALKWYNFPTVVIDIITSYYSQLQFAIAADKEHTETLHYNVGLFQGCCLSPIAFNIIINILIDKLISHEKKWGYRFKINNKYTESILAFADDLAILTRNPKQCQKLLIEVDEFCTWTDGLRAKPSKCHCLCLGRRNTKYTSYDPGLSIGGQCVTTIAEAVPFKFLGRKIDYKGRPPSLEVTVENFLSDLNKVDQQPLNNIKKVWIYDNYLTSRLTWPFLVYDISKSLLVKLDANVKKILKSWLGIAHSADPSTLFRDQNSFGMKLKKPSELYKHLRVTKMHVLGQSQDEIVSSLPKDKYVTELESRLQFHKQFMAGAQFNKVGLGFAKRKGDREIIKSFIQQDENDKYKVHAMNLEMQSEWLTIGEFCIPLALKWRTLLYDWSPALLKFYLNAFQMTLPDQSNLVRWGKASEKSCYTCGEAVGTARHLLVGCRVLLDRGYYSRRHDRVLEIIREAVSLSVARAQKGLTTNKREINFIKDGSTTKSKSKPFSILGTAPDWTILMDTYDKHYKIPEDVGVSSSRPDIFLFSRQIKHIILVELTVPWETNIPKDHRIKLNKYYDLTTELNKNGYVVNLYAVEVGARGIPAKSLYNLLKDLGLSRSAVSSILERVSKAALTGSYQIWLGRAGNSSSEGDR

SEQ ID NO: 19511 - protein, 922 aa, Spilarctia lutea
MRRKKRELIKQLRKAKAMGDNHLSHQLSRALRSILKLIQGISLQITKNRDNFNRAKHEVDFDKNPFQYSKNIFNEQKGKLLLTNQQIYDHFKSTYQVPKRGRRYEDPNVQKPHYPLVDFESCPPTLEEVDHQIKKKTSKSAPGPDGIPYIVYKKCPSVRKHLLNVFCKIWSKKQIPTSFGKAIFVLIPKKDEVIHPKDTRPIALTNTISKIFFSVLQTKMTKFMISNRYFRPNHQKGFLPGISGCLEHNTLLAESLKDARMHERQITVCWIDLENAFGSVQHELMIFALKWYNFSTVVIDIITSYYSKLQFTIAANKEHTEPLHYNVGLFQGCCLSPIAFNIIINILIDKLISHEKKWGYRFKINNKYTESILAFADDLAILTRNPKQCQKLLIEVDEFCTWTDGLRAKPSKCHCLCLGRRNTKYTSYDPGLSIGGQCVTTIAEAVPFKFLGRKIDYKGRTPSLEITVENFLNDLNKVDQQPLNNIKKVWIYDNYLTSRLTWSFLVYDIGKSLLAKLDANVKKILKLWLGIAHSADPSTLFRDQNNFGMKLKKPSELYKHLRVTKMHVLGQSQDEIVSSLPKDKYVTELESRLQFHKQFMAGAQFNRVGLGFAKKKGDREIIKSFIQQDENDIYKVHAMNLEMQSEWLTIGEFCIPLALKWRTLLYDWSPALLKFYLNAFQMTLPDQSNLVRWGKASEKSCYTCGEAVGTARHLLVGCRVLLDRGYYSRRHDRVLEIIREAVSLSVARAQKGLTTNKREINFIKDGSTTKSKSKPFSILGTAPDWTILMDTYDKHYKIPEDVGVSSSRPDIFLFSRQIKHIILVELTVPWETNIPKDHRIKLNKYYDLTTEPNKNGYVVNLYAVEVGARGIPAKSLYNLLKDLGLSRYAVSSILERVSKAALTGSYQIWLGRAGNSSSEGER

SEQ ID NO: 19512 - protein, 1095 aa, Spilarctia lutea
MYLFRSSGISYVYIYTVREGGRKICPPIDRNDDPGDNTELKCPKCGKTYKRRAWYLKHLKTHDKVEARQPSVSTSINTADRVNPHTSQGEPSCENHQESIAIRTRLSIPSLKNSTWKVHDENLAILLEHPGSKQDLNSQVETFQDTIYTYFCERYPPPNFHAQKDKENTFKSKMRRKKRELIKQLRKAKAMGDNHLSHQLSRALRSILKLIQGISLQITKNRDNFNRAKHEVDFDKNPFQYSKNVFNEQKGKLLLTNQQIYDHFKSTYQVPKRGRRYEDPNIQKPHYLLVNFESCPPTLEEVDHQIKKKTSKSAPGPDGIPYIVYKKCPSVRKHLLNVFCKIWSKKQIPTSFGEAVFVLIPKKDEVTHPKDTRPIALTNTISKIFFSVLQTKMTKFMISNRYFRPNHQKGFLPGISGCLEHNTLLAESLKDARMHERQSTVCWIDLENAFGSVQHELMIFALKWYNFPTVVIDIITSYYSQLQFAIAADKEHTETLHYNVGLFQGCCLSPIAFNIIINILIDKLISHEKKWGYRFKINNKYTESILAFADDLAILTRNPKQCQKLLIEVDEFCTWTDGLRAKPSKCHCLCLGRRNTKYTSYDPGLSIGGQCVTTIAEAVPFKFLGRKIDYKGRTPSLEVTAENFLSDLNRVDQQPLNNIKKVWIYDNYLTSRLTWPFLVYDIGKSLLAKLDANVKKILKSWLGIAHSADPSTLFRDQNSFGMKLKKPSELYKHLRVTKMHVLGQSQDEIVSSLPKDKYVTELESRLQFHKQFIAGAQFNQVGLGFAKRKGDREIIKSFIQQDENDKYKVHAMNLEMQSEWLTIGEFCIPLALKWRTLLYDWSPALLKFYLNAFQMTLPDQSNLVRWGKASEKSCYTCGEAVGTARHLLVGCRVLLDRGYYSRRHDRVLEIIREAVSLSVARAQKGLTTNKREINFIKDGSTTKSKSKPFSILGTAPDWTILMDTYDKHYKIPEDVGVSSSRPDIFLFSRQIKHIILVELTVPWETNIPKDHRIKLNKYYALTTGLNKNGYVVNLYAVEVGARGIPAKSLYNLLKDLGLSRSAVSSILERVSKAALTGSYQIWLGRAGNSSSEGDR

SEQ ID NO: 19513 - protein, 922 aa, Spilarctia lutea
MRRKKRELIKQLRKAKAMGDNHLSHQLSRALRSIVKLIQGISLQITKNRDNFNRAKHEVDFDKNPFQYSKNIFNEQKGKLLLTNQQIYDHFKSTYQVPKRGRRYEDPNIQKPHYPLVNFESCPPTLEEVDHQIKKKTSKSAPGPDGIPYIVYKKCPSVRKHLLNVFCKIWSKKQIPTSFGKAVFVLIPKKDEVTHPKDTRPIALTNTISKIFFSVLQTKMTKFLISNRYFRPNHQKGFLPGISGCLEHNTLLAESLKDARMHERQITVCWIDLENAFGSVQHELMIFALKWYNFPTVVIDIITSYYSQLQFAIAADKEHTETLHYNVGLFQGCCLSPIAFNIIINILIDKLISHEKKWGYRFKINNKYTESILAFADDLAILTRNPKQCQKLLIEVDEFCTWTDGLRAKPSKCHCLCLGRRNTKYTSYDPGLSIGGQCVTTIAEAVPFKFLGRKIDYKGRTPSLEVTVENFLSDLNKVDQQPLNNIKKVWIYDNYLTSRLTWPFLVYDIGKSLLAKLDANVKKILKSWLGIAHSADPSTLFRDQNSFGMKLKKPSELYKHLRVTKMHVLGQSQDEIVSSLPKDKYVTELESRLQFQKQFMAGAQFDKVGLGFAKRKGDREIIKSFIQQDENDKYKVHAMNLEMQSEWLTIGEFCIPLALKWRTLLYDWSPALLKFYLNAFQMTLPDQSNLVRWGKASEKSCYTCGAAVGTARHLLVGCRVLLDRGYYSRRHDRVLEIIREAVSLSVARAQKGLTTNKREINFIKDGSTTKSKSKPFSILGTAPDWTILMDTYDKHYKIPEDVGVSSSRPDIFLFSRQIKHIILVELTVPWETNIPKDHRIKLNKYYDLTTELNKNGYVVNLYAVEVGARGIPAKSLYNLLKDLGLSRSAVSSILERVSKAALTGSYQIWLGRAGNSSSEGDR

SEQ ID NO: 19514 - protein, 922 aa, Spilarctia lutea
MRRKKRELIKQLRKAKAMGDNHLSHQLSRALRSILKLIQGISLQITKNRDNFNRAKHEVDFDKNPFQYSKNIFKEQKGKLLLTNQQIYDHFKSTYQVPKRGRRYEDPNVQKPHYPLVDFESCPPTLEEVDHQIKKKTSKSAPGPDGIPYIVYKKCPSVRKHLLNVFCKIWSKKQIPTSFGKAIFVLIPKKDEVIHPKDTRPIALTNTISKIFFSVLQTKMTKFMISNRYFRPNHQKGFLPGISGCLEHNTLLAESLKDARMHERQITVCWIDLENAFGSVQHELMIFALKWYNFPTVVIDIITSYYSKLQFTIAANKEHTEPLHYNVGLFQGCCLSPIAFNIIINILIDKLISHEKKWGYRFKINNKYTESILAFADDLAILTRNPKQCQKLLIEVDEFCTWTDGLRAKPSKCHCLCLGRRNTKYTSYDPGLSIGGQCVTTIAEAVPFKFLGRKIDYKGRTPSLEITVENFLNDLNKVDQQPLNNIKKVWIYDNYLTSRLTWSFLVYDIGKSLLAKLDANVKKILKLWLGIAHSADPSTLFRDQNNFGMKLKKPSELYKHLRVTKMHVLGQSQDEIVSSLPKDKYVTELESRLQFHKQFMAGAQFNRVGLGFAKKKGDREIIKSFIQQDENDIYKVHAMNLEMQSEWLTIGEFCIPLALKWRTLLYDWSPALLKFYLNAFQMTLPDQSNLVRWGKASEKSCYTCGEAVGTARHLLVGCRVLLDRGYYSRRHDRVLEIIREAVSLSVARAQKGLTTNKREINFIKDGSTTKSKSKPFSILGTAPDWTILMDTYDKHYKIPEDVGVSSSRPDIFLFSRQIKHIILVELTVPWETNIPKDHRIKLNKYYDLTTELNKNGYVVNLYAVEVGARGIPAKSLYNLLKDLGLSRSAVSSILERVSKAALTGSYQIWLGRAGNSNSEGER

SEQ ID NO: 19515 - protein, 922 aa, Spilarctia lutea
MRRKKRELIKQLRKAKAMGDNHLSHQLSRALRSILKLIQGISLQITKNRDNFNRAKHEVDFDKNPFQYSKNIFNEQKGKLLLTNQQIYDHFKSTYQVPKRGRRYEDPNVQKPHYPLVDFESCPPTLEEVDHQIKKKTSKSAPGPDGIPYIVYKKCPSVRKHLLNVFCKIWSKKQIPTSFGKAIFVLIPKKDEVIHPKDTRPIALTNTISKIFFSVLQTKMTKFMISNRYFRPNHQKGFLPGISGCLEHNSLLAESLKDARMHERQITVCWIDLENAFGSVQHELMIFALKWYNFPTVVIDIITSYYSKLQFTIAANKEHTEPLHYNVGLFQGCCLSPIAFNIIINILIDKLISHEKKWGYRFKINNKYTESILAFADDLAILTRNPKQCQKLLIEVDEFCTWTDGLRAKPSKCHCLCLGRRNTKYTSYDPGLSIGGQCVTTIAEAVPFKFLGRKIDYKGRTPSLEITVENFLNDLNKVDQQPLNNIKKVWIYDNYLTSRLTWSFLVYDIGKSLLAKLDANVKKILKLWLGIAHSADPSTLFRDQNNFGMKLKKPSELYKHLRVTKMHVLGQSQDEIVSSLPKDKYVTELESRLQFHKQFMAGAQFNRVGLGFAKKKGDREIIKSFIQQDENDIYKVHAMNLEMQNEWLTIGEFCIPLALKWRTLLYDWSPALLKFYLNAFQMTLPDQSNLVRWGKASEKSCYTCGEAVGTARHLLVGCRVLLDRGYYSRRHDRVLEIIREAVSLSVARAQKGLTTNKREINFIKDGSTTKSKSKPFSILGTAPDWTILMDTYDKHYKIPEDVGVSSSRPDIFLFSRQIKHIILVELTVPWETNIPKDHRIKLNKYYDLTTELNKNGYVVNLYAVEVGARGIPAKSLYNLLKDLGLSRSAVSSILERVSKAALTGSYQIWLGRAGNSSSEGER

SEQ ID NO: 19516 - protein, 922 aa, Spilarctia lutea
MRRKKRELIKQLRKAKAMGDNHLSHQLSRALRSILKLIQGISLQITKNRDNFNRAKHEVDFDKNPFQYSKNIFNEQKGKLLLTNQQIYDHFKSTYQVPKRGRRYEDPNVQKPHCPLVDFESCPPTLEEVDHQIKKKTSKSAPGPDGIPYIVYKKCPSVRKHLLNVFCKIWSKKQIPTSFGKAIFVLIPKKDEVIHPKDTRPIALTNTISKIFFSVLQTKMTKFMISNRYFRPNHQKGFLPGISGCLEHNTLLAESLKDARMHERQITVCWIDLENAFGSVQHELMIFALKWYNFPTVVIDIITSYYSKLQFTIAANKEHTEPLHYNVGLFQGCCLSPIAFNIIINILIDKLISHEKKWGYRFKINNKYTESILAFADDLAILTRNPKQCQKLLIEVDEFCTWTDGLRAKPSKCHCLCLGRRNTKYTSYDPGLSIGGQCVTTIAEAVPFKFLGRKIDYKGRTPSLEITVENFLNDLNKVDQQPLNNIKKVWIYDNYLTSRLTWSFLVYDIGKSLLAKLDANVKKILKLWLGIAHSADPSTLFRDQNNFGMKLKKPSELYKHLRVTKMHVLGQSQDEIVSSLPKDKYVTELESRLQFHKQFMAGAQFNRVGLGFAKKKGDREIIKSFIQQDENDNYKVHAMNLEMQSEWLNIGEFCIPLALKWRTLLYDWSPALLKFYLNAFQMTLPDQSNLVRWGKASEKSCYTCGEAVGTARHLLVGCRVLLDRGYYSRRHDRVLEIIREAVSLSVARAQKGLTTNKREINFIKDGSTTKSKSKPFSILGTAPDWTILMDTYDKHYEIPEDVGVSSSRPDIFLFSRQIKHIILVELTVPWETNIPKDHRIKLNKYYDLTTELNKNGYVVNLYAVEVGARGIPAKSLYNLLKDLGLSRSAVSSILERVSKAALTGSYQIWLGRAGNSSSEGER

SEQ ID NO: 19517 - protein, 922 aa, Spilarctia lutea
MRRKKRELIKQLRKAKAMGDNHLSHQLSRALRSILKLIQGISLQITKNRDNFNRAKHEVDFDKNPFQYSKNIFNEQKGKLLLTNQQIYDHFKSTYQVPKRGRRYEDPNIQKPHYPLVNFESCPPTLEEVDHQIKKKTSKSAPGPDGIPYIVYKKCPSVRKHLLNVFCKIWSKKQIPTSFGKAVFVLIPKKDEVTHPKDTRPIALTNTISKIFFSVLQTKMTKFMISNRYFRPNHQKGFLPGISGCLEHNTLLAESLKDARMHERQITVCWIDLENAFGSVQHELMIFALKWYNFPTVIIDIITSYYSQLQFAIAADKEHTETLHYNVGLFQGCCLSPIAFNIIINILIDKLISHEKKWGYRFKINNKYTESILAFADDLAILTRNPKQCQKLLIEVDEFCTWTDGLRAKPSKCHCLCLGRRNTKYTSYDPGLSIGGQCVTTIAEAVPFKFLGRKIDYKGRTPSLEVTVENFLSDLNKVDQQPLNNIKKVWIYDNYLTSRLTWPFLVYDIGKSLLAKLDANVKKILKSWLGIAHSADPSTLFRDQNSFGMKLKKPSELYKHLRVTKMHVLGQSQDEIVSSLPKDKYVTELESRLQFHKQFMAGAQFNKVGLGFAKRKGDREIIKSFIQQDENDKYKVHAMNLEMQSEWLTIGEFCIPLALKWRTLLYDWSPALLKFYLNAFQMTLPDQSNLVRWGKASEKSCYTCGEAVGTARHLLVGCRVLLDRGYYSRRHDRVLEIIREAVSLSVARAQKGLTTNKREINFIKDGSTTKSKSKPFSILGTAPDWTILMDTYDKHYKIPEDVGVSPSRPDIFLFSRQIKHIILVELTVPWETNIPKDHRIKLNKYYDLTTELNKNGYVVNLYAVEVGARGIPAKSLYNLLKDLGLSRSAVSSILERVSKAALTGSYQIWLGRAGNSSSEGDR

SEQ ID NO: 19518 - protein, 922 aa, Spilarctia lutea
MRRKKRELIKQLRKAKAMGDNHLSHQLSRALRSILKLIQGISLQITKNRDNFNRAKHEVDFDKNPFQYSKNIFNEQKGKLLLTNQQIYDHFKSTYQVPKRGRRYEDPNVQKPHYPLVDFESCPPTLEEVDHKIKKKTSKSAPGPDGIPYIVYKKCPSVRKHLLNVFCKIWSKKQIPTSFGKAIFVLIPKKDEVIHPKDTRPIALTYTISKIFFSVLQTKMTKFMISNRYFRPNHQKGFLPGISGCLEHNTLLAKSMKDARMHERQITVCWIDLENAFGSVQHELMIFALKWYNFPTVVIDIITSYYSKLQFTIAANKEHTEPLHYNVGLFQGCCLSPIAFNIIINILIDKLISHEKKWGYRFKINNKYTESILAFADDLAILTRNPKQCQKLLIEVDEFCTWTDGLRAKPSKCHCLCLGRRNTKYTSYDPGLSIGGQCVTTIAEAVPFKFLGRKIDYKGRTPSLEITVENFLNDLNKVDQQPLNNIKKVWIYDNYLTSRLTWYFLVYDIGKSLLAKLGANVKKILKLWLGIAHSADPSTLFRDQNNFGMKLKKPSELYKHLRVTKMHVLGQSQDEIVSSLPKDKYVTELESRLQFHKQFMAGAQFNRVGLGFAKKKGDREIIKSFIQQDENDIYKVHAMNLEMQSEWLTIGEFCIPLALKWRTLLYDWSPALLKFYLNAFQMTLPDQSNLVRWGKASEKSCYTCGEAVGTARHLLVGCRVLLDRGYYSRRHDRVLEIIREAVSLSVARAQKGLTTNKREINFIKDGSTTKSKSKPFSILGTAPDWTILMDTYDKPYKIPEDVGVSSSRPDIFLFSRQIKHIILVELTVPWETNIPRDHRIKLNKYYDLTTELNKNGYVVNLYAVEVGARGIPAKSLYNLLKDLGLSRSAVSSILERVSKAALTVSYQIWLGRAGNSSSEGER

SEQ ID NO: 19519 - protein, 922 aa, Spilarctia lutea
MRRKKRELIKQLRKAKAMGDNHLSHQLSRALRSILKLIQGISLQITKNRDNFNRAKHEVDFDKNPFQYSKNIFNEQKGKLLLTNQQIYDHFKSTYQVPKRGRRYEDPNVQKPHYPLVDFESCPPTLEEVDHQIKKKTSKSAPGPDGIPYIVYKKCPSVRKHLLNVFCKIWSKKQIPTSFGKAIFVLIPKKDEVIHPKDTRPIALTNTISKIFFSVLQTKMTKFMISNRYFRPNHQKGFLPGISGCLEHNTLLAESLKDARMHERQITVCWIDLENAFGSVQHELMIFALKWYNFPTVVIDIITSYYSKLQFTIAANKEHTEPLHYNVGLFQGCCLSPIAFNIIINILIDKLISHEKKWGYRFKINNKYTESILAFADDLAILTRNPKQCQKLLIEVDEFCTWTDGLRAKPSKCHCLCLGRRNTKYTSYDPGLSIGGQCVTTIAEAVPFKFLGRKIDYKGRTPSLEITVENFLNDLNKVDQQPLNNIKKVWIYDNYLTSRLTWSFLVYDIGKSLLAKLDANVKKILKLWLGIAHSADPSTLFRDQNNFGMKLKKPSELYKHLRVTKMHVLGQSQDEIVSSLPKDKYVTELESRLQFHKQFMAGAQFNRVGLGFAKKKGDREIIKSFIQQDENDIYKVHAMNLEMQSEWLTIGEFCIPLALKWRTLLYDWSPALLKFYLNAFQMTLPDQSNLVRWGKASEKSCYTCGEAVGTARHLLVGCRVLLDRGYYSRRHDRVLEIIREAVSLSVARAQKGLTTNKREINFIKDGSTTKSKSKPFSILGTAPDWTILMDTYDKHYKIPEDVGVSSSRPDIFLFSRQIKHIILVELTVPWETNIPKDHRIKLNKYYDLTTELNKNGYVVNLYAVEVGARGIPAKSLYNLLKDLGLSRSAVSSILERVSKAALTGSYQIWLGRAGNSSSEGER

SEQ ID NO: 19520 - protein, 922 aa, Spilarctia lutea
MRRKKRELIKQLRKAKAMGDNHLSHQLSRALRSILKLIQGISLQITKNRDNFNRAKHEVDFDKNPFQYSKNIFKEQKGKLFLTNQQIYDHFKSTYQVPKRGRRYEDPNVQKPHYPLVDFESCPPTLEEVDHQIKKKTSKSAPGPDGIPYIVYKKCPSVRKHLLNVFCKIWSKKQIPTSFGKAIFVLIPKKDEVIHPKDTRPIALTNTISKIFFSVLQTKMTKFMISNRYFRPNHQKGFLPGISGCLEHNTLLAESLKDARMHERQITVCWIDLENAFGSVQHELMIFALKWYNFPTVVIDIITSYYSKLQFTIAANKEHTEPLHYNVGLFQGCCLSPIAFNIIINIVIDKLISHEKKWGYRFKINNKYTESILAFADDLAILTRNPKQCQKLLIEVDEFCTWTDGLRAKPSKCHCLCLGRRNTKYTSYDPGLSIGGQCVTTIAEAVPFKFLGRKIDYKGRTPSLEITVENFLNDLNKVDQQPLNNIKKVWIYDNYLTSRLTWSFLVYDIGKSLLAKLDANVKKILKLWLGIAHSADPSTLFRDQNNFGMKLKKPSELYKHLRVTKMHVLGQSQDEIVSSLPKDKYVTELESRLQFHKQFMAGAQFNRVGLGFAKKKGDREIIKSFIQQDENDIYKVHAMNLEMQSEWLTIGEFCIPLALKWRTLLYDWSPALLKFYLNAFQMTLPDQSNLVRWGKASEKSCYTCGEAVGTARHLLVGCRVLLDRGYYSRRHDRVLEIIREAVSLSVARAQKGLTTNKREINFIKDGSTTKSKSKPFSILGTAPDWTILMDTYDKHYKIPEDVGVSSSRPDIFLFSRRIKHIILVELTVPWETNIPKDHRIKLNKYYDLTTELNKNGYVVNLYAVEVGARGIPAKSLYNLLKDLGLSRSAVSSILERVSKAALTGSYQIWLGRAGNSSSEGER

SEQ ID NO: 19521 - protein, 922 aa, Spilarctia lutea
MRRKKRELIKQLRKAKAMGDNHLSHQLSRALRSILKLIQGISLQITKNRDNFNRAKHEVDFDKNPFQYSKNIFNEHKGKLLLTNQQIYDHFKSTYQVPKRGRRYEDPNVQKPHYPLVDFESCPPTLEEVDHQIKKKTSKSAPGPDGIPYIVYKKCPSVRKHLLNVFCKIWSKKQIPTSFGKAIFVLIPKKDEVIHPKDTRPIALTNTISKIFFSVLQKKMTKFMISNRYFRSNHQKGFLPGISGCLEHNTLLAESLKDARMHERQITVCWIDLENAFGSVQHELMIFALKWYNFPTVVIDIITSYYSKLQFTIAANKEHTEPLHYNVGLFQGCCLSPIALNIIINILIDKLISHEKKWGYRFKIDNKYTETILAFADDLAILTRNPKQCQKLLIEVDEFCTWTDGLRAKPSKCHCLCLGRRNTKYTSYDPGLSIGGQCVTTIAEAVPFKFLGRKIDYKGRTPSLEITVENFLNDLNKVDQQPLNNIKKVWIYDNYLTSRLTWSFLVYDIGKSLLAKLDANVKKILKLWLGIAHSADPSTLFRDQNNFGMKLKKPSELYKHLRVTKMHVLGQSQDEIVSSLPKDKYVTELESRLQFHKQFMAGAQFNRVGLGFAKKKGDREIIKSFIQQDENDIYKVHAMNLEMQSEWLTIGEFCIPLALKWRTLLYDWSPALLKFYLNAFQMTLPDQSNLVRWGKASEKSCYTCGEAVGTARHLLVGCRVLLDRGYYSRRHDRVLEIIREAVSLSVARAQKGLTTNKREINFIKDGSTTKSKSKPFSILGTAPDWTILMDTYDKHYKIPEDVGVSSSRPDIFLFSRQIKHIILVELTVPWETNIPKDHRIKLNKYYDLTTELNKNGYVVNLYAVEVGARGIPAKSLYNLLKDLGLSRSAVSSILERVSKAALTGSYQIWLGRAGNSSSEGER

SEQ ID NO: 19522 - protein, 922 aa, Spilarctia lutea
MRRKKRELIKQLRKAKAMGDNHLSHQLSRALRSILKLIQGISLQITKNRDNFNRAKHEVDFDKNPFQYSKNIFNEQKGKLLLTNQQIYDHFKSTYQVPKRGRRYEDPNVQKPHYPLVDFESCPPTLEEVDHQIKKKTSKSAPGPDGIPYIVYKKCPSVRKHLLNVFCKIWSKKQIPTSFGKAIFVLIPKKDEVIHPKDTRPIALTNTISKIFFSVLQTKMTKFMISNRYFRPNHQKGFLPGISGCLEHNTLLAESLKDARMHERQITVCWIDLENAFGSVQHELMIFALKWYNFPTVVIDIITSYYSKLQFTIAANKEHTEPLHYNVGLFQGCCLSPIAFNIIINILIDKLISHEKKWGYRFKINNKYTESILAFADDLAILTRNPKQCQKLLIEVDEFCTWTDGLRAKPSKCHCLCLGRRNTKYTSYDPGLSIGGQCVTTIAEAVPFKFLGRKIDYKGRTPSLEITVENFLNDLNKVDQQPLNNIKKVWIYDNYLTSRLTWSFLVYDIGKSLLAKLDANVKKILKLWLGIAHSADPSTLFRDQNNFGMKLKKPSELYKHLRVTKMHVLGQSQDEIVSSLPKDKYVTELESRLQFHKQFMAGAQFNRVGLGFAKKKGDREIIKSFIQQDETDIYKVHAMNLEMQSEWLNIGEFCIPLALKWRTLLYDWSPALLKFYLNAFQMTLPDQSNLVRWGKASEKSCYTCGEAVGTARHLLVGCRVLLDRGYYSRRHDRVLEIIREAVSLSVARAQKGLTTNKREINFIKDGSATKSKSKPFSILGTAPDWTILMDTYDKHYEIPEDVGVSSSRPDIFLFSRQIKHIILVELTVPWETNIPKDHRIKLNKYYDLTTELNKNGYVVNLYAVEVGARGIPAKSLYNLLKDLGLSRSAVSSILERVSKAALTGSYQIWLGRAGNSSSEGER

SEQ ID NO: 19523 - protein, 922 aa, Spilarctia lutea
MRRKKRELIKQLRKAKAMGDNHLSHQLSRALRSILKLIQGISLQITKNRDNFNRAKHEVDFDKNPFQYSKNIFKEQKGKLLLTNQQIYDHFKSTYQVPKRGRRYEDPNVQKPHYPLVDFESCPPTLEEVDHQIKKKTSKSAPGPDGIPYIVYKKCPSVRKHLLNVFCKIWSKKQIPTSFGKAIFVLIPKKDEVIHPKDTRPIALTNTISKIFFSVLQTKMTKFMISNRYFRPNHQKGFLPGISGCLEHNTLLAESLKDARMHERQITVCWIDLENAFGSVQHELMIFALKWYNFPTVVIDIITSYYSKLQFTIAANKEHTEPLHYNVGLFQGCCLSPIAFNIIINILIDKLISHEKKWGYRFKINNKYTESILAFADDLAILTRNPKQCQKLLIEVDEFCTWTDGLRAKPSKCHCLCLGRRNTKYTSYDPGLSIGGQCVTTIAEAVPFKFLGRKIDYKGRTPSLEITVENFLNDLNKVDQQPLNNIKKVWIYDNYLTSRLTWSFLVYDIGKSLLAKLDANVKKILKLWLGIAHSADPSTLFRDQNNFGMKLKKPSELYKHLRVTKMHVLGQSQDEIVSSLPKDKYVTELESRLQFHKQFMAGAQFNRVGLGFAKKKGDREIIKSFIQQDENDIYKVHAMNLEMQSEWLTIGEFCIPLALKWRTLLYDWSPALLKFCLNAFQMTLPDQSNLVRWGKASEKSCYTCGEAVGTARHLLVGCRVLLDRGYYSRRHDRVLEIIREAVSLSVARAQKGLTTNKREINFIKDGSTTKSKSKPFSILGTAPDWTILMDTYDKHYKIPEDVGVSSSRPDIFLFSRQIKHIILVELTVPWETNIPKDHRIKLNKYYDLTTELNKNGYVVNLYAVEVGARGIPAKSLYNLLKDLGLSRSAVSSILERVSKAALTGSYQIWLGRAGNSSSEGER

SEQ ID NO: 19524 - protein, 845 aa, Spilarctia lutea
MRRKKRELIKQLRKAKAMGDNHLSHQLSRALRSILKLIQGISLQITKNRDNFNRAKHEVDFDKNPFQYSKNIFNEQKGKLLLTNQQIYDHFKSTYQVPKRGRRYEDPNIQKPHYPLVNFESCPPTLEEVDHQIKKKTSKSAPGPDGIPYIVYKKCPSVRKHLLNVFCKIWSKKQIPTSFGKAVFVLIPKKDEVTHPKDTRPIALTNTISKIFFSVLQTKMTKFMISNRYFRPNHQKGFLPGISGCLEHNTLLAESLKDARMHERQITVCWIDLENAFGSVQHELMIFALKWYNFPTVVIDIITSYYSQLQFAIAADKEHTETLHYNVGLFQGCCLSPIAFNITINILIDKLISHEKKWGYRFKINNKYTESILAFADDLAILTRNPKQCQKLLIEVDEFCTWTDGLRAKPSKCHCLCLGRRNTKYTSYDPGLSIGGQCVTTIAEAVPFKFLGRKIDYKGRTPSLEVTVENFLSDLNKVDQQPLNNIKKVWIYDNYLTSRLTWPFLVYDIGKSLLAKLDANVKKILKSWLGIAHSADPSTLFRDQNSFGMKLKKPSELYKHLRVTKMHVLGQSQDEIVSSLPKDKYVTELESRLQFHKQFMAGAQFNKVGLGFAKRKGDREIIKSFIQQDENDKYKVHAMNLEMQSEWLTIGEFCIPLALKWRTLLYDWSPALLKFYLNAFQMTLPDQSNLVRWGKASEKSCYTCGEAVGTARHLLVGCRVLLDRGYYSRRHDRVLEIIREAVSLSVARAQQGLTTNKREINFIKDGSTTKSKSKPFSILGTAPDWTILMDTYDKHYKIPEDVGVSSSRPDIFLFSRQIKHIILVELTVPWETNIPKDHRIKLNKY

SEQ ID NO: 19525 - protein, 703 aa, Spilarctia lutea
MTKFMISNRYFRPNHQKGFLPGISGCLEHNTLLAESLKDARMHERQITVCWIDLENAFGSVQHELMIFALKWYNFPTVVIDIITSYYSKLQFTIAANKEHTETLHYNVGLFQGCCLSPIAFNIIINILIDKLISHEKKWGYRFKINNKYTESILAFADDLAILTRNPKQCQKLLIEVDEFCTWTDGLRAKPSKCHCLCLGRRNTKYTSYDPGLSIGGQCVTTIAEAVPFKFLGRKIDYKGRTPSLEITVENFLNDLNKVDQQPLNNIKKVWIYDNYLTSRLTWSFLVYDIGKSLLAKLDANVKKILKLWLGIAHSADPSTLFRDQNNFGMKLKKPSELYKHLRVTKMHVLGQSQDEIVSSLPKDKYVTELESRLQFHKQFMAGAQFNRVGLGFAKKKGDREIIKSFIQQDENDIYKVHAMNLEMQSEWLTIGEFCIPLALKWRTLLYDWSPALLKFYLNAFQMTLPDQSNLVRWGKASEKSCYTCGEAVGTARHLLVGCRVLLDRGYYSRRHDRVLEIIREAVSLSVARAQKGLTTNKREINFIKDGSTTKSKSKPFSILGTAPDWTILMDTYDKHYKIPEDVGVSSSRPDIFLFSRQIKHIILVELTVPWETNIPKDHRIKLNKYYDLTTELNKNGYVVNLYAVEVGARGIPAKSLYNLLKDLGLSRSAVSSILERVSKAALTGSYQIWLGRAGNSSSEGER

SEQ ID NO: 19526 - protein, 922 aa, Spilarctia lutea
MRRKKRELIKQLRKAKAMGDNHLSHQLSRALRSILKLIQGISLQITKNRDNFNRAKHEVDFDKNPFQYSKTIFNEQKGKLLLTNQQIYDHFKSTYQVPKRGRRYEDPNVQKPHYPLVDFESCPPTLEEVDHQIKKKTSKSAPGPDGIPYIVYKKCPSVRKHLLNVFCKIWSKKQIPTSFGKAIFVLIPKKDEVIHPKDTRPIALTNTISKIFFSVLQTKMTKFMISNRYFRPNHQKGFLPGISGCLEHNTLLAESLKDARMHERQITVCWIDLENAFGSVQHELMIFALKWYNFPTVVIDIITSYYSKLQFTIAANKEHTEPLHYNVGLFQGCCLSPIAFNIIINILIDKLISHEKKWGYRFKINNKYTESILAFADDLAILTRNPKQCQKLLIEVDEFCTWTDGLRAKPSKCHCLCLGRRNTKYTSYDPGLSIGGQCVTTIAEAVPFKFLGRKIDYKGRTPSLEITVENFLNDLNKVDQQPLNNIKKVWIYDNYLTSRLTWSFLVYDIGKSLLAKLDANVKNILKLWLGIAHSADPSTLFRDQNNFGMKLKKPSELYKHLKVTKMHVLGQSQDEIVSSLPKDKYVTELESRLQFHKQFMAGAQFNRVGLGFAKKKGDREIIKSFIQQDENDIYKVHAMNLEMQSEWLTIGEFCIPLALKWRTLLYDWSPALLKFYLNAFQMTLPDQSNLVRWGKASEKSCYTCGEAVGTARHLLVGCRVLLDRGYYSRRHDRVLEIIREAVSLSVARAQKGLTTNKREINFIKDGSTTKSKSKPFSILGTAPDWTILMDTYDKHYKIPEDVGVSSSRPDIFLFSRQIKHIILVELTVPWETNIPKDHRIKLNKYYDLTTELNKNGYVVNLYAVEVGARGIPAKSLYNLLKDLGLSRSAVSSILERVSKAALTGSYQIWLGRAGNSSSEGER

SEQ ID NO: 19527 - protein, 922 aa, Spilarctia lutea
MRRKKRELIKQLRKAKAMGDNHLSHQLSRALRSILKLIQGISLQITKNRDNFNRAKHEVDFDKNPFQYSKNIFNEQKGKLLLTNQQIYDHFKSTYQVPKRGRRYEDPNVQKPHYPLVDFESCPPTLEEVDHQIKKKTSKSAPGPDGIPYIVYKKCPSVRKHLLNVFCKIWSKKQIPTSFGKAIFVLIPKKDEVIHPKDTRPIALTNTISKIFFSVLQTKMTKFMISNRYFRPNHQKGFLPGISGCLEHNTLLAESLKDARMHERQITVCWIDLENAFGSVQHELMIFALKWYNFPTVVIDIITSYYSKLQFTIAANKEHTEPLHYNVGLFQGCCLSPIAFNIIINILIDKLISHEKKWGYRFKINNKYTESILAFADDLAILTRNPKQCQKLLIEVDEFCTWTDGLRAKPSKCHCLCLGRRNTKYTSYDPGLSIGGQCVTTIAEAVPFKFLGRKIDYKGRTPSLEITVENFLNDLNKVDQQPLNNIKKVWIYDNYLTSRLTWSFLVYDIGKSLLAKLDANVKKILKLWLGIAHSADPSTLFRDQNNFGMKLKKPSELYKHLRVTKMHVLGQSQDEIVSSLPKDKYVTELESRLQFHKQFMAGAQFNRVGLGFAKKKGDREIIKSFIQQDENDIYKVHAMNLEMQSEWLTIGEFCIPLALKWRTLLYDWSPALLKFYLNAFQMTLPDQSNLVRWGKASEKSCYTCGEAVGTARHLLVGCRVLLDRGYYSRRHDRVLEIIREEVSLSVARAQKGLTTNKREINFIKDGSTTKSKSKPFSILGTAPDWTILMDTYDKHYKIPEDVGVSSSRPDIFLFSRQIKHIILVELTVPWETNIPKDHRIKLNKYYDLTTELNKNGYVVNLYAVEVGARGIPAKSLYNLLKDLGLSRSAVSSILERVSKAALTGSYQIWLGRAGNSSSEGER

SEQ ID NO: 19528 - protein, 922 aa, Spilarctia lutea
MRRKKRELIKQLRKAKAMGDNHLSHQLSRALRSILKLIQGISLQITKNRDNFNRAKHEVDFDKNPFQYSKNIFNEQKGKLLLTNQQIYDHFKSTYQVPKRGRRYEDPNIQKPHYPLVNFESCPPTLEEVDHQIKKKTSKSAPGPDGIPYIVYKTCPSVRKHLLNVFCKIWSKKQIPTSFGKAVFVLIPKKDEVTHPKDTRPIALTNTISKIFFSVLQTKMTKFMISNRYFRPNHQKGFLPGISGCLEHNTLLAESLKDARMHERQITVCWIDLENAFGSVQHELMIFALKWYNFPTVVIDIITSYYSQLQSAIAADKEHTETLHYNVGLFQGCCLSPIAFNIIINILIDKLISHEKKWGYRFKINNKYTESILAFADDLAILTRNPKQCQKLLIEVDEFCTWTDGLRAKPSKCHCLCLGRRNTKYTSYDPGLSIGGQCVTTIAEAVPFKFLGRKIDYKGRTPSLEVTVENFLSDLNKVDQQPLNNIKKVWIYDNYLTSRLTWPFLVYDISKSLLVKLDANVKKILKSWLGIAHSADPSTLFRDQNSFGMKLKKPSELYKHLRVNKMHVLGQSQDEIVSSLPKDKYVTELESRLQFHKQFMAGAQFNKVGLGFAKRKGDREIIKSFIQQDENDKYKVHAMNLEMQSEWLTIGEFCIPLALKWRTLLYDWSPALLKFYLNAFQMTLPDQSNLVRWGKASEKSCYTCGEAVGTARHLLVGCRVLLDRGYYSRRHDRVLEIIREAVSLSVARAQKGLTTNKREINFIKDGSTTKSKSKPFSILGTAPDWTILMDTYDKHYKIPEDVGVSSSRPDIFLFSRQIKHIILVELTVPWETNIPKDNRIKLNKYYDLTTELNKNGYVVNLYAVEVGARGIPAKSFYNLLKDLGLSRSAVSSILERVSKAALTGSYQIWLGRAGNSSSEGDR

SEQ ID NO: 19529 - protein, 922 aa, Spilarctia lutea
MRRKKRELIKQLRKAKAMGDNHLSHQLSRALRSILKLIQGISLQITKNRDNFNRAKHEVDFDKNPFQYSKNIFNEQKGKLLLTNQQIYDHFKSTYQVPKRGRRYEDPNVQKPHYPLVDFESCPPTLEEVDHQIKKKTSKSAPGPDGIPYIVYKKCPSVRKHLLNVFCKIWSKKQIPTSFGKAIFVLIPKKDEVIHPKDTRPIALTNTISIIFFSVLQTKMTKFMISNRYFRPNHQKGFLPGISGCLEHNTLLAESLKDARMHEKQIPVCWIDLENAFGSVQHELMIFALKWYNFPTVVIDIITSYYSKLQFTIAANKEHTEPLHYNVGLFQGCCLSPIAFNIIINILIDKLISHEKKWGYRFKINNKYTESILAFADDLAILTRNPKQCQKLLIEVDEFCTWTDGLRAKPSKCHCLCLGRRNTKYTSYDPGLSIGGQCVTTIAEAVPFKFLGRKIDYKGRTPSLEITVENFLNDLNKVDQQPLNNIKKVWIYDNYLTSRLTWPFLVYNIGKSLLAKLDANVKKILKLWLGIAHSADPSTLFRDQNNFGMKLKKPSELYKHLRVTKMHVLGQSQDEIVSSLPKDKYVTELESRLQFHKQFMAGAQFNRVGLGFAKKKGDREIIKSFIQQDENDIYRVHAMNLEMQSEWLTIGEFCIPLALKWRTLLYDWSPALLKFYLNAFQMTLPDQSNLVRWGKASEKSCYTCGEAVGTARHLLVGCRVLLDRGYYSRRHDRVLEIIREAVSLSVARAQKGLTTNKREINFIKDGSTTKSKSKPFSILGTAPDWTILMDTYDKHYKIPEDVGVSSSRPDIFLFSRQIKHIILVELTVPWETNIPKDHRIKLNKYYDLTTELNKNGYVVDLYAVEVGARGIPAKSLYNLLKDLGLSRSAVSSILERVSKAALTGSYQIWLGRAGNSSSEGER

SEQ ID NO: 19530 - protein, 922 aa, Spilarctia lutea
MRRKKRELIKQLRKAKAMGDNHLSHQLSRALRSILKLIQGISLQITKNRDNFNRAKHEVDFDKNPFQYSKNIFNEQKGKLLLTNQQIYDHFKSTYQVPKRGRRYEDPNIQKPHYPLVNFESCPPTLEEVDHQIKKKTSKSAPGPDGIPYIVYKKCPSVRKHLLNVFCKIWSKKQIPTSFGKAVFVLIPKKDEVTHPKDTRPIALTNTISKIFFSVLQTKMTKFMISNRYFRPNHQKGFLPGISGCLEHNTLLAESLKDARMHERQITVCWIDLENAFGSVQHELMIFALKWYNFPTVVIDIITSYYSQLQFAIAADKEHTETLHYNVGLFQGCCLSPIAFNIIINILIDKLISHEKKWGYRFKINNKYTESILAFADDLAILTRNPKQCQKLLIEVDEFCTWTDGLRAKPSKCHCLCLGRRNTKYTSYDPGLSIGGRCVTTIAEAVPFKFLGRKIDYKGRTPSLEVTVENFLSDLNKVDQQPLNNIKKVWIYDNYLTSRLTWPFLVYDIGKSLLAKLDANVKKILKSWLGIAHSADPSTLFRDQNSFGMKLKKPSELYKHLRVTKMHVLGQSQDEIVSSLPKDKYVTELESRLQFHKQFMAGAQFNKVGLGFAKRKGDREIIKSFIQQDENDKYKVHAMNLEMQSEWLTIGEFCIPLALKWRTLLYDWSPALLKFYLNAFQMTLPDQSNLVRWGKASEKSCYTCGEAVGTARHLLVGCRVLLDRGYYSRRHDRVLEIIREAVSLSVARAQKGLTTNKREINFIKDGSTTKSKSKPFSILGTAPDWTILMDTYDKHYKIPEDVGVSSSRPDIFLFSRQIKHIILVELTVPWETNIPKDHRIKLNKYYDLTTELNKNGYVVNLYAVEVGARGIPAKSLYNLLKDLGLSRSAVSSILERVSKAALTGSYQIWLGRAGNSSSEGDR

SEQ ID NO: 19531 - protein, 922 aa, Spilarctia lutea
MRRKKRELIKQLRKAKAMGDNHLSHQLSRALRSILKLIQGISLQITKNRDNFNRAKHEVDFDKNPFQYSKNIFNEQKGKLLLTNQQIYDHFKSTYQVPKRGRRYEDPNVQKPHCPLVDFESCPPTLEEVDHQIKKKTSKSAPGPDGIPYIVYKKCPSVRKHLLNVFCKIWSKKQIPTSFGKAIFVLIPKKDEVIHPKDTRPIALTNTISKIFFSVLQTKMTKFMISNRYFRPNHQKGFLPGISGCLEHNTLLAESLKDARMHERQITVCWIDLENAFGSVQHELMIFALKWYNFPTVVIDIITSYYSKLQFTIAANKEHTEPLHYNVGLFQGCCLSPIAFNIIINILIDKLISHEKKWGYRFKINNKYTESILAFADDLAILTRNPKQCQKLLIEVDEFCTWTDGLRAKPSKCHCLCLGRRNTKYTSYDPGLSIGGQCVTTIAEAVPFKFLGRKIDYKGRTPSLEITVENFLNDLNKVDQQPLNNIKKVWIYDNYLTSRLTWSFLVYDIGKSLLAKLDANVKKILKLWLGIAHSADPSTLFRDQNNFGMKLKKPSELYKHLRVTKMQVLGQSQDEIVSSLPKDKYVTELESRLQFHKQFMAGAQFNRVGLGFAKKKGDREIIKSFIQQDENDIYKVHAMNLEMQSEWLTIGEFCIPLALKWRTLLYDWSPALLKFYLNAFQMTLPDQSNLVRWGKASEKSCYTCGEAVGTARHLLVGCRVLLDRGYYSRRHDRVLEIIREAVSLSVARAQKGLTTNKREINFIKDGSTTKSKSKPFSILGTAPDWTILMDTYDKHYKIPEDVGVSSSRPDIFLFSRQIKHIILVELTVPWETNIPKDHRIKLNKYYDLTTELNKNGYVVNLYAVEVGARGIPAKSLYNLLKDLGLSRSAVSSILERVSKAALTGSYQIWLGRAGNSSSEGER

SEQ ID NO: 19532 - protein, 922 aa, Spilarctia lutea
MRRKKRELIKQLRKAKAMGDNHLSHQLSRALRSILKLIQGISLQITKNRDNFNRAKHEVDFDKNPFQYSKNIFNEQKGKLLLTNQQIYDHFKSTYQVPKRGRRYEDPNIQKPHYPLVNFESCPPTLEEVDHQIKKKTSKSAPGPDGIPYIVYKKCPSVRKHLLNVFCKIWSKKQIPTSFGKAVFVLIPKKDEVTHPKDTRPIALTNTISKIFFSVLQTKMTKFMISNRYFRPNHQKGFLPGISGCLEHNTLLAESLKDARMHERQITVCWIDLENAFGSVQHELMIFALKWYNFPTVVIDIITSYYSQLQFAIAADKEHTETLHYNVGLFQGCCLSPIAFNIIINILIDKLISHEKKWGYRFKINNKYTESILAFADDLAILTRNPKQCQKLLIEVDEFCTWTDGLRAKPSKCHCLCLGRRNTKYTSYDPGLSIGGQCVTTIAEAVPFKFLGRKIDYKGRTPSLEVTVENFLSDLNKVDQQPLNNIKKVWIYDNYLTSRLTWPFLVYDIGKSLLAKLDANVKKILKSWLGIAHSADPSTLFRDQNSFGMKLKKPSELYKHLRVTKMHVLGQSQDEIVSSLPKDKYVTELESRLQFHKQFMAGAQFNKVGLGFAKRKGDREIIKSFIQQDGNDKYKVHAMNLEMQSEWLTIGEFCIPLALKWRTLLYDWSPALLKFYLNAFQMTLPDQSNLVRWGKASEKSCYTCGEAVGTARHLLVGCRVLLDRGYYSRRHDRVLEIIREAVSLSVARAQKGLTTNKREINFIKDGSTTKSKSKPFSILGTAPDWTILMDTYDKHYKIPEDVGVSSSRPDIFLFSRQIKHIILVELTVPWETNIPKDHRIKLNKYYDLTTELNKNGYVVNLYAVEVGARGIPAKSLYNLLKDLGLSRSAVSCILERVSKAALTGSYQIWLGRAGNSSSEGDR

SEQ ID NO: 19533 - protein, 922 aa, Spilarctia lutea
MRRKKRELIKQLRKAKAMGDNHLSHQLSRALRSILKLIQGISLQITKNRDNFNRAKHEVDFDKNPFQYTKNIFNEQKGKLLLTNQQIYDHFKSTYQVPKRGRRYEDPNIQKPHYPLVNFESCPPTLEEVDHQIKKKTSKSAPGPDGIPYIVYKKCPSVRKHLLNVFCKIWSKKQIPTSFGKAVFVLIPKKDEVTHPKDTRPIALTNTISKIFFSVLQTKMTKFMISNRYFRPNHQKGFLPGISGCLEHNTLLAESLKDARMHERQITVCWIDLENAFGSVQHELMIFALKWYNFPTVVIDIITSYYSQLQFAIAADKEHTETLHYNVGLFQGCCLSPIAFNIIINILIDKLISHEKKWGYRFKINNKYTESILAFADDLAILTRNPKQCQKLLIEVDEFCTWTDGLRAKPSKCHCLCLGRQNTKYTSYDPGLSIGGQCVTTIAEAVPFKFLGRKIDYKGRTPSLEVTVENFLSDLNKVDQQPLNNIKKVWIYDNYLTSRLTWPFLVYDIGKSLLAKLDANVKKILKSWLGIAHSADPSTLFRDQNSFGMKLKKPSELYKHLRVTKMHVLGQSQDEIVSSLPKDKYVTELESRLQFHKQFMAGAQFNKVGLGFAKRKGDREIIKSFIQQDENDKYKVHAMNLEMQSEWLTIGEFCIPLALKWRTLLYDWSPALLKFYLNAFQMILPDQSNLVRWGKASEKSCYTCGEAVGTARHLLVGCRVLLDRGYYSRRHDRVLEIIREAVSLSVARAQKGLTTNKREINFIKDGSTTKSKSKPFSILGTAPDWTILMDTYDKHYKIPEDVGVSSSRPDIFLFSRQIKHIILVELTVPWETNIPKDHRIKLNKYYDLTTELNKNGYVVNLYAVEVGARGIPAKSLYNLLKDLGLSRSAVSSILERVSKAALTGSYQIWLGRAGNSSSEGDR

SEQ ID NO: 19534 - protein, 1098 aa, Spilarctia lutea
MLFLVIFIKSPKKSNTPGTVREGGRKICPPIDRNDDPGDNTELKCPKCGKTYKRRAWYLKHLKTHDKVEARQPSVSTSINTADRVNPHTSQGEPSCENHQESIAIRTRLSIPSLKNSTWKVHDENLAILLEHPGSKQDLNSQVETFQDTIYTYFCERYPPPNFYAQKDKENTFKSKMRRKKRELIKQLRKAKAMGDNHLSHQLSRALRSILKLIQGISLQITKNRDNFNRAKHEVDFDKNPFQYSKNIFNEQKGKLLLTNQQIYDHFKSTYQVPKRGRRYEDPNIQKPHYPLVNFESCPPTLEEVDHQIKKKTSKSAPGPDGIPYIVYKKCPSVRKHLLNVFCKIWSKKQIPTSFGKAVFVLIPKKDEVTHPKDTRPIALTNTISKIFFSVLQTKMTKFMISNRYFGPNHQKGFLPGISGCLEHNTLLAESLKDARMHERQITVCWIDLENAFGSVQHELMIFALKWYNFPTVVIDIITSYYSQLQFAIAADKEHTETLHYNVGLFQGCCLSPIAFNIIINILIDKLISHEKKWGYRFKINNKYTESILAFADDLAILTRNPKQCQKLLIEVDEFCTWTDGLRAKPSKCHCLCLGRRNTKYTSYDPGLSIGGQCVTTIAEAVPFKFLGRKIDYKGRTPSLEVTVENFLSDLNKVDQQPLNNIKKVWIYDNYLTSRLTWPFLVYDIGKSLLAKLDANAKKILKSWLGIAHSADPSTLFRDQNSFGMKLKKPSELYKHLRVTKMHVLGQSQDEIVSSLPKDKYVTELESRLQFHKQFMAGAQFNKVGLGFAKRKGDREIIKSFIQQDENDKYKVHAMNLEMQSEWLTIGEFCIPLALKWRTLLYDWSPALLKFYLNAFQMTLPDQSNLVRWGKASEKSCYTCGEAVGTARHLLVGCRVLLDRGYYSRRHDRVLEIIREAVSLSVARAQKGLTTNKREINFIKDGSTTKSKSKPFSILGTAPDWTILMDTYDKHYKIPEDVGVSSSRPDIFLFSRQIKHIILVELTVPWETNIPKDHRIKLNKYYDLTTELNKNGYVVNLYAVEVGARGIPAKSLYNLLKDLGLSRSAVSSILERVSKAALTGSYQIWLGRAGNSSSEGDR

SEQ ID NO: 19535 - protein, 922 aa, Spilarctia lutea
MRRKKRELIKQLRKAKAMGDNHLSHQLSRALRSILKLIQGISLQITKNRDNFNRAKHEVDFDKNPFQYSKNIFNEQKGKLLLTNQQIYDHFKSTYQVPKRGRRYEDPNVQKPHYPLVDFESCPPTLEEVDHQIKKKTSKSAPGPDGIPYIVYKKCPSVRKHLLNVFCKIWSKKQIPTSFGKAIFVLIPKKDEVIHPKDTRPIALTNTISKIFFSVLQTKMTKFMISNRYFRPNHQKGFLPGISGCLEHNSLLAESLKDARMHERQITVCWIDLENAFGSVQHELMIFALKWYNFPTVVIDIITSYYSILQFTIAANKEHTEPLHYNVGLFQGCCLSPIAFNIIINILIDNLISHEKKWGYRFKINNKYTESILAFADDLAILTRNPKQCQKLLIEVDEFCTWTDGLRAKPSKCHCLCLGRRNTKYTSYDPGLSIGGQCVTTIAEAVPFKFLGRKIDYKGRTPSLEITVENFLNDLNKVDQQPLNNIKKVWIYDNYLTSRLTWSFLVYDIGKSLLAKLDANVKKILKLWLGIAHSADPSTLFRDQNNFGMKLKKPSELYKHLRVTKMHVLGQSQDEIVSSLPKDKYVTELESRLQFHKQFMAGAQFNRVGLGFAKKKGDREIIKSFIQQDENDIYKVHAMNLEMQNEWLTIGEFCIPLALKWRTLLYDWSPALLKFYLNAFQMTLPDQSNLVRWGKASEKSCYTCGEAVGTARHLLVGCRVLLDRGYYSRRHDRVLEIIREAVSLSVARAQKGLTTNKREINFIKDGSTTKSKSKPFSILGTAPDWTILMDTYDKHYKIPEDVGVSSSRPDIFLFSRQIKHIILVELTVPWETNIPKDHRIKLNKYYNLTTELNKNGYVVNLYAVEVGARGIPAKSLYNLLKDLGLSRSAVSSILERVSKAALTGSYQIWLGRAGNSSSEGER

SEQ ID NO: 19536 - protein, 922 aa, Spilarctia lutea
MRRKKRELIKQLRKAKAMGDNHLSHQLSRALRSILKLIQGISLQITKNRDNFNRAKHEVDFDKNPFQYSKNIFNEQKGKLLLTNQQIYDHFKSTYQVPKRGRRYEDPNVQKPHYPLVDFESCPPTLEEVDHQIKKKTSKSAPGPDGIPYIVYKKCPSVRKHLLNVFCKIWSKKQIPTSFGKAIFVLIPKKDEVIHPKDTRPIALTNTISKIFFSVLQTKMTKFMISNRYFRPNHQKGFLPGISGCLEHNTLLAESLKDARMHERQITVCWIDLENAFGSVQHELMIFALKWYNFPTVVIDIITSYYSKLQFTIAANKEHTEPLHYNVGLFQGCCLSPIAFNIIINILIDKLISHEKKWGYRFKINNKYTESILAFADDLAILTRNPKQCQKLLIEVDEFCTWTDGLRAKPSKCHCLCLGRRNTKYTSYDPGLSIGGQCVTTIAEAVPFKFLGRKIDYKGRTPSLEITVENFLNDLNKVDQQPLNNIKKVWIYDNYLTSRLTWSFLVYDIGKSLLAKLDANVKKILKLWLGIAHSADPSTLFRDQNNFGMKLKKPSELYKHLRVTKMHVLGQSQDEIVSSLPKDKYVTELESRLQFHKQFMAGAQFNRVGLGFAKKKGDREIIKSFIQQDENDIYKVHAMNLEMQSEWLTIGEFCIPLALKWRTLLYDWSPALLKFYLNAFQMTLPDQSNLVRWGKASEKSCYTCGEAVGTARHLLVGCRVLLDRGYYSRRHDRVLEIIREAVSLSVARAQKGLTTNKREINFIKDGSTTKSKSKPFSILSTAPDWTILMDTYDKHYKIPEDVGVSSSRPDIFLFSRQIKHIILVELTVPWETNIPKDHRIKLNKYYDLTTELNKNGYVVNLYAVEVGARGIPAKSLYNLLKDLGLSRSAVSSILERVSKAALTGSYQIWLGRAGNSSSEGER

SEQ ID NO: 19537 - protein, 922 aa, Spilarctia lutea
MRRKKRELIKQLRKAKAMGDNHLSHQLSRALRSILKLIQGISLQITKNRDNFNRAKHEVDFDKNPFQYSKNIFNEQKGKLLLTNQQIYDHFKSTYQVPKRGRRYEDPNVQKPHYPLVDFESCPPTLEEVDHQIKKKTSKSAPGPDGIPYIVYKKCPSVRKHLLNVFCKIWSKKQIPTSFGKAVFVLIPKKDEVTHPKDTRPIALTNTISKIFFSVLQTKMTKFMISNRYFRPNHQKGFLPGISGCLEHNTLLAESLKDARMHERQITVCWIDLENAFGSVQHELMIFALKWYNFPTVVIDIITSYYSKLQFTIAANKEHTEPLHYNVGLFQGCCLSPIAFNIIINILIDKLISHEKKWGYRFKINNKYTESILAFADDLAILTRNPKQCQKLLIEVDEFCTWTDGLRAKPSKCHCLCLGRRNTKYTSYDPGLSIGGQCVTTIAEAVPFKFLGRKIDYKGHTPSLEITVENFLNDLNKVDQQPLNNIKKVWIYDNYLMSRLTWSFLVYDFGKSLLAKLDANVKKILKLWLGIAHSADPSTLFRDQNNFGMKLKKPSELYKHLRVTKMHVLGQSQDEIVSSLPKDKYVTELESRLQFHKQFMAGAQFNRVGLGFAKKKGDREIIKSFIQQDENDIYKVHAMNLEMQSEWLTIGEFCIPLALKWRTLLYDWSPALLKFYLNAFQMTLPDQSNLVRWGKASEKSCYTCGEAVGTARHLLVGCRVLLDRGYYSRRHDRVLEIIREAVSLSVARAQKGLTTNKREINFIKDGSTTKSKSKPFSILGTAPDWTILMDTYDKHYKIPEDVGVSSSRPDIFLFSRQIKHIILVELTVPWETNIPKDHRIKLNKYYDLTTELNKNGYVVNLYAVEVGARGIPAKSLYNLLKDLGLSRSAVSSILDRVSKAALTGSYQIWLGRAGNSSSEGER

SEQ ID NO: 19538 - protein, 922 aa, Spilarctia lutea
MRRKKRELIKQLRKAKAMGDNHLSHQLSRALRSILKLIQGISLQITKNRDNFNRAKHEVDFDKNPFQYSKNIFNEQKGKLLLTNQQIYDHFKSTYQVPKRGRRYEDPNVQKPHYPLVDFESCPPTLEEVDHQIKKKTSKSAPGPDGIPYIVYKKCPSVRKHLLNVFCKIWSKKQIPTSFGKAIFVLIPKKDEVIHPKDTRPIALTNTISKIFFSVLQTKMTKFMISNRYFRPNHQKGFLPGISGCLEHNTLLAESLKDARMHERQITVCWIDLENAFGSVQHELMIFALKWYNFPTVVIDIITSYYSKLQFTIAANKEHTEPLHYNVGLFQGCCLSPIAFNIIINILIDKLISHEKKWGYRFKINNKYTESILAFADDLAILTRNPKQCQKLLIEVDEFCTWTDGLRAKPSKCHCLCLGRRNTKYTSYDPGLSIGGQCVTTIAEAVPFKFLGRKIDYKGRTPSLEITVENFLNDLNKVDQQPLNNIKKVWIYDNYLTSRLTWSFLVYDIGKSLLVKLDANVKKILKLWLGIAHSADPSTLFRDQNNFGMKLKKPSELYKHLRVTKMHVLGQSQDEIVSSLPKDKYVTELESRLQFHKQFMAGAQFNRVGLGFAKKKGDREIIKSFIQQDENDIYIVHAMNLEMQSEWLTIGEFCIPLALKWRTLLYDWSPALLKFYLNAFQMTLPDQSNLVRWGKASEKSCYTCGEAVGTARHLLVGCRVLLDRGYYSRRHDRVLEIIREAVSLSVARAQKGLTTNKREINFIKDGSTTKSKSKPFSILGTAHDWTILMDTYDKHYKIPEDVGVSSSRPDIFLFSRQIKHIILVELTVPWETNIPKDHRIKLNKYYDLTTELNKNGYVVNLYAVEVGARGIPAKSLYNLLKDLGLSRSAVSSILERVSKAALTGSYQIWLGRAGNSSSEGER

SEQ ID NO: 19539 - protein, 922 aa, Spilarctia lutea
MRRKKRELIKQLRKAKAMGDNHLSHQLSRALRSILKLIQGISLQITKNRDNFNRAKHEVDFDKNPFQYSKNIFNEQKGKLLLTNQQIYDHFKSTYQVPKRGRRYEDPNVQKPHYPLVDFESCPPTLEEVDHQIKKKTSKSAPGPDGIPYIVYKKCPSVRKHLLNVFCKIWSKKQIPTSFGKAIFVLIPKKDEVIHPKDTRPIALTNTISKIFFSVLQTKMTKFMISNRYFRPNHQKGFLPGISGCLEHNTLLAESLKDARMHERQITVCWIDLENAFGSVQHELMIFALKWYNFPTVVIDIITSYYSKLQFTIAANKEHTEPLHYNVGLFQGCCLSPIAFNIIINILIDKLISHEKKWGYRFKINNKYTESILAFADDLAILTRNPKQCQKLLIEVDEFCTWTDGLRAKPSKCHCLCLGRRNTKYTSYDPGLSIGGQCVTTIAEAVPFKFLGRKIDYKGRTPSLEITVENFLNDLNKVDQQPLNNIKKVWIYDNYLTSRLTWSFLVYDIGKSLLAKLDANVKKILKLWLGIAHSADPSTLFRDQNNFGMKLKKPSELYKHLRVTKMHVLGQSQDEIVSSLPKDKYVTELESRLQFHKQFMAGTQFNRVGLGFAKKKGDREIIKSFIQQDENDIYKVHAMNLEMQSEWLTIGEFCIPLALKWRTLLYDWSPALLKFYLNAFQMTLPDQSNLVRWGKASEKSCYTCGEAVGTARHLRVGCRVLLDRGYYSRRHDRALEIIREAVSLSVARAQKGLTTNKREINFIKDGSTTKSKSKPFSILGTAPDWTILMDTYDKHYKIPEDVGVSSSRPDIFLFSRQIKHIILVELTVPWETNIPKDHRIKLNKYYDLTTELNKNGYVVNLYAVEVGARGIPAKSLYNLLKDLGLSRSAVSSILERVSKAALTGSHQIWLGRAGNSSSEGER

SEQ ID NO: 19540 - protein, 922 aa, Spilarctia lutea
MRRKKRELIKQLRKAKAMGDNHLSHQLSRALRSILKLIQGISLQITKNRDNFNRAKHEVDFDKNPFQYSKNIFNEQKGKLLLTNQQIYDHFKSTYQVPKRGRRYEDPNVQKPHYPLVDFESCPPTLEEVDHQIKKKTSKSAPGPDGIPHIVYKKCPSVRKHLLNVFCKIWSKKQIPTSFGKAIFVLIPKKDEVIHPKDTRPIALTNTISKIFFSVLQTKMTKFMISNRYFRPNHQKGFLPGISGCLEHNSLLAESLKDARMHERQITVCWIDLENAFGSVQHELMIFALKWYNFPTVVIDIITSYYSKLQFTIAANKEHTEPLHYNVGLFQGCCLSPIAFNIIINILIDKLISHEKKWGYRFKINNKYTESILAFADDLAILTRNPKQCQKLLIEVDEFCTWTDGLRAKPSKCHCLCLGRRNTKYTSYDPGLSIGGQCVTTIAEAVPFKFLGRKIDYKGRTPSLEITVENFLNDLNKVDQQPLNNIKKVWIYDNYLTSRLTWSFLVYDIGKSLLAKLDANVKKILKLWLGIAHSADPSTLFRDQNNFGMKLKKPSELYKHLRVTKMHVLGQSQDEIVSSLPKDKYVTELESRLQFHKQFMAGAQFNRVGLGFAKKKGDREIIKSFIQQDENDIYKVHAMNLEMQNEWLTIGEFCIPLALKWRTLLYDWSPALLKFYLNAFQMTLPDQSNLVRWGKASEKSCYTCGEAVGTARHLLVGCRVLLDRGYYSRRHDRVLEIIREAVSLSVARAQKGLTTNKREINFIKDGSTTKSKSKPFSILGTAPDWTILMDTYDKHYKIPEDVGVSSSRPDIFLFSRQIKHIILVELTVPWETNIPKDHRIKLNKYYDLTTELNKNGYVVNLYAVEVGARGIPAKSLYNLLKDLGLSRSAVSSILERVSKAALTGSYQIWLGRAGNSSSEGER

SEQ ID NO: 19541 - protein, 922 aa, Spilarctia lutea
MRRKKRELIKQLRKAKAMGDNHLSHQLSRALRSILKLIQGISLQITKNRDNFNRAKHEVDFDKNPFQYSKNIFKEQKGKLLLTNQQIYDHFKSTYQVPKRGRRYEDPNVQKPHYPLVDFESCPPTLEEVDHQIKKKTSKSAPGPDGIPYIVYKKCPSVRKHLLNVFCKIWSKKQIPTSFGKAIFVLIPKKDEVIHPKDTRPIALTNTISKIFFSVLQTKMTKFMISNRYFRPNHQKGFLPGISGCLEHNTLLAESLKDARMHERQITVCWIDLENAFGSVQHELMIFALKWYNFPTVVIDIITSYYSKLQFTIAANKEHTEPLHYNVGLFQGCCLSPIAFNIIINILIDKLISHEKKWGYRFKINNKYTESILAFADDLAILTRNPKQCQKLLIEVDEFCTWTDGLRAKPSKCHCLCLGRRNTKYTSYDPGLSIGGQCVTTIAEAVPFKFLGRKIDYKGRTPSLEITVENFLNDLNKVDQQPLNNIKKVWIYDNYLTSRLTWSFLVYDIGKSLLAKLDANVKKILKLWLGIAHSADPSTLFRDQNNFGMKLKKPSELYKHLRVTKMHVLGQSQDEIVSSLPKDKYVTELESRLQFHKQFMAGAQFNRVGLGFAKKKGDREIIKSFIQQDENDIYKVHAMNLEMQSEWLTIGEFCIPLALKWRTLLYDWSPTLLKFYLNAFQMTLPDQSNLVRWGKASEKSCYTCGEAVGTARHLLVGCRVLLDRGYYSRRHDRVLEIIREAVSLSVARAQKGLTTNKREINFIKDGSTTKSKSKPFSILGTAPDWTILMDTYDKHYKIPEDVGVSSSRPDIFLFSRQIKHIILVELTVPWETNIPKDHRIKLNKYYDLTTELNKNGYVVNLYAVEVGARGIPAKSLYNLLKDLGLSRSAVSSILERVSKAALTGSYQIWLGRAGNSSSEGER

SEQ ID NO: 19542 - protein, 922 aa, Spilarctia lutea
MRRKKRELIKQLRKAKAMGDNHLSHQLSRALRSILKLIQGISLQITKNRDNFNRAKHEVDFDKNPFQYSKNIFNEQKGKLLLTNQQIYDHFKSTYQVPKRGRRYEDPNIQKPHYPLVNFESCPPTLEEVDHQIKKKTSKSAPGPDGIPYIVYKKCPSVRKHLLNVFCKIWSKKQIPTSFGKAVFVLIPKKDEVTHPKDTRPIALTNTISKIFFSVLQTKMTKFMISNRYFRPNHQKGFLPGISGCLEHNTLLAESLKDARMHERQITVCWIDLENAFGSVQHELMIFALKWYNFPTVVIDIITSYYSQLQFAIAADKEHTETLHYNVGLFQGCCLSPIAFNIIINILIDKLISHEKKWGYRFKINNKYTESILAFADDLAILTRNPKQCQKLLIEVDEFCTWTDGLRAKPSKCHCLCLGRRNTKYTSYDPGLSIGGQCVTTIAEAVPFKFLGRKIDYKGRTPSLEVTVENFLSDLNKVDQQPLKNIKKVWIYDNYLTSRLTWPFLVYDIGKSLLAKLDANVKKILKSWLGIAHSADPSTLFRDQNSFGMKLKKPSELYKHLRVTKMHVLGQSQDEIVSSLPKDKYVTELESRLQFHKQFMAGAQFNKVGLGFAKRKGDREIIKSFIQQDENDKYKVHAMNLEMQSEWLTIGEFCIPLALKWRTLLYDWSPALLKFYLNAFQMTLPDQSNLVRWGKASEKSCYTCGEAVGTARHLLVGCRVLLDRGYYSRRHDRVLEIIREAVSLSVARAQKGLTTNKREINFIKDGSTTKSKSKPFSILGTAPDWTILMDTYDKHYKIPEDVGVSSSRPDIFLFSRQIKHIILVELTVPWETNIPKDHRIKLNKYYDLTTELNKNGYVVNLYAVEVGARGIPAKSLYNLLKDLGLSRSAVSSILERVSKAALTGSYQIWLGRAGNSSSEGDR

SEQ ID NO: 19543 - protein, 996 aa, Mellicta athalia
MAIRTRLSIPTLKNSTWKVHDENLAILLEHPGSKQDINSQVESLQDTVYTYFCERYPPPNFYARKHKENTFKSKMRRKKRELIKQLQKAKAMGDNHLSHQLSRALRSILKLIQGISLQITENFKNFNRAKHEVDFDNNPFQYSKNIFKEQKGKLLLTNEQIYDHFKSTYDVPKRGRLYDVPNDQPPHKPIINFESCPPTLEEINYQIKKKTSKSAPGPDGIPYIVYKKCPSVRKHLLNIFSKIWSRKQIPTSFSRAIFVLIPKKDEVTHPKDTRPIALTNTISKIFSSVLQTKMTKFMISNRYFRPNHQKGFLPGISGCLEHNTLLAESLKDARTHERQITVCWIDLENAFGSVQHELMIFALKWYNFPTVVIEIIKSYYSQLKFAIAANKEHTKPLHYNIGLFQGCCLSPVVFNIIINILIDKIIRHEKKWGYRFKINNKYTQSILAFADDLAILTRNPKQCQELLTEVDEFCKWTDGLRTKPSKCHCLCLGRRDTKYTSYDPGLSIGGQCVTTIAEAVPFKFLGRKIDHKGRTPSLEAIVDNFLNDLNKVDQQPLSNIKKVWIYDNYLTSRLTWPFLVYDIGGTLLAKLDANVIKLLKLWLGIAHSADPSTLFRDKDSFGMKLKKPSELYKHLRVTKMHVLGQSQDEIVSSLPKDKWATEIDSRLQFHKQFMAGAQFNRVGLGSAEKKEDREIVKSFLKQDENDNYKVHAMNLEMQNEWLTIGEFCIPLALRWRTLLHDWSPALLKFYLNAFQMTLPDQSNLVRWGKASEKTCYTCGEAVGTARHLLVGCKVLLDRGYYSRRHDRVLEIIREAVSLSVARAQKGVTTNQRQINFVKGGSTVNSKSKPFSIIGTAPDWTILMDTYDKHYKIPEDVGVSSSRPDIFLYSKHIKHIILVELTVPWETNIPKDHTIKLNKYYDLTNALNKNGYVVNLYAVEVGARGIPAKSLYNLLKDLGLSRTAINYILERASKAALTGSYQIWLGRAGNSSGEGER

SEQ ID NO: 19544 - protein, 922 aa, Spilarctia lutea
MRRKKRELIKQLRKAKAMGDNHLSHQLSRALRSILKLIQGISLQITKNRDNFNRAKHEVDFDKNPFQYSKNIFNEQKGKLLLTNQQIYDHFKSTYQVPKRGRRYEDPNIQKPHYPLVNFESCPPTLEEVDHQIKKKTSKSAPGPDGIPYIVYKKCPSVRKHLLNVFCKIWSKKQIPTSFGKAVFVLIPKKDEVTHPKDTRPIALTNTISKIFFSVLQTKMTKFMISNRYFRPNHQKGFLPGISGCLEHNTLLAESLKDARMHERQITVCWIDLENAFGSVQHELMIFALKWYNFPTVVIDIITSYYSQLQFAIAADKEHTETLHYNVGLFQGCCLSPIAFNIIINILIDKLISHEKKWGYRFKINNKYTESILAFADDLAILTRNPKQCQKLLIEVDEFCTWTDGLRAKPSKCHCLCLGRRNTKYTSYDPGLSIGGQCVTTIAEAVPFKFLGRKIDYKGRTPSLEVTVENFLSDLNKVDQQPLNNIKKVWIYDNYLTSRLTWPFLVYDIGKSLLAKLDANVKKILKSWLGIAHSADPSTLFRDQNSFGMKLKKPSELYKHLRVTKMHVLGQSQDEIVSSLPKDKYVTELESRLQFHKQFMAGAQFNKVGLGFAKRKGDREMIKSFIQQDENDKYKVHAMNLEMQSEWLTIGEFCIPLALKWRTLLYDWSPALLKFYLNAFQMTLPDQSNLVRWGKASEKSCYTCGEAVGTARHLLIGCRVLLDRGYYSRRHDRVLEIIREAVSLSVARAQKGLTTNKREINFIKDGSTTKSKSKPFSILGTAPDWTILMDTYDKHYKIPEDVGVSSSRPDIFLFSRQIKHIILVELTVPWETNIPKDHRIKLNKYYDLTTELNKNGYVVNLYAVEVGARGIPAKSLYNLLKDLGLSRSAVSSILERVSKAALTGSYQIWLGRAGNSSSEGDR

SEQ ID NO: 19545 - protein, 922 aa, Spilarctia lutea
MRRKKRELIKQLRKAKAMGDNHLSHQLSRALRSILKLIQGISLQITKNRDNFNRAKHEVDFDKNPFQYSKNIFNEQKGKLLLTNQQIYDHFKSTYQVPKRGRRYEDPNVQKPHYPLVDFESCPPTLEEVDHQIKKKTSKSAPGPDGIPYIVYKKCPSVRKHLLNVFCKIWSKKQIPKSFGKAIFVLIPKKDEVIHPKDTRPIALTNTISKIFFSVLQTKMTKFMISNRYFRPNHQKGFLPGISGCLEHNTLLAESLKDARMHERQITVCWIDLENAFGSVQHELMIFALKWYNFPTVVIDIITSYYSKLQFTIAANKEHTEPLHYNVGLFQGCCLSPIAFNIIINILIDKLISHEKKWGYRFKINNKYTESILAFADDLAILTRNPKQCQKLLIEVDEFCTWTDGLRAKPSKCHCLCLGRRNTKYTSYDPGLSIGGQCVTTIAEAVPFKFLGRKIDYKGRTPSLEITVENFLNDLNKVDQQPLNNIKKVWIYDNYLTSRLTWSFLVYDIGKSLLAKLDANVKKILKLWLGIAHSADPSTLFRDQNNFGMKLKKPSELYKHLRVTKMHVLGQSQDEIVSSLPKDKYVTELESRLQFHKQFMAGAQFNRVGLGFAKKKGDREIIKSFIQQDENDIYKVHAMNLEMQSEWLTIGEFCIPLALKWRTLLYDWSPALLKFYLNAFHMTLPDQSNLVRWGRASEKSCYTCGEAVGTARHLLVGCRVLLDRGYYSRRHDRVLEIIREAVSLSVARAQKGLTTNKREINFIKDGSTTKSKSKPFSILGTAPDWTILMDTYDKHYKIPEDVGVSSSRPDIFLFSRQIKHIILVELTVPWETNIPKDHRIKLNKYYDLTTELNKNGYVVNLYAVEVGARGIPAKSLYNLLKDLGLSRSAVSSILERVSKAALTGSYQIWLGRAGNSSSEGER

SEQ ID NO: 19546 - protein, 977 aa, Spilarctia lutea
MTVLIYNMLEHPGSKQDLNSQVETFQDTIYTYFCERYPPPNFYAQKDKENTFKSKMRRKKRELIKQLRKAKAMGDNHLSHQLSRALRSILKLIQGISLQITKNRDNFNRAKHEVDFDKNPFQYSKNIFNEQKGKLLLTNQQIYDHFKSTYQVPKRGRRYEDPNIQKPHYPLVNFESCPPTLEEVDHQIKKKTSKSAPGPDGIPYIVYKKCPSVRKHLLNVFCKIWSKKQIPTSFGKAVFVLIPKKDEVTHPKDTRPIALTNTISKIFFSVLQTKMTKFMISNRYFRPNHQKGFLPGISGCLEHNTLLAESLKDARMHERQITVCWIDLENAFGSVQHELMIFALKWYNFPTVVIDIITSYYSQLQFAIAADKEHTETLHYNVGLFQGCCLSPIAFNIIINILIDKLISHEKKWGYRFKINNKYTESILAFADDLAILTRNPKQCQKLLIEVDEFCTWTDGLRAKPSKCHCLCLGRRNTKYTSYDPGLSIGGQCVTTIAEAVPFKFLGRKIDYKGRTPSLEVTVENFLSDLNKVDQQPLNNIKKVWIYDNYLTSRLTWPFLVYDIGKSLLAKLDANVKKILKSWLGIAHSADPSTLFRDQNSFGMKLKKPSELYKHLRVTKMHVLGQSQDEIVSSLPKDKYVTELESRLQFHKQFMAGAQFNKVGLGFAKRKGDREIIKSFIQQDENDKYKVHAMNLEMQSEWLTIGEFCIPLALKWRTLLYDWSPALLKFYLNAFQMTLPDQSNLVRWGKASEKSCYTCGEAVGTARHLLVGCRVLLDRGYYSRRHDRVLEIIREAVSLSVARAQKGLTTNKREINFIKDGSTTKSKSKPFSILGTAPDWTILMDTYDKHYKIPEDVGVSSSRPDIFLFSRQIKHIILVELTVPWETNIPKDHRIKLNKYYDLTTELNKNGYVVNLYAVEVGARGIPAKSLYNLLKDLGLSRSAVSSILERVSKAALTGSYQIWLGRAGNSSSEGDR

SEQ ID NO: 19547 - protein, 905 aa, Spilarctia lutea
MGDNHLSHQLSRALRSILKLIQGISLQITKNRDNFNRAKHEVDFDKNPFQYSKNIFNEQKGKLLLTNQQIYDHFKSTYQVPKRGRQYEDPNIQKPHYPLVNFESCPPTLEEVDHQIKKKTSKSAPGPDGIPYIVYKKCPSVRKHLLNVFCKIWSKKQIPTSFGEAVFVLIPKKDEVTHPKDTRPIALTNTISKIFFSVLQTKMTKFMISNRYFRPNHQKGFLPGISGCLEHNTLLAESLKDARMHERQITVCWIDLENAFGSVQHELMIFALKWYNFPTVVIDIITSYYSQLQFAIAADKEHTETLHYNVGLFQGCCLSPIAFNIIINILIDKLISHEKKWSYRFKINNKYTESILAFADDLAILTRNPKQCQKLLIEVDEFCTWTDGLRAKPSKCHCLCLGRRNTKYTSYDPGLSIGGQCVTTIAEAVPFKFLGRKIDYKGRTPSLEVTVENFLSDLNKVDQQPLNNIKKVWIYDNYLTSRLTWPFLVYDIGKSLLAKLDANVKKILKSWLGIAHSADPSTLFRDQNSFGMKLKKPSELYKHLRVTKMHVLGQSQDEIVSSLPKDKYVTELESRLQFHKQFMAGAQFNKVGLGSAKRKGDREIIKSFIQQDENDKYKVHAMNLEMQSEWLTIGEFCIPLALKWRTLLYDWSPALLKFYLNAFQMTLPDQSNLVRWGKASEKSCYTCGEAVGTARHLLVGCRVLLDRGYYSRRHDRVLEIIREAVSLSVARAQKGLTTNKREINFIKDGSTTKSKSKPFSILGTAPDWTILMDTYDKHYKIPEDVGVSSSRPDIFLFSRQIKHIILVELTVPWETNIPKDHRIKLNKYYDLTTELNKNGYVVNLYAVEVGARGIPAKSLYNLLKDLGLSRSAVSSILERVSKAALTGSYQIWLGRAGNSSSEGDR

SEQ ID NO: 19548 - protein, 922 aa, Spilarctia lutea
MRRKKRELIKQLRKAKAMGDNHLSHQLSRALRSILKLIQGISLQITKNRDNFNRAKHEVDFDKNPFQYSKNIFNEQKGKLLLTNQQIYDHFKSTYQVPKRGRRYEDPNVQKPHYPLVDFESCPPTLEEVDHQIKKKTSKSAPGPDGIPYIVYKKCPSVRKHLLNVFCKIWSKKQIPTSFGKAIFVLIPKKDEVIHPKDTRPIALTNTISKIFFSVLQTKMTKFMISNRYFRPNHQKGFLPGISGCLEHNTLLAESLKDARMHERQITVCWIDLENAFGSVQHELMIFALKWYNFPTVVIDIITSYYSKLQFTIAANKEHTEPLHYSVGLFQGCCLSPIAFNIIINILIDKLISHEKKWGYRFKINNKYTESILAFADDLAILTRNPKQCQKLLIEVDEFCTWTDGLRAKPSKCHCLCLGRRNTKYTSYDPGLSIGGQCVTTIAEAVPFKFLGRKIDYKGRTPSLEITVENFLNDLNKVDQQPLNNIKKVWIYDNYFTSRLTWSFLVYDIGKSLLAKLDANVKKILKLWLGIAHSADPSTLFRDQNNFGMKLKKPSELYKHLRATKMHVLGQSQDEIVSSLPKDKYVTELESRLQFHKQFMAGAQFNRVGLGFAKKKGDREIIKSFIQQDENDIYKVHAMNLEMQSEWLTIGEFCIPLALKWRTLLYDWSPALLKFYLNAFQMTLPDQSNLVRWGKASEKSCYTCGEAVGTARHLLVGCRVLLDRGYYSRRHDRVLEIIREAVSLSVARAQKGLTTNKREINFIKDGSTTKSKSKPFSILGTAPDWTILMDTYDKHYKIPEDVGVSSSRPDIFLFSRQIKHIILVELTVPWETNIPKDHRIKLNKYYDLTTELNKNGYVVNLYAVEVGARGIPAKSLYNLLKDLGLSRSAVSSILERVSKAALTGSYQIWLGRAGNSSSEGER

SEQ ID NO: 19549 - protein, 922 aa, Spilarctia lutea
MRRKKRELIKQLRKAKAMGDNHLSHQLSRALRSILKLIQGISLQITKNRDNFNRAKHEVDFDKNPFQYSKNIFNEQKGKLLLTNQQIYDHFKSTYQVPKRGRRYEDPNVQKPHYPLVDFESCPPTLEEVDHQIKKKTSKSAPGPDGIPYIVYKKCPSVRKHLLNVFCKIWSKKQIPTSFGKATFVLIPKKDEVIHPKDTRPIALTNTISKIFFSVLQTKMTKFMISNRYFRPNHQKGFLPGISGCLEHNTLLAESLKDARMHERQITVCWIDLENAFGSVQHELMIFALKWYNFPTVVIDIITSYYSKLQFTIAANKEHTEPLHYNVGLFQGCCLSPIAFNIIINILIDKLISHEKKWGYRFKINNKYTESILAFADDLAILTRNPKQCQKLLIEVDEFCTWTDGLRAKPSKCHCLCLGRRNTKYTSYDPGLSIGGQCVTTIAEAVPFKFLGRKIDYKGRTPSLEITVENFLNDLNKVDQQPLNNIKKVWIYNNYLTSRLTWSFLVYDIGKSLLAKLDANVKKILKLWLGIAHSADPSTLFRDQNNFGMKLKKPSELYKHLRVTKMHVLGQSQDEIVSSLPKDKYVTELESRLQFHKQFMAGAQFNRVGLGFAKKKGDREIIKSFIQQDENDIYKVHAMNLEMQSEWLTIGEFCIPLALKWRTLLYDWSPALLKFYLNAFQMTLPDQSNLVRWGKASEKSCYTCGEAVGTARHLLVGCRVLLDRGYYSRRHDRVLEIIREAVSLSVARAQKGLTTNKREINFIKDGSTTKSKSKPFSILGTAPDWTILMDTYDKHYKIPEDVGVSSSRPDIFLFSRQIKHIILVELTVPWETNIPKDHRIKLNKYYDLTTELNKNDYVVNLYAVEVGARGIPAKSLYNLLKDLGLSRSAVSSILERVSKAALTGSYQIWLGRAGNSSSEGER

SEQ ID NO: 19550 - protein, 922 aa, Spilarctia lutea
MRRKKRELIKQLRKAKAMGDNYLSHQLSRALRSILKLIQGISLQISKNRDNFNRAKHEVDFDKNPFLYSKNIFNEQKGKLLLTNQQIYDHFKSTYQVPKRGRRYEDPNVQKPHYPLVDFESCPPTLEEVDHQIKKKTSKSAPGPDGIPYIVYKKCPSVRKHLLNVFCKIWSKKQIPTSFGKAIFVLIPKKDEVIHPKDTRPIALTNTISKIFFSVLQTKMTKFMISNRYFRPNHQKGFLPGISGCLEHNTLLAESLKDARMHERQITVCWIDLENAFGSVQHELMIFALKWYNFPTVVIDIITSYYSKLQFTIAANKEHTEPLHYNVGLFQGCCLSPIAFNIIINILIDKLISHEKKWGYRFKINNKYTESILAFADDLAILTRNPKQCQKLLIEVDEFCTWTDGLRAKPSKCHCLCLGRRNTKYTSYDPGLSIGGQCVTTIAEAVPFKFLGRKIDYKGRTPSLEITVENFLNDLNKVDQQPLNNIRKVWIYDNYLTSRLTWSFLVYDIGKSLLAKLDANVKKILKLWLGIAHSADPSTLFRDQNNFGMKLKKPSELYKHLRVTKMHVLGQSQDEIVSSLPKDKYVTELESRLQFHKQFMAGAQFNRVGLGFAKKKEDREIIKSFIQQDENDIYKVHAMNLEMQSEWLTIGEFCIPLALKWRTLLYDWSPALLKFYLNAFQMTLPDQSNLVRWGKASEKSCYTCGEAVGTARHLLVGCRVLLDRGYYSRRHDRVLEIIREAVSLSVARAQKGLTTNKREVNFIKDGSTTKSKSKPFSILGTAPDWTILMDTYDKHYKIPEDVGVSSSRPDIFLFSRQIKHIILVELTVPWETNIPKDHRIKLNKYYDLTTELNKNGYVVNLYAVEVGARGIPAKSLYNLLKDLGLSRSAVSSILERVSKAALTGSYQIWLGRAGNSSSEGER

SEQ ID NO: 19551 - protein, 922 aa, Spilarctia lutea
MRRKKRELIKQLRKAKAMGDNHLSHQLSRALRSILKLIQGISLQITKNRDNFNRAKHEVDFDKNPFQYWKNIFNEQKGKLLLTNQQIYDHFKSTYQVPKRGRRYEDPNVQKPHYPLVDFESCPPTLEEVDHQIKKKTSKSAPGPDGIPYIVYKKCPSVRKHLLNVFCKIWSKKQIPTSFGKAIFVLIPKKDEVIHPKDTRPIALTNTISKIFFSVLQTKMTKFMISNRYFRPNHQKGFLPGISGCLEHNSLLAESLKDARMHERQITVCWIDLENAFGSVQHELMIFALKWYNFPTVVIDIITSYYSKLQFTIAANKEHTEPLHYNVGLFQGCCLSPIAFNIIINILIDKLISHEKKWGYRFKINNKYTESILAFADDLAILTRNPKQCQKLLIEVDEFCTWTDGLRAKPSKCHCLCLGRRNTKYTSYDPGLSIGGQCVTTIAEAVPFKFLGRKIDYKGRTPSLEITVENFLNDLNKVDQQPLNNIKKVWIYDNYLTSRLTWSFLVYDIGKSLLAKLDANVKKILKLWLGIAHSADPSTLFRDQNNFGMKLKKPSELYKHLRVTKMHVLGQSQDEIVSSLPKDKYVTELESRLQFHKQFMAGAQFNRVGLGFAKKKGDREIIKSFIQQDENDIYKVHAMNLEMQNEWLTIGEFCIPLALKWRTLLYDWSPALLKFYLNAFQMTLPDQSNLVRWGKASEKSCYTCGEAVGTARHLLVGCRVLLDRGYYSRRHDRVLEIIREAVSLSVARAQKGLTTNKREINFIKDGSTTKSKSKPFSILGTAPDWTILMDTYDKHYKIPEDVGVSSSRPDIFLFSRQIKHIILVELTVPWETNIPKDHRIKLNKYYDLTTELNKNGYVVNLYAVEVGARGIPAKSLYNLLKDLGLSRSAVSSILERVSKAALTGSYQIWLGRAGNSSSEGER

SEQ ID NO: 19552 - protein, 929 aa, Spilarctia lutea
MAVHSVFIVFCYVKCTKRSISMSTFIILVTLTSTTIIPLTIPVVNSNYLDLRVFSVNSNNRAKHEVDFDKNPFQYSKNIFNEQKGKLLLTNQQIYDHFKSTYQVPKRGRRYEDPNIQKPHYPLVNFESCPPTLEEVDHQIKKKTSKSAPGPDGIPYIVYKKCPSVRKHLLNVFCKIWSKKQIPTSFGEAVFVLIPKKDEVTHPKDTRPIALTNTISKIFFSVLQTKMTKFMISNRYFRPNHQKGFLPGISGCLEHNTLLAESLKDARMHERQITVCWIDLENAFGSVQHELMIFALKWYNFPTVVIDIITSYYSQLQFAIAADKEHTETLHYNVGLFQGCCLSPIAFNIIINILIDKLISHEKKWGYRFKINNKYTESILAFADDLAILTRNPKQCQKLLIEVDEFCTWTDGLRAKPSKCHCLCLGRRNTKYTSYDPGLSIGGQCVTTIAEAVPFKFLGRKIDYKGRTPSLEVTVENFLSDLNKVDQQPLNNIKKVWIYDNYLTSRLAWPFLVYDIGKSLLAKLDANVKKILKSWLGIAHSADPSTLFRDQNSFGMKLKKPSELYKHLRVTKIHVLGQSQDEIVSSLPKDKYVTELESRLQFHKQFMAGAQFNKVGLGFAKRKGDREIIKSFIQQDENDKYKVHAMNLEMQSEWLTIGEFCIPLALKWRTLLYDWSPALLKFYLNAFQMTLPDQSNLVRWGKASEKSCYTCGEAVGTARHLLVGCRVLLDRGYYSRRHDRVLEIIREAVSLSVARAQKGLTTNKREINFIKNGSNTKSKSKPFSILGTAPDWTILMDTYDKHYKIPEDVGASSSRPDIFLFSRQIKHIILVELTVPWETNIPKDHRIKLNKYYDLTTELNKNGYVVNLYAVEVGARGIPAKSLYNLLKDLGLSRSAVSSILERVSKAALTGSYQIWLGRAGNSSSEGDR

SEQ ID NO: 19553 - protein, 922 aa, Spilarctia lutea
MRRKKRELIKQLRKAKAMGDNHLSHQLSRALRSILKLIQGISLQITKNRDNFNRAKHEVDFDKNPFQYSKNIFNEQKGKLLLTNQQIYDHFKSTYQVPKRGRRYEDPNVQKPHYPLVDFESCPPTLEEVDHQIKKKTSKSAPGPDGIPYIVYKKCPSVRKHLLNVFCKIWSKKQIPTSFGKAIFVLIPKKYEVIHPKDTRPIALTNTISKIFFSVLQTKMTKFMISNRYFRPNHQKGFLPGISGCLEHNTLLAESLKDARMHERQITVCWIDLENAFGSVQHELMIFALKWYNFPTVVIDIITSYYSKLQFTIAANKEHTEPLHYNVGLFQGCCLSPIAFNIIINILIDKLISHEKKWGYRFKINNKYTESILAFADDLAILTRNPKQCQKLLIEVDEFCTWTDGLRAKPSKCHCLCLGRRNTKYTSYDPGLSIGGQCVTTIAEAVPFKFLGRKIDYKGRTPSLEITVENFLNDLNKVDQQPLNNIKKVWIYDNYLTSRLTWSFLVYDIGKSLLAKLDANVKKILKLWLGIAHSADPSTLFRDQNNFGMKLKKPSELYKHLRVTKMHVLGQSQDEIVSSLPKDKYVTELESRLQFHKQFMAGAQFNRVGLGFAKKKGDREIIKSFIQQDENDIYKVHAMNLEMQSEWLNIGEFCIPLALKWRTLLYDWSPALLKFYLNAFQMTLPDQSNLVRWGKASEKSCYTCGEAVGTARHLLVGCRVLLDRGYYSRRHDRVLEIIREAVSLSVARAQKGLTTNKREINFIKDGSTTKSKSKPFSILGTAPDWTILMDTYDKHYEIPEDVGVSSSRPDIFLFSRQIKHIILVELTVPWETNIPKDHRIKLNKYYDLTTELNKNGYVVNLYAVEVGARGIPAKSLYNLLKDLGLSRSAVSSILERVSKAALTGSYQIWLGRAGNSSSEGER

SEQ ID NO: 19554 - protein, 922 aa, Spilarctia lutea
MRRKKRELIKQLRKAKAMGDNHLSHQLSRALRSILKLIQGISLQITKNRDNFNRAKHEVDFDKNPFQYSKNIFNEQKGKLLLTNQQIYDHFKSTYQVPKRGRRYEDPNIQKPHYPLVNFESCPPTLEEVDHQIKKKTSKSAPGPDGIPYIVYKKCPSVRKHLLNVFCKIWSKKQIPKSFGKAVFVLIPKKDEVTHPKDTRPIALTNTISKIFFSVLQTKMTKFMISNRYFRPNHQKGFLPGISGCLEHNTLLAESLKDARMHERQITVCWIDLENAFGSVQHELMIFALKWYNFPTVVIDIITSYYSQLQFAIAADKEHTETLHYNVGLFQGCCLSPIAFNIIINILIDKLISHEKKWGYRFKINNKYTESILAFADDLAILTRNPKQCQKLLIEVDEFCTWTDGLRAKPSKCHCLCLGRRNTKYTSYDPGLSIGGQCVTTIAEAVPFKFLGRKINYKGRTPSLEVTVENFLSDLNKVDQQPLNNIKKVWIYDNYLTSRLTWPFLVYDIGKSLLAKLDANVKKILKSWLGIAHSADPSTLFRDQNSFGMKLKKPSELYKHLRVTKMHVLGQSQDEIVLSLPKDKYVTELESRLQFHKQFMAGAQFNKVGLGFAKRKGDREIIKSFIQQDENDKYKVHAMNLEMQSEWLTIGEFCIPLALKWRTLLYDWSPALLKFYLNAFQMTLPDQSNLVRWGKASEKSCYTCGEAVGTARHLLVGCRVLLDRGYYSRRHDRVLEIIREAVSLSVARAQKGLTTNKREINFIKDGSTTKSKSKPFSILGTAPDWTILMDTYDKHYKIPEDVGVSSSRPDIFLFSRQIKHIILVELTVPWETNIPKDHRIKLNKYYDLTTELNKNGYVVNLYAVEVGARGIPAKSLYNLLKDLGLSRSAVSSILERVSKAALTGSYQIWLGRAGNSSSEGDR

SEQ ID NO: 19555 - protein, 922 aa, Spilarctia lutea
MRRKKRELIKQIRKAKAMGDNHLSHQLSRALRSILKLIQGISLQITKNRDNFNRAKHEVDFDKNPFLYSKNIFNEQKGKLLLTNQQIYDHFKSTYQVPKRGRRYEDPNVQKPHYPLVDFESCPPTLEEVDHQIKKKTSKSAPGPDGIPYIVYKKCPSVRKHLLNVFCKIWSKKQIPTSFGKAIFVLIPKKDEVIHPKDTRPIALTNTISKIFFSVLQTKMTKFMISNRYFRPNHQKGFLPGISGCLKHNTLLAESLKDARMHERQITVCWIDLENAFGSVQHELMIFALKWYNFPTVVIDIITSYYSKLQFTIAANKEHTEPLHYNVGLFQGCCLSPIAFNIIINILIDKLISHEKKWGYRFKINNKYTESILAFADDLAILTRNPKQCQKLLIEVDEFCTWTDGLRAKPSKCHCLCLGRRNNKYTSYDPGLSIGGQCVTTIAEAVPFKFLGRKIDYKGRTPSLEITVENFLNDLNKVDQQPLNNIKKVWIYDNYLTSRLTWSFLVYDIGKSLLAKLDANVKKILKLWLGIAHSADPSTLFRDQNNFGMKLKKPSELYKHLRVTKMHVLGQSQDEIVSSLPKDKYVTELESRLQFHKQFMAGAQFNRVGLGFAKKKGDREIIKSFIQQDENDIYKVHAMNLEMQSEWLTIGEFCIPLALKWRTLLYDWSPALLKFYLNAFQMTLPDQSNLVRWGKASEKSCYTCGEAVGTARHLLVGCRVLLDRGYYSRRHDRVLEIIREAVSLSVARAQKGLTTNKREVNFIKDGSTTKSKSKPFSILGTAPDWTILMDTYDKHYKIPEDVGVSSSRPDIFLFSRQIKHIILVELTVPWETNIPKDHRIKLNKYYDLTTELNKNGYVVNLYAVEVGARGIPAKSLYNLLKDLGLSRSAVSSILERVSKAALTGSYQIWLGRAGNSSSEGER

SEQ ID NO: 19556 - protein, 922 aa, Spilarctia lutea
MRRKKRELIKQLRKAKAMGDNHLSHQLSRALRSILKLIQGISLQITKNRDNFNRAKHEVDFDKNPFQYSKNIFNEQKGKLLLTNQQIYDHFKSTYQVPKRGRRYEDPNVQKPHYPLVDFESCPPTLEEVDHQIKKKTSKSAPGPDGIPYIVYKKCPSVRKHLLNVFCKIWSKKQIPTSFGKAIFVLIPKKDEVIHPKDTRPIALTNTISKIFFSVLQTKMTKFMISNRYFRPNHQKGFLPGISGCLEHNTLLAESLKDARMHERQITVCWIDLENAFGSVQHELMIFALKWYNFPTVVIDIITSYYSKLQFTIAANKEHTEPLHYNVGLFQGCCLSPIAFNIIINILIDKLISHEKKWGYRFKINNKYTESILAFADDLAILTRNPKQCQKLLIEVDEFCTWTDGLRAKPSKCHCLCLGRRNTKYTSYDPGLSIGGQCVTTIAEAVPFKFLGRKIDYKGRTPSLEITVENFLNDLNKVDQQPLNNIKKVWIYDNYLTSRLTWSFLVYDIGKSLLAKLDANVKKILKLWLGIAHSADPSTLFRDQNNFGMKLKKPSELYKHLRVTKMHVLGQSQDEIVSSLPKDKYVTELESRLQFHKQFMAGAQFNRVGLGFAKKKGDREIIKSFIQQDENDIYKVHAMNLEMQSEWLNIGEFCIPLALKWRTLLYDWSPALLKFYLNAFQMTLPDQSNLVRWGKASEKSCYTCGEAVGTARHLLVGCRVLLDRGYYSRRHDRVLEIIREAVSLSVARAQKGLTTNKREINFIKDGSTTKSKSKPFSILGTAPDWTILMDTYDKHYEIPEDVGVSSSRPDIFLFSRQIKHIILVELTVPWETNIPKDHRIKLNKYYDLTTELNKNGYVVNLYAVEVGARGIPAKSLYNLLKDLGPSRSAVSSILERVSKAALTGSYQIWLGRAGNSSSEGER

SEQ ID NO: 19557 - protein, 922 aa, Spilarctia lutea
MRRKKRELIKQLRKAKAMGDNHLSHQLSRALRSILKLIQGISLQITKNRDNFNRAKHEVDFDKNPFQYSKNIFNEQKGKLLLTNQQIYDHFKSTYQVPKRGRRYEDPNVQKPHYPLVDFESCPPTLEEVDHQIKKKTSKSAPGPDGIPYIVYKKCPSVRKHLLNVFCKIWSKKQIPTSFGKAIFVLIPKKDEVIHPKDTRPIALTNTISKIFFSVLQTKMTKFMISNRYFRPNHQKGFLPGISGCLEHNTLLAESLKDARMHERQITVCWIDLENAFGSVQHELMIFALKWYNFPTVVIDIITSYYSKLQFTIAANKEHTEPLHYNVGLFQGCCLSPIAFNIIINILIDKLISHEKKWGYRFKINNKYTESILAFADDLAILTRNPKQCQKLLIEVDEFCTWTDGLRAKPSKCHCLCLGRRNTKYTSYDPGLSIGGQCVTTIAEAVPFKFLGRKIDYKGHTPSLEITVENFLNDLNKVDQQPLNNIKKVWIYDNYLTSRLTWSFLVYDIGKSLLAKLDANVKKILKLWLGIAHSADPSTLFRDQNNFGMKLKKPSELYKHLRVTKMHVLGQSQDEIVSSLPKDKYVTELESRLQFHKQFMAGAQFNRVGLGFAKKKGDREIIKSFIQQDENDIYKVHAMNLEMQSEWLTIGEFCIPLALKWRTLLYDWSPALLKFYLNAFQMTLPDQSNLVRWGKASEKSCYTCGEAVGTARHLLVGCRVLLDRGYYSRRHDRVLEIIREAVSLSVARAQKGLTTNKREINFIKDGSTTKSKSKPFSILGTAPDWTILMDTYDKHYKIPEDVGVSSSRPDIFLFSRQIKHIILVELTVPWETNIPKDHRIKLNKYYDLTTELNKNGYVVNLYAVEVGARGIPAKSLYNLLKDLGLSRSAVSSILDRVSKAALTGSYQIWLGRAGNSSSEGER

SEQ ID NO: 19558 - protein, 922 aa, Spilarctia lutea
MRRKKRELIKQLRKAKAMGDNHLSHQLSRALRSILKLIQGISLQITKNRDNFNRAKHEVDFDKNPFQYSKNIFNEQKGKLLLTNQQIYDHFKSTYQVPKRGRRYEDPNVQKPHYPLVDFESCPPTLEEIDHQIKKKTSKSAPGPDGIPYIVYKKCPSVRKHLLNVFCKIWSKKQIPTSFGKAIFVLIPKKDEVIHPKDTRPIALTNTISKIFFSVLQTKMTKFMISNRYFRPNHQKGFLPGISGCLEHNTLLAESLKDARMHERQITVCWIDLENAFGSVQHELMIFALKWYNFPTVVIDIITSYYSKLQFTIAANKEHTEPLHYNVGLFQGCCLSPIAFNIIINILIDKLISHEKKWGYRFKINNKYTESILAFADDLAILTRNPKQCQKLLIEVDEFCTWTDGLRAKPSKCHCLCLGRRNTKYTSYDPGLSIGGQCVTTIAEAVPFKFLGRKIDYKGRTPSLEITVENFLNDLNKVDQQPLNNIKKVWIYDNYLTSRLTWSFLVYDIGKSLLAKLDANVKKILKLWLGIAHSADPSTLFRDQNNFGMKLKKPSELYKHLRVTKMHVLGQSQDEIVSSLPKDKYVTELESRLQFHKQFMAGAQFNRVGLGFAKKKGDREIIRSFIQQDENDIYKVHAMNLEMQSEWLTIGEFCIPLALKWRTLLYDWSPALLKFYLNAFQMTLPDQSNLVRWGKASEKSCYTCGEAVGTARHLLVGCRVLLDRGYYSRRHDRVLEIIRETVSLSVARAQKGLTTNKREINFIKDGSTTKSKSKPFSILGTAPDWTILMDTYDKHYKIPEDVGVSSSRPDIFLFSRQIKHIILVELTVPWETNIPKDHRIKLNKYYDLTTELNKNGYVVNLFAVEVGARGIPAKSLYNLLKDLGLSRSAVSSILERVSKAALTGSYQIWLGRAGNSSSEGER

SEQ ID NO: 19559 - protein, 922 aa, Spilarctia lutea
MRRKKRELIKQLRKAKAMGDNHLSHQLSRALRSILKLIQGISLQITKNRDKFNRAKHEVDFDKNPFQYSKNIFNEQKGKLLLTNQQIYDHFKSTYQVPKRGRRYEDPNVQKPHYPLVDFESCPPTLEEVDHQIKKKTSKSAPGPDGIPYIVYKKCPSVRKHLLNVFCKIWSKKQIPTSFGKAIFVLIPKKDEVIHPKDTRPIALTNTISKIFFSVLQTKMTKFMISNRYFRPNHQKGFLPGISGCLEHNSLLAESLKDARMHERQITVCWIDLENAFGSVQHELMIFALKWYNFPTVVIDIITSYYSKLQFTIAANKEHTEPLHYNVGLFQGCCLSPIAFNIIINILIDKLISHEKKWGYRFKINNKYTESILAFADDLAILTRNPKQCQKLLIEVDEFCTWTDGLRAKPSKCHCLCLGRRNTKYTSYYPGLSIGGQCVTTIAEAVPFKFLGRKIDYKGRTPSLEITVENFLNDLNKVDQQPLNNIKKVWIYDNYLTSRLTWSFLVYDIGKSLLAKLDANVKKILKLWLGIAHSADPSTLFRDQNNFGMKLKKPSELYKHLRVTKMHVLGQSQDEIVSSLPKDKYVTELESRLQFHKQFMAGAQFNRVGLGFAKKKGDREIIKSFIQQDENDIYKVHAMNLEMQNEWLTIGEFCIPLALKWRTLLYDWSPALLKFYLNAFQMTLPDQSNLVRWGKASEKSCYTCGEAVGTARHLLVGCRVLLDRGYYSRRHDRVLEIIREAVSLSVARAQKGLTTNKREINFIKDGSTTKSKSKPFSILGTAPDWTILMDTYDKHYKIPEDVGVSSSRPDIFLFSRQIKHIILVELTVPWETNIPKDHRIKLNKYYDLTTELNKNGYVVNLYAVEVGARGIPAKSLYNLLKDLGLSRSAVSSILERVSKAALTGSYQIWLGRAGNSSSEGER

SEQ ID NO: 19560 - protein, 922 aa, Spilarctia lutea
MRRKKRELMKQLRKAKAMGDNHLSHQLSRALRSILKLIQGISLQITKNRDNFNRAKHEVDFDKNPFQYSKNIFNEQKGKFLLTNQQIYDHFKSTYQVPKRGRRYEDPNVQKPHYPLVDFESCPPTLEEVDHQIKKKTSKSAPGPDGIPYIVYKKCPSVRKHLLNVFCKIWSKKQIPTSFGKAIFVLIPKKDEVIHPKDTRPIALTNTISKIFFSVLQTKMTKFMISNRYFRPNHQKGFLPGISGCLEHNTLLAESLKDARMHERQIMVCWIDLENAFGSVQHELMIFALKWYNFPTVVIDIITSYYSKLQFTIAANKEHTEPLHYNVGLFQGCCLSPIAFNIIINILIDKLISNEKKWGYRFKINNKYTESILAFADDLAILTRNPKQCQKLLIEVDEFCTWTDGLRAKPSKCHCLCLGRRNIKYTSYDPGLSIGGQCVTTIAEAVPFKFIGRKIDYKGRTPSLEITVENFLNDLNKVDQQPLNNIKKVWIYDNYLTSRLTWSFLVYDIGKSLLAKLDANVKKILKLWLGIAHSADPSTLFRDQNNFGMKLKKPSELYKHLRVTKMHVLGQSQDEIVSSLPKDKYVTELESRLQFHKQFMGGAQFNRVGLGFAKKMGDREIIKSLIQEDENDIYKVHAMNLEMQSEWLTIGEFCIPLALKWRTLLYDWSPALLKFYLNAFQMTLPDQSNLVRWGKASEKSCYTCGEAVGTARHLLVGCRVLLDRGYYSRRHDRVLEIIREAVSLSVARAQKGLTTNKREINFIKDGSTTKSKSKPFSILGTAPDWTILMDTYDKHYKIPEDVGVSSSRPDIFLFSRQIKYIILVELTVPWETNIPKDHRIKLNKYYDLTTELNKNGYVVNLYAVEVGARGIPAKSLYNLLKDLGLSRSAVSSILERASKAALTGSYQIWLGRAGNSSSEGER

SEQ ID NO: 19561 - protein, 922 aa, Spilarctia lutea
MRRKKRELIKQLRKAKAMGDNHLSHQLSRALRSILKLIQGISLQITKNRDNFNRAKHEVDFDKNPFQYSKNIFNEQKGKLLLTNQQIYDHFKSTYQVPKRGRRYEDPNIQKPHYPLVNFESCPPTLEEVDHQIKKKTSKSAPGPDGIPYIVYKKCPSVRKHLLNVFCKIWSKKQIPTSFGKAVFVLIPKKDEVTHPKDTRPIALTNTISKIFFSVLQTKMTKFMISNRYFRPNHQKGFLPGISGCLEHNTLLAESLKDARMHERQITVCWIDLENAFGSVQHELMIFALKWYNFPTVVIDIITSYYSQLQFAIAADKEHTETLHYNVGLFQGCCLSPIAFNIIINILIDKLISHEKKWGYRFKINNKYTESILAFADDLVILTRNPKQCQKLLIEVDEFCTWTDGLRAKPSKCHCLCLGRRNTKYTSYDPGLSIGGQCVTTIAEAVPFKFLGRKIDYKGRTPSLEVTVENFLSDLNKVDQQPLNNIKKVWKYDNYLTSRLTWPFLVYDIGKSLLAKLDANVKKILKSWLGIAHSADPSTLFRDQNSFGMKLKKPSELYKHLRVTKMHVLGQSQDEIVSSLPKDKYVTELESRLQFHKQFMAGAQFNKVGLGFAKRKGDREIIKSFIQQDENDKYKVHAMNLEMQSEWLTIGEFCIPLALKWRTLLYDWSPALLKFYLNAFQMTLPDQSNLVRWGKASEKSCYTCGEAVGTARHLLVGCRVLLDRGYYSRRHDRVLEIIREAVSLSVARAQKGLTTNKREINFIKDGSTTKSKSKPFSILGTAPDWTILMDTYDKHYKIPEDVGVSTSRPDIFLFSRQIKHIILVELTVPWETNIPKDHRIKLNKYYDLTTELNKNGYVVNLYAVEVGARGIPAKSLYNLLKDLGLSRSAVSSILERVSKAALTGSYQIWLGRAGNSSSEGDR

SEQ ID NO: 19562 - protein, 922 aa, Spilarctia lutea
MRRKKRELIKQLRKAKAMSDNHLSHQLSRALRSILKLIQGISLQITKNRDNFNRAKHEVDFDKNPFQYSKNIFNEQKGKLLLTNQQIYDHFKSTYQVPKRGRRYEDPNVQKPHYPLVDFESCPPTLEEVDHQIKKKTSKSAPGPDGIPYIVYKKCPSVRKHLLNIFCKIWSKKQIPTSFGKAIFVLIPKKDEVIHPKDTRPIALTNTISKNFFSVLQTKMTKFMISNRYFRPNHQKGFLPGISGCLEHNTLLAESLKDARMHERQITVCWIDLENAFGSVQHELMIFALKWYNFPTVVIDIITSYYSKLQFTIAANKEHTEPLHYNVGLFQGCCLSPIAFNIIINILIDKLISHEKKWGYRFKINNKYTESILAFADDLAILTRNPKQCQKLLIEVDEFCTWTDGLRAKPSKCHCLCLGRRNTKYTSYDPGLSIGGQCVTTIAEAVPFKFLGRKIDYKGRTPSLEITVENFLNDLNKVDQQPLNNIKKVWIYDNYLTSRLTWSFLVYDIGKTLLAKLDANVKKILKLWLGIAHSADPSTLFRDQNNFGMKLKKPSELYKHLRVTKMHVLGQSQDEIVSSLPKDKYVTELESRLQFHKQFMAGAQFNRVGLGFAKKKGDREIIKSFIQQDENDIYKVHAMNLEMQSEWLTIGEFCIPLALKWRTLLYDWSPALLKFYLNAFQMTLPDQSNLVRWGKASEKSCYMCGEAVGTARHLLVGCRVLLDRGYYSRRHDRVLEIIREAVSLSVARAQKGLTTNKREINFIKDGSTTKSKSKPFSILGTAPDWTILMDTYDKHYKIPEDVGVSSSRPDIFLFSRQIKHIILVELTVPWETNIPKDHRIKLNKYYDLTTELNKNGYVVNLYAVEVGARGIPAKSLYNLLKDLGLSRSAVSSILERVSKAALTGSYQIWLGRAGNSSSEGER

SEQ ID NO: 19563 - protein, 922 aa, Spilarctia lutea
MRRKKRELIKQLRKAKAMGDNHLSHQLSRALRSILKLIQGISLQITKNRDNFNRAKHEVDFDKNPFQYSKNIFNEQKGKFLLTNQQIYDHFKSTYQVPKRGRRYEDPNVQKPHYPLVDFESCPPTLEEVDHQIKKKTSKSAPGPDGIPYMVYKKCPSVSKHLLNVFCKIWSKKQIPTSFGKAIFVLIPKKDEVIHPKDTRPIALTNTISKIFFSVLQTKMTKFMISNRYFRPNHQKGFLPGISGCLEHNTLLAESLKDARMHERQITVCWIDLENAFGSVQHELMIFALKWYNFPTVVIDIITSYYSKLQFTIAANKEHTEPLHYNVGLFQGCCLSPIAFNIIINILIDKLISHEKKWGYRFKINNKYTESILAFADDLAILTRNLKQCQKLLIEVDEFCTWTDGLRAKPSKCHCLCLGRRNTKYTSYDPGLSIGGQCVTTIAEAVPFKFLGRKIDYKGRTPSLEITVENFLNDLNKVDQQPLNNIKKVWIYDNYLTSRLTWSFLVYDIGKSLLAKLDANVKKILKLWLGIAHSADPSTLFRDQNNFGMKLKKPSELYKHLRVTKMHVLGQSQDEIVSSLPKDKYVTELESRLQFHKQFMAGAQFNRVGLGFAKKKGDREIIKSFIQQDENDIYKVHAMNLEMQSEWLTIGEFCIPLALKRRTLLYDWSPALLKFYLNAFQMTLPDQSNLVRWGKASEKSCYTCGEAVGTARHLLVGCRVLLDRGYYSRRHDRVLEIIREAVSLSVARAQKGLTTNKREINFIKDGSTTKSKSKPFSILGTAPDWTILMDTYDKHYKIPEDVGVSSSRPDIFLFSRQIKHIILVELTVPWETNIPKDHRIKLNKYYDLTTELNKNGYVVNLYAVEVGARGIPAKSLYNLLKDLGLSRSAVSSILERVSKAALTGSYQIWLGRAGNSSSEGER

SEQ ID NO: 19564 - protein, 922 aa, Spilarctia lutea
MRRKKRELIKQLRKAKAMGDNHLSHQLSRALRSILKLIQGISLQITKNRDNFNRAKHEVDFDKNPFQYSKNIFNEQKGKLLLTNQQIYDHFKSTYQVPKRGRRYEDPNVQKPHYPLVDFESCPPTLEEVDHQIKKKTSKSAPGPDGIPYIVYKKCPSVRKHLLNVFCKIWSKKQIPTSFGKAIFVLIPKKDEVIHPKDTRPIALTNTISKIFFSVLQTKMTKFMISNRYFRPNHQKGFLPGISGCLEHNSLLAESLKDARMHERQITVCWIDLENAFGSVQHELMIFALKWYNFPTVVIDIITSYYSKLQFTIAANKEHTEPLHYNVGLFQGCCLSPIAFNIIINILIDKLISHEKKWGYRFKINNKYTESILAFADDLAILTRNPKQCQKLLIEVDEFCTWTDGLRAKPSKCHCLCLGRRNTKYTSYDPGLSIGGQCVTTIAEAVPFKFLGRKIDYKGRTPSLEITVENFLNDLNKVDQQPLNNIKKVWIYDNYLTSRLTWSFLVYDIGKSLLAKLDANVKKILKLWLGIAHSADPSTLFRDQNNFGMKLKKPSELYKHLRVTKMHVLGQSQDEIVSSLPKDKYVTELESRLQFHKQFMAGAQFNRVGLGFAKKKGDREIIKSFIQQDENDIYKVHAMNLEMQNEWLTIGEFCTPLALKWRTLLYDWSPALLKFYLNAFQMTLPDQSNLVRWGKASEKSCYTCGEAVGTARHLLVGCRVLLDRGYYSRRHDRVLEIIREAVSLSVARAQKGLTTNKREINFIKDGSTTKSKSKPFSILGTAPDWTILMDTYDKHYKIPEDVGVSSSRPDIFLFSRQIKHIILVELTVPWETNIPKDHRIKLNKYYDLTTELNKNGYVVNLYAVEVGARGIPAKSLYNLLKDLGLSRSAVSSILERVSKAALTGSYQIWLGRAGNSSSEGER

SEQ ID NO: 19565 - protein, 921 aa, Salantoia eriopis
MRRKKRELIKQLRIAKAMGDNHLSHQLARALRSILKLIQGISLQILNNRDNFNRAKHEVDFDKNPFLYSRNIFKDRGKLFLSNEQIYDHFKNTYEVPKNGKLYGDPNTQRPNNPLIDFQSCSPTVEEISTQIKKKPSKSAPGPDGIPYVVYKKCPSIRKHLYDIFSKIWARKQVPHSFGRAIFILIPKKAEVTHPKDTRPIALTNTISKIFFSILQAKMTKFMINNRYFRPNHQKGFLPGVSGCLEHNTLLAESLKDARTHERQITVCWIDLENAFGSIQHELMIFALKWYNFPAVVIDIITAYYSILKFTIAANKEYTKPLQYNVGLFQGCCLSPIAFNIVINILIDKLISHEKKWGYRFKVNNKYTESILAFADDLAILTRNPQQCQKLLNEIDEFCTWTDGLRVKPSKCQCLCLGRRDTRYTSYDSGLSISGQSVTTVAEAVPFKFLGRKINHKGRAPPLEAVVDNFLNDLSKVDQQPIGNIKKVWIYNNYLTSRLTWSFLIYDIGKTLLAKLDATVIKTLKLWLGLAHPADPSTLFRDHNNFGMKLKKPSELYKHLRVTKIHVLGKSKDEVVSSLPKDKCVKELESRLQFHKQFMTGAQTNRAGLGSRKKMEDRDIVKSFLHQDENEDYRVHATNLEMQSDWLNLGEFCIPLALKWRTLIYDWSPALLKFYLNAFQMTLPDQSNLVRWGKASEKSCYTCGNAIGTARHLLVGCKVLLDRGQYSRRHDRVLHIIREAISLSIARAQKGLTTNSRLIHFIKTGPNTTPKNKPYSIVVPASDWTILMDTFEKHYKIPADVGVSSSRPDIFTFSRATKRIILVELTVPWETNIPRDHTIKINKYYDLVNTLTKNGYMVSLYAVEVGARGIPAKSLYNLLKDLGLSRSAAGSVLERASRAALTGSYEIWLGREGNAGGKGDS

SEQ ID NO: 19566 - protein, 922 aa, Spilarctia lutea
MRRKKRELIKLLRKAKAMGDNHLSHQLSRALRSILKLIQGISLQITKNRDNFNRAKHEVDFDKNPFQYSKNIFNEQKGKLLLTNQQIYDHFKSTYQVPKRGRRYEDPNVQKPHYPLVDFESCPPTLEEVDHQIKKKTSKSAPGPDGIPYIVYKKCPSVRKHLLNVFCKIWSKKQIPTSFGKAIFVLIPKKDEVIHPKDTRPIALTNTISKIFFSVLQTKMTKFMISNRYFRPNHQKGFLPGISGCLEHNTLLAESLKDARMHERQITVCWIDLENAFGSVQHELMIFDLKWYNFPTVVIDIITSYYSKLQFTIAANKEHTEPLHYNVGLFQGCCLSPIAFNIIINILIDKLISHEKKWGYRFKINNKYTESILAFADDLAILTRNPKQCQKLLIEVDEFCTWTDGLRAKPSKCHCLCLGRRNTKYTSYDPGLSIGGQCVTTIAGAVPFKFLGRKIDYKGRTPSLEITVENFLNDLNKVDQQPLNNIKKVWIYDNYLTSRVTWSFLVYDIGKSLLAKLDANVKKILKLWLGIAHSADPSTLFRDQNNFGMKLKKPSELYKHLRVTKMHVLGQSQDEIVSSLPKDKYVTELESRLQFHKQFMAGAQFNRVGLGFAKKKGDREIIKSFIQQDENDIYKVHAMNLEMQSEWLTIGEFCIPLALKWRTLLYDWSPALLKFYLNAFQMTLPDQSNLVRWGKASEKSCYTCGEAVGTARHLLVGCRVLLDRGYYSRRHDRVLEIIREAVSLSVARAQKGLTTNKREINFIKDGSTTKSKSKPFSILGTAPDWTILMDTYDKHYKIPEDVGVSSSRPDIFLFSRQIKHIILVELTVPWETNIPKDHRIKLNKYYDLTTELNKNGYVVNLYAVEVGARGIPAKSLYNLLKDLGLSRSAVSSILERVSKAALTGSYQIWLGRAGNSSSEGER

SEQ ID NO: 19567 - protein, 922 aa, Spilarctia lutea
MRRKKRELIKQLRKAKAMGDNHLSHQLSRALRSILKLIQGISLQITKNRDNFNRAKHEVDFDKNPFQYSKNIFIEQKGKLLLTNQQIYDHFKSTYQVPKRGRRYEDPNIQKPHYPLVNFESCPPTLEEVDHQIKKKTSKSAPGPDGIPYIVYKKCPSVRKHLLNVFCKIWSKKQIPTSFGKAVFVLIPKKDEVTHPKDTRPIALTNTISKIFFSVLQTKMTKFMISNRYFRPNHQKGFLPGISGCLEHNTLLAESLKDARMHERQITVCWIDLENAFGSVQHELMIFALKWYNFPTVVIDIITSYYSQLQFAIAADKEHTETLHYNVGLFQGCCLSPIAFNIIINILIDKLISHEKKWGYRFKINNKYTESILAFADDLAILTRNPKQCQKLLIEVDEFCTWTDGLRAKPSKCHCLCLGRRNTKYTSYDPGLSIGGQCVTTIAEAVPFKFLGRKIDYKGRTPSLEVTVENFLSDLNKVDQQPLNNIKKVWIYDNYLTSRLTWPFLVYDIGKSLLAKLDANVKKILKSWLGIAHSADPSTLFRDQNSFGMKLKKPSELYKHLRVTKMHVLGQSQDEIVSSLPKDKYVTELESRLQFHKQFMAGAQFNKVGLGFAKRKGDREIIKSFIQQDENDKYKVHAMNLEMQSEWLTIGEFCIPLALKWRTLLYDWSPALLKFYLNAFQMTLPDQSNLVRWGKASEKSCYTCGEAVGTARHLLVGCRVLLDRGYYSRRHDRVLEIIREAVSLSVARAKKGLTTNKREINFIKDGSTTKSKSKPFSILGTAPDWTILMDTYDKHYKIPEDVGVSSSRPDIFLFSRQIKHIILVELTVPWETNIPKDHRIKLNKYYDLTTELNKNGYVVNLYAVEVGARGIPAKSLYNLLKDLGLSRSAVSSILERVSKAALTGSYQIWLGRAGNSSSEGDR

SEQ ID NO: 19568 - protein, 1162 aa, Spilarctia lutea
MNDIIKINNILDSTEVGRAYTCLPGECQRFIKVGKPITLMVERHLTGGKTSDCWKDSRGQWPSKPNPGNPKAKSPKKCNTPGTVREGGRKICPPIDINDDPGENTELRCPKCGKTYKRRAWYLKHLKTHDKVEARQSSVSTLTNTADRVNPHTSQGEPSCENHQESIAIRTRLSIPSLKNSTWKVHDENLAILLEHPGSKKDLNSQVETLQDTVYTYFCERYPPPNFYAHKDKENTFKSKMRRKKRELIKQLRKAKAMGDNHLSHQLSRALRSILKLIQGISLQITKNRDNFNRAKHEVDFDKNPFQYSKNIFNEQKGKLLLTNQQIYDHFKSTYQVPKRGRRYEDPNVQKPHYPLVDFESCPPTLEEVDHQIKKKTSKSAPGPDGIPYIVYKKCPSVRKHLLNVFCKIWSKKQIPTSFGKAIFVLIPKKDEVIHPKDTRPIALTNTISKIFFSVLQTKMTKFMISNRYFRPNHQKGFLPGISGCLEHNSLLAESLKDARMHERQITVCWIDLENAFGSVQHELMIFALKWYNFPTVVIDIITSYYSKLQFTIAANKEHTEPLHYNVGLFQGCCLSPIAFNIIINILIDKLISHEKKWGYRFKINNKYTESILAFADDLAILTRNPKQCQKLLIEVDEFCTWTDGLRAKPSKCHCLCLGRRNTKYTSYDPGLSIGGQCVTTIAEAVPFKFLGRKIDYKGRTPSLEITVENFLNDLNKVDQQPLNNIKKVWIYDNYLTSRLTWSFLVYDIGKSLLAKLDANVKKILKLWLGIAHSADPSTLFRDQNNFGMKLKKPSELYKHLRVTKMHVLGQSQDEIVSSLPKDKYVTELESRLQFHKQFMAGAQFNRVGLGFAKKKGDREIIKSFIQQDENDIYKVHAMNLEMQNEWLTIGEFCIPLALKWRTLLYDWSPALLKFYLNAFQMTLPDQSNLVRWGKASEKSCYTCGEAVGTARHLLVGCRVLLDRGYYSRRHDRVLEIIREAVSLSVARAQKGLTTNKREINFIKDGSTTKSKSKPFSILGTAPDWTILMDTYDKHYKIPEDVGVSSSRPDIFLFSRQIKHIILVELTVPWETNIPKDHRIKLNKYYDLTTELNKNGYVVNLYAVEVGARGIPAKSLYNLLKDLGLSRSAVSSILERVSKAALTGSYQIWLGRAGNSSSEGER

SEQ ID NO: 19569 - protein, 921 aa, Spilarctia lutea
MICKYLLRSFGVFYYHPTIYHLSHQLSRALRSILKLIQGISLQITKNRDNFNRAKHEVDFDKNPFQYSKNIFNEQKGKLLLTNQQIYDHFKSTYQVPKRGRRYEDPNVQKPHYPLVDFESCPPTLEEVDHQIKKKTSKSAPGPDGIPYIVYKKCPSIRKHLLNVFCKIWSKKQIPTSFGKAIFVLIPKKDEVIHPKDTRPIALTNTISKIFFSVLQTKMTKFMISNRYFRPNHQKGFLPGISGCLEHNTLLAESLKDARMHERQITVCWIDLENAFGSVQHELMIFALKWYNFPTVVIDIITSYYSKLQFTIAANKEHTEPLHYNVGLFQGCCLSPIAFNIIINILIDKLISHEKKWGYRFKINNKYTESILAFADDLAILTRNPKQCQKLLIEVDEFCTWTDGLRAKPSKCHCLCLGRRNTKYTSYDPGLSIGGQCVTTIAEAVPFKFLGRKIDYKGRTPSLEITVENFLNDLNKVDQQPLNNIKKVWIYDNYLTSRLTWSFLVYDIGKSLLAKLDANVKKILKLWLGIAHSADPSTLFRDQNNFGMKLKKPSELYKHLRVTKMHVLGQSQDEIVSSLPKDKYVTELESRLQFHKQFMAGAQFNRVGLGFAKKKGDREIIKSFIQQDENDIYKVHAMNLEMQSEWLTIGEFCIPLALKWRTLLYDWSPALLKFYLNAFQMTLPDQSNLVRWGKASEKSCYTCGEAVGTARHLLVGCRVLLDRGYYSRRHDRVLEIIREAVSLSVARAQKGLTTNKREINFIKDGSTTKSKSKPFSILGTAPDWTILMDTYDKHYKIPEDVGVSSSRPDIFLFSRQIKHIILVELTVPWETNIPKDHRIKLNKYYDLTTELNKNGYVVNLYAVEVGARGIPAKSLYNLLKDLGLSRSAVSSILERVSKAALTGSYQIWLGRAGNSSSEGER

SEQ ID NO: 19570 - protein, 922 aa, Spilarctia lutea
MRRKKRELIKQLRKAKAMGDNHLSHQLSRALRSILKLIQGISLQITKNRDNFNRAKHEVDFDKNPFQYSKNIFNEQKGKLLLTNQQIYDHFKSTYQVPKRGRRYEDPNVQKPHCPLVDFESCPPTLEEVDHQIKKKTSKSAPGPDGIPYIVYKKCPSVRKHLLNVFCKIWSKKQIPTSFGKAIFVLIPKKDEVIHPKDTRPIALTNTISKIFFSVLQTKMTKFMISNRYFRPNHQKGFLPGISGCLEHNTLLAESLKDARMHERQITVCWIDLENAFGSVQHELMIFALKWYNFPTVVIDIITSYYSKLQFTIAANKEHTEPLHYNVGLFQGCCLSPIAFNIIINILIDKLISHEKKWGYRFKINNKYTESILAFADDLAILTRNPKQCQKLLIEVDEFCTWTDGLRAKPSKCHCLCLGRRNTKYTSYDPGLSIGGQCVTTIAEAVPFKFLGRKIDYKGRTPSLEITVENFLNDLNKVDQQPLNNIKKVWIYDNYLTSRLTWSFLVYDIGKSLLAKLDANVKKILKLWLGIAHSADPSTLFRDQNNFGMKLKKPSELYKHLRVTKMHVLGQSQDEIVSSLPKDKYVTELESRLQFHKQFMAGAQFNRVGLGFAKKKGDREIIKSFIQQDENDIYKVHAMNLEMQSEWLTIGEFCIPLALKWRTLLYDWSPALLKFYLNAFQMTLPDQSNLVRWGKASEKSCYTCGEAVGTARHLLVGCRVLLDRGYYSRRHDRVLEIIREAVSLSVARAQKGLTTNKREINFIKDGSTTKSKSKPFSILGTAPDWTILMDTYDKHYKIPEDVGVSSSRPDIFLCSRQIKHIILVELTVPWETNIPKDHRIKLNKYYDLTTELNKNGYVVNLYAVEVGARGIPAKSLYNLLKDLGLSRSAVSSILERVSKAALTGSYQIWLGRAGNSSSEGER

SEQ ID NO: 19571 - protein, 922 aa, Spilarctia lutea
MRRKKRELIKQLRKAKAMGDNHLSHQLSRALRSILKLIQGISLQITKNRDNFNRAKHEVDFDKNPFQYSKNIFNEQKGKLLLTNQQIYDHFKSTYQVPKRGRRYEDPNIQKPHYPLVNFESCPPTLEEVDHQIKKKTSKSAPGPDGIPYIVYKKCPSVRKHLLNVFCKIWSKKQIPTSFGKAVFVLIPKKDEVTHPKDTRPIALTNTISKIFFSVLQTKMTKFMISNRYFRPNHQKGFLPGISGCLEHNTLLAESLKDARMHERQITVCWIDLENAFGSVQHELMIFALKWYNFPTVVIDIITSYYSQLQFAIAADKEHTETLHYNVGLFQGCCLSPIAFNIIINILIDKLISHEKKWGYRFKINNKYTESILAFADDLAILTRNPKQCQKLLIEVDEFCTWTDGLRAKPSKCHCLCLGRRNTKYTSYDPGLSIGGQCVTTIAEAVPFKFLGRKIDYKGRTPSLEVTVENFLSDLNKVDQQPLNNIKKVWIYDNYLTSRLTWPFLVYDIGKSLLAKLDANVKKILKSWLGIAHSADPSTLFRDQNSFGMKLKKPSELYKHLRVTKMHVLGQSQDEIVSSLPKDKYVTELESRLQFHKQFMAGAQFNKVGLGFAKRKGDREIIKSFIQQDENDKYKVHAMNLEMQSEWLTIGEFCIPLALKWRTLLYDWSPALLKFYLNAFQMTLPDQSNLVRWGKASEKSCYTCGEAVGTARHLLVGCRVLLDRGYYSRRHDRVLEIIREAVSLSVARAQKGLTTNKREINFIKDGSTTKSKSKPFSILGTAPDWTILMDTYDKHYKIPEDVGVSSSRPDIFLFSRQIKHIILVELTVPWETNIPKDHRIKLNKYYDLTTELNKNGYVVNLYAVEVGARGIPAKSLYNLLKDLGLSRSAVSSILERVSKAALTGSYQIWLGRAGNSSSEGDR

SEQ ID NO: 19572 - protein, 922 aa, Spilarctia lutea
MRRKKRELIKQLRKAKAMGDNHLSHQLSRALRSILKLIQGISLQITKNRDNFNRAKHEVDFDKNPFQYSKNIFNEQKGKLLLTNQQIYDHFKSTYQVPKRGRRYEDPNVQKPHYPLVDFESCPPTLEEVDHQIKKKTSKSAPGPDGIPYIVYKKCPSVRKHLLNVFCKIWSKKQIPTSFGKAIFVLIPKKDEVIHPKDTRPIALTNTISKIFFSVLQTKMTKFMISNRYFRPNHQKGFLPGISGCLEHNTLLAESLKDARMHERQITVCWIDLENAFGSVQHELMIFALKWYNFPTMVIDIITSYYSKLQFTIAANKEHTEPLHYNVGLFQGCCLSPIAFNIIINILIDKLISHEKKWGYRFKINNKYTESILAFADDLAILTRNPKQCQKLLIEVDEFCTWTDGLRAKPSKCHCLCLGRRNTKYTSYDPGLSIGGQCVTTIAEAVPFKFLGRKIDYKGRTPSLEITVENVLNDLNKVDQQPLNNIKKVWIYDNYFTSRLTWPFLVYDIGKSLLAKLDANVKKILKLWLGIAHSADPSTLFRDQNNFGMKLKKPSELYKHLRVTKMHVLGQSQDEIVSSLPKDKYVTELESRLQFHKPFMAGAQFNRVGLGFAKKKGDREIIKSFIQQDENDIYKVHAMNLEMQSEWLTIGEFCIPLALKWRTLLYDWSPALLKFYLNAFQMTLPDQSNLVRWGKASEKSCYTCGEAVGTARHLLVGCRVLLDRGYYSRRHDRVLEIIREAVSLSVARAQKGLTTNKREINFIKDGSTTKSKSKPFSILGTAPDWTILMDTYDKHYKIPEDVGVSSSRPDIFLFSRQIKHIILVELTVPWETNILKDHRIKLNKYYDLTTELNKNGYVVNLYAVEVGARGIPAKSLYNLLKDLGLSRSAVSSILERVSKAALTGSYQIWLGRAGNSSSEGER

SEQ ID NO: 19573 - protein, 922 aa, Spilarctia lutea
MRRKKRELIKQLRKAKAMGDNHLSHQLSRALRSILKLIQGISLQITKNRDNFNRAKHEVDFDKNPFQYSKNIFNEQKGKLLLTNQQIYDHFKSTYQVPKRGRRYEDPNVQKPHCPLVDFESCPPTLEEVDHQIKKKTSKSAPGPDGIPYIVYKKCPSVRKHLLNVFCKIWSKKQIPTSFGKAIFVLIPKKDEVIHPKDTRPIALTNTISKIFFSVLQTKMTKFMISNRYFRPNHQKGFLPGISGCLEHNTLLAESLKDARMHERQITVCWIDLENAFGSVQHELMIFALKWYNFPTVVIDIITSYYSKLQFTIAANKEHTEPLHYNVGLFQGCCLSPIAFNIIINILIDKLISHEKKWGYRFKINNKYTESILAFADDLAILTRNPKQCQKLLIEVDEFCTWTDGLRAKPSKCHCLCLGRRNTKYTSYDPGLSIGGQCVTTIAEAVPFKFLGRKIDYKGRTPSLEITVENFLNDLNKVDQQPLNNIKKVWIYDNYLTSRLTWSFLVYDIGKSLLAKLDANVKKILKLWLGIAHSADPSTLFRDQNNFGMKLKKPSELYKHLRVTKMHVLGQSQDEIVSSLPKDKYVTELESRLQFHKQFMAGAQFNRVGLGFAKKKGDREIIKSFIQQDENDIYKVHAMNLEMQSEWLTIGEFCIPLALKWRTLLYDWSPALLKFYLNAFQMTLPDQSNLVRWGKASEKSCYTCGEAVGTARHLLVGCRVLLDRGYYSRRHDRVLEIIREAVSLSVARAQKGLTTNKREINFIKDGSTTKSKSKPFSILGTAPDCTILMDTYDKHYKIPEDVGVSSSRPDIFLCSRQIKHIILVELTVPWETNIPKDHRIKLNKYYDLTTELNKNGYVVNLYAVEVGARGIPAKSLYNLLKDLGLSRSAVSSILERVSKAALTGSYQIWLGRAGNSSSEGER

SEQ ID NO: 19574 - protein, 919 aa, Spilarctia lutea
MRRKKRELIKQLRKAKAMGDNHLSHQLSRALRSILKLIQGISLQITKNRDNFNRAKHEVDFDKNPFQYSKNIFNEQKGKLLLTNQQIYDHFKSTYQVPKRGRRYEDPNVQKPHYPLVDFESCPPTLEEVDHQIKKKTSKSAPGPDGIPYIVYKKCPSVRKHLLNVFCKIWSKKQIPTSFGKAIFVLIPKKDEVIHPKDTRPIALTNTISKIFFSVLQTKMTKFMISNRYFRPNHQKGFLPGISGCLEHNTLLAESLIDARMHERQITVCWIDLENAFGSVQHELMIFALKWCNFPTVVIDIITSYYSKLQFTIAANKEHTEPLHYNVGLFQGCCLSPIAFNIIINILIDKLISHEKKWGYRFKINNKYTESILAFADDLAILTRNPKQCQKLLIEVDEFCTWTDGLRAKPSKCHCLCLGRRNTKYTSYDPGLSIGGQCVTTIAEAVPFKFLGRKIDYKGRTPSLEITVENFLNDLNKVDQQPLNNIKKVWIYDNYLTSRLTWPFLVYDIGKSLLAKLDANVKKILKLWLGIAHSADPSTLFRDQNNFGMKLKKPSELYKHLRVTKMHVLGQSQDEIVSSLPKDKYVTELESRLQFHKQFMAGAQFNRVGLGFAKKKGDREIIKSFIQQDENDIYKVHAMNLEMQSEWLTIGEFCIPLALKWRTLLYDWSPALLKFYLNAFQMTLPDQSNLVRWGKASEKSCYTCGEAVGTARHLLVGCRVLLDRGYYSRRHDRVLEIIREAVSLSVARAQKGLTTNKREINFIKDGSTTKSKSKPFSILGTAPDADDTYDKHYKIPEDVGVSSSRPDIFLFSRQIKHIILVELTVPWETNIPKDHRIKLNKYYDLTTELNKNGYVVNLYAVEVGARGIPAKSLYNLLKDLGLSRSAVSSILERVSKAALTGSYQIWLGRAGNSSSEGER

SEQ ID NO: 19575 - protein, 922 aa, Spilarctia lutea
MRRKKRELIKQLRKAKAMGDNHLSHQLSRALRSILKLIQGISLQITKNRDNFNRAKHEVDFDKNPFQYSKNIFNEQKGKLLLTNQQIYDHFKSTYQVPKHGRRYEDPNIQKPHYPLVNFESCPPTLEEVDHQIKKKTSKSAPGPDGIPYIVYKKCPSVRKHLLNVFCKIWSMKQIPTSFGKAVFVLIPKKDEVTHPKDTRPIALTNTISKIFFSVLQTKMTKFMISNRYFRPNHQKGFLPGISGCLEHNTLLAESLKDARMHERQITVCWIDLENAFGSVQHELMIFALKWYNFPTVVIDIITSYYSQLQFAIAADKEHTETLHYNVGLFQGCCLSPIAFNIIINILIDKLISHEKKWGYRFKINNKYTESILAFADDLAILTRNPKQCQKLLIEVDEFCTWTDGLRAKPSKCHCLCLGRRNTKYTSYDPGLSIGGQCVTTIAEAVPFKFLGRKIDYKGRTPSLEVTVENFLSDLNKVDQQPLNNIKKVWIYDNYLTSRLTWPFLVYDIGKSLLAKLDANVKKILKSWLGIAHSADPSTLFRDQNSFGMKLKKPSELYKHLRVTKMHVLGQSQDEIVSSLPKDKYVTELESRLQFHKQFMAGAQFNKVGLGFAKRKGDREIIKSFIQQDENDKYKVHAMNLEMQSEWLTIGEFCIPLALKWRTLLYDWSPALLKFYLNAFQMTLPDQSNLVRWGKASEKSCYTCGEAVGTARHLLVGCRVLLDRGYYSRRHDRVLEIIREAVSLSVARAQKGLTTNKREINFIKDGSTTKSKSKPFSILGTAPDWTILMDTYDKHYKIPEDVGVSSSRPDIFLFSRQIKHIILVELTVPWETNIPKDHRIKLNKYYDLTTELNKNGYVVNLYAVEVGARGIPAKSLYNLLKDLGLSRSAVSSILERVSKAALTGSYQIWLGRAGNSSSEGDR

SEQ ID NO: 19576 - protein, 920 aa, Spilarctia lutea
MRRKKRELIKQLRKAKAMGDNHLSHQLSRALRSILKLIQGISLQITKNRDNFNRAKHEVDFDKNPFQYSKNIFNEQKGKLLLTNQQIYDHFKSTYQVPKRGRRYEDPNIQKPHYPLVNFESCPPTLEEVDHQIKKKTSKSAPGHDGIPYKKKCPSVRKHLLNVFCKIWSKKQIPTSFGKAVFVLIPKKDEVTHPKDTRPIALTNTISKIFFSVLQTKMTKFMISNRYFRPNQQKGFLPGISGCLEHNTLLAESLKDARMHERQITVCWIDLENAFGSVQHELMIFALKWYNFPTVVIDIITSYYSQLQFAIAADKKHTETLHYNVGLFQGCCLSPIAFNIIINILIDKLISHEKKWGYRFKINNKYTESILAFADDLAILTRNPKQCQRLLIEVDEFCTWTDGLRAKPSKCHCLCLGRRNTKYTSYDPGLSIGGQCVTTIAEAVPFKFLGRKIDYKGRTPSLEVTVENFLSDLNKVDQQPLNNIKKVWIYDNYLTSRLTWPFLVYDISKNLLVKLDANVKKILKSWLGIAHSADPSTLFRDQNSFGMKLKKPSELNKHLRVTKMHVLGQSQDEIVSSLPKDKYVTELESRLQFHKQFMAGAQFNKVGLGFAKRKGDREIIKSFIQQDENDKYKVHAMNLEMQSEWLTIGEFCIPLALKWRTLLYDWSPALLKFYLNAFQMTLPDQSNLVRWGKASEKSCYTCGLAVGTARHLLVGCRVLLDRGYYSRRHDRVLEIIREAVSLSVARAQKGLTTNKREINFIKDGSTTKSKSKPFSILGTAPDWTILMDTYDKHYKIAEDVGVSSSRPDIFLFSRQIKHIILVELTVPWETNIPKDHRIKLNKYYDLTTELNKNGYVVNLYAVEVGARGIPAKSLYNLLKDLGLSRSAVSSILERVSKAALTGSYQIWLGRAGNSSSEGDR

SEQ ID NO: 19577 - protein, 953 aa, Eilema sororculum
MRKRKRDLIKRLRIAKAMGDNQLSHQLARALRAILKLIQGISAQIINENNNLNRAKHEVEFDKDPFKYSRNIFSDKKQDRLLLNNDQIYSYYKNNYEVPKHEKPYGEPKAQKPSNPHFTFNCNPPSLEEIEHQIKKKPTKTAPGPDGIPYIIYKKCPSVRKHVLSIFNRIWSSKEIPAAFGRANFVLIPKKEIVTSPKDARPIALTNTISKIFFSWLQLKMTNFMINNNYFRPNHQKGFLPGISGCLEHNSLLAESLKDARLNERQITVCWIDLENAFGSVHHQLMLFALKWYNFPSIIREIIASYYDKLKFVINTKDGHTQPLNYNVGLFQGCCLSPRVFNIVINILIDSITTHERKWGYRFKLNGKYTESILAFADDLAILTRSPKQCQDLLRKVDEFCTWTEGMKTKPSKCYCLCLGRRGTRYTSYDPGLSIGGENVSTISETVPFKFLGRQIDNRGCTPALEEVINNFIIDIQKVDQQPLSNVKKAWIYDNYLTSRLNWPFLVYDISQSLLKKLDANVTKTLKSWLGLAQSADPSTLYRASNNFGMTFKKPSELYKHLRVTKMHVLAKSKDEIVQALPKDQSTKELESRLQFHKKFMIGSQTGRVGLGNTRRQSDKDITKSFLQVDENNTYKVHAMNLEIQNEWLTLGEFCIPIALKWRTLIYDWSPALLKFYLNAFQLTLPDQSNLVRWGKATDKTCNSCGEAIGTARHLLVGCRTLLDRGHYSRRHDKVLEIVREAVSLAVARAKKGLTTNQRNDVAFVKEGCSKKTNQKPYSILIAAADWTLLADSYEKHYKIPEDVCASSSRPDIFLFSKQQKRAVLVELTVPWETNIPKDHAIKINKYFDLTNELTKNGYVVKLYAVEVGARGIPAKSLYNLFKDLGLPRASVSSLLKRISKTALIGSYQRRMGKMYGLWSTYSIPTPPMLNNRVYFGEPITHNEAVLGDGIFF

SEQ ID NO: 19578 - protein, 925 aa, Eilema sororculum
MRKRKRDLIKRLRIAKAMGDNQLSHQLARALRAILKLIQGISAQIINENNNLNRAKHEVEFDKDPFKYSRNIFSDKKQDRLLLNNDQIYSYYKNNYEVPKHEKPYGEPKAQKPSNPHFTFNCNPPSLEEIEHQIKKKPTKTAPGPDGIPYIIYKKCPSVRKHVLSIFNRIWSSKEIPAAFGRANFVLIPKKEIVTSPKDARPIALTNTISKIFFSWLQLKMTNFMINNNYFRPNHQKGFLPGISGCLEHNSLLAESLKDARLNERQITVCWIDLENAFGSVHHQLMLFALKWYNFPSIIREIIASYYDKLKFVINTKDGHTQPLNYNVGLFQGCCLSPIVFNIVINILIDSITTHERKWGYRFKLNGKYTESILAFADDLAILTRSPKQCQDLLRKVDEFCTWTEGMKTKPSKCYCLCLGRRGTRYTSYDPGLSIGGENVSTISETVPFKFLGRQIDNRGCTPALEEVINNFIIDIQKVDQQPLSNVKKAWIYDNYLTSRLNWPFLVYDISQSLLKKLDANVTKTLKSWLGLAQSADPSTLYRASNNFGMTFKKPSELYKHLRVTKMHVLAKSKDEIVQALPKDQSTKELESRLQFHKKFMIGSQTGRVGLGNTRRQSDKDITKSFLQVDENNTYKVHAMNLEIQNEWLTLGEFCIPIALKWRTLIYDWSPALLKFYLNAFQLTLPDQSNLVRWGKATDKTCNSCGEAIGTARHLLVGCRTLLDRGHYSRRHDKVLEIVREAVSLAVARAKKGLTTNQRNDVAFVKEGCSKKTNQKPYSILIAAADWTLLADSYEKHYKIPEDVCASSSRPDIFLFSKQQKRAVLVELTVPWETNIPKDHAIKINKYFDLTNELTKNGYVVKLYAVEVGARGIPAKSLYNLFKDLGLPRASVSSLLKRISKTALIGSYQIWIGRGGNTTDGGGER

SEQ ID NO: 19579 - protein, 705 aa, Eilema depressum
MANFMINNNYFRPNHQKGFLPGISGCLEHNSLLAESLKDARSNEKQITVCWIDLENAFGSVQHELMLFALKWYHFPSTIWEIISSYYGKLKFVINTKDGYTQPLNYNVGLFQGCCLSPIVFNIVINILIDNISTHDKKWGYRFKLNGKYTESILAFADDLAILTRNPKQCQDLLRRVDDFCAWTDGMKTKPSKCYCLCLGRRGTRYTSYDPGLSIGGENVSTISETVPFKFLGRKIDNRGCTPALDELIDSFIIDLKKVDQQPISNVKKAWIYDNYLTSRLNWPFLIYDINQSLLKKLDASVTKTLKSWLGLAQSADPSALYRSANNFGMTLKKPSELYKHLRVTKMHVLSKSKDEIVKVLPKDKNASELESRLQFHKKFMIGSQTGRVGLGNIQKQTDKEITKSFLQTDENNTYKVHAMNLEMQNEWLTLGEFCIPIALKWRTIIYDWSPALLKFYLNAFQLTLPDQSNLVRWGKATDKTCNSCGEATGTARHLLVGCRTLLDRGHYSRRHDKVLEIIREAVSLAVARAKKGLTTNQRNDIVFVKEGCSKKSPQKPYSILIAAVDWTILVDTYEKHYKIPEDICASSSRPDIFLFSRSHRRAVLVELTVPWETNIPKDHAIKTNKYFDLTNELTKNGYVVKLYAVEVGARGIPAKSLYNLLKDLGLPRASVSSLLNRISKAALLGSYQIWIGRGGNTTDGGGER

SEQ ID NO: 19580 - protein, 925 aa, Eilema depressum
MRKKKRDLIKRLRFAKAMGDNQLSHQLARALRSILKLIQGISMQIINENNNFNRAKHEVEFDKDPFKYSRNIFCDRKQDRLPLSNDQIHSYYKSNYEVPKYEKLYNKPNAKKPLSPHFTFDCNPPSLEEIEHQIKKKPTKTAPGPDGIPYIIYKKCPSVRKHLLSIFNRIWSSKEVPAAFGKANFVLIPKKEIVTSPKDARPIALTNTISKIFFSWLQFKMANFMINNNYFRPNHQKGFLPGISGCLEHNSLLAESLKDARSNEKQITVCWIDLENAFGSVQHELMLFALKWYHFPSIIWEIISSYYGKLKFVINTKDGYTQPLNYNVGLFQGCCLSPIVFNIVINILIDNISTHDKKWGYRFKLNGKYTESILAFADDLAILTRNPKQCQDLLRRVDDFCAWTDGMKTKPSKCYCLCLGRRGTRYTSYDPGLSIGGENVSTISETVPFKFLGRKIDNRGCTPALDELIDSFIIDLKKVDQQPISNVKKAWIYENYLTSRLNWPFLIYDINQSLLKKLDASVTKTLKSWLGLAQSADPSALYRSANNFGMTFKKPSELYKHLRVTKMHVLSKSKDEIVKVLPKDKNASELESRLQFHKKFMIGSQTGRVGLGNIRKQTDKEITKSFLQADENNTYKVHAMNLEMQNEWLTLGEFCIPIALKWRTIIYDWSPALLKFYLNAFQLTLPDQSNLVRWGKATDKTCNSCGEATGTARHLLVGCRTLLDRGHYSRRHDKVLEIIREAVSLAVARAKKGLTTNQRNDIMFVKEGCSKKSSQKPYSILITAVDWTILVDTYEKHYKIPEDICASSSRPDIFLFSRSHRRAVLVELTVPWETNIPKDHAIKTNKYFDLTNELTKNGYVVKLYAVEVGARGIPAKSLYNLLKELGLPRASVSSLLNRISKAALIGSYQIWIGRGGNTTDGGGER

SEQ ID NO: 19581 - protein, 908 aa, Conopomorpha cramerella
MGDKQLSHQLARALRSILKLIQGVSVQIMKETNSFNRAKHEVEFDRDPFKYSRNIFNDSQQNRLLLSNDQIYNYYKSYYEVPKYEKLYTDPRAQRPANPQFTFDCNPPSLEEIELKIKQKSTKSAPGPDGIPNIIYKKCPSVRKHLLSIFRKIWSSKEIPAAFGKANFVLIPKKETVTSPSDTRPIALTNTISKIFFSWLQYKMTSYMIHNNYFRPNHQKGFLPGISGCLEHNTLLAESLKDARSNERQITACWIDLENAFGSVQHELMLFALKWYNFPPIIIETIASYYQKLKFVIKIKEGHTQPLNYNIGLFQGCCLSPIVFNIVINILIDSILIYEKKWGYRFKTNGKYTESVLAFADDLAILTRNPKQCQELLRKVDEFCMWTDGMRVKPSKCYCLALGRRDTRYMSYDPGLSIGGEKVSIISETVPFKFLGRKINHRGCTPALDEVIDDFIVNLSKVDQQPLSNVKKAWIYDNYLTSRLNWPFLVYDINQNLLKKLDANVTKTLKSWLGLAQSADPSTLYRASNNFGMKLKKPSELYKHLRVTKTRVLSKSKDEIVQALPKDKNMSELESRLQFHKKFMVGTQTGRAGLGCTRKQTDKEIAKSFLKQDENDIYRVHAMNLEMQNEWLTLGEFCIPLALNWRTLIYDWSPALLKFYLNAFQLTLPDQSNLVRWGKATDKTCNTCGEEIGTARHLLVGCKTLLDRGLYSRRHDRVLEIVRDAVSLAVARAKKGLTTNIRNDIKFVKEGSSKKTPQKPYSVLATATDWTLLVDAYEKHYRIPEDICTSASRPDIFLFSRLKKRVILIELTVPWETNIPKDHAIKTNKYFDLTNELTKNGFLVTLYAVEVGARGIPAKSLYNLFKDLGLPRASVSSLLERTSKAALVGSYQIWIGRRGNMGAGEGEC

SEQ ID NO: 19582 - protein, 925 aa, Eilema sororculum
MRKRKRDLIKRLRIAKAMGDNQLSHQLARALRAILKLIQGISAQIINENNNLNRAKHEVEFDKDPFKYSRNIFSDKKQDRLLLNNDQIYSYYKNNYEVPKHEKPYGEPKAQKPSNPHFTFNCNPPSLEEIEHQIKKKPTKTAPGPDGIPYIIYKKCPSVRKHVLSIFNRIWSSKEIPAAFGRANFVLIPKKEIVTSPKDARPIALTNTISKIFFSWLQLKMTNFMINNNYFRPNHQKGFLPGISGCLEHNSLLAESLKDARLNERQITVCWIDLENAFGSVHHQLMLFALKWYNFPSIIREIIASYYDKLKFVINTKDGHTQPLNYNVGLFQGCCLSPIVFNIVINILIDSITTHERKWGYRFKLNGKYTESILAFADDLAILTRSPKQCQDLLRKVDEFCTWTEGMKTKPSKCYCLCLGRRGTRYTSYDPGLSIGGENVSTISETVPFKFLGRQIDNRGCTPALEEVINNFIIDIQKVDQQPLSNVKKAWIYDNYLTSRLNWPFLVYDISQSLLKKLDANVTKTLKSWLGLAQSADPSTLYRASNNFGMTFKKPSELYKHLRVTKMHVLAKSKDEIVQALPKDQSTKELESRLQFHKKFMIGSQTGRVGLGNTRRQSDKDITKSFLQVDENNTYKVHAMNLEIQNEWLTLGEFCIPIALKWRTLIYDWSPALLKLYLNAFQLTLPDQSNLVRWGKATDKTCNSCGEAIGTARHLLVGCRTLLDRGHYSRRHDKVLEIVREAVSLAVARAKKGLTTNQRNDVAFVKEGCSKKTNQKPYSILIAATDWTLLADSYEKHYKIPEDVCASSSRPDIFLFSKQQKRAVLVELTVPWETNIPKDHAIKINKYFDLTNELTKNGYVVKLYAVEVGARGIPAKSLYNLFKDLGLPRASVSSLLKRISKTALIGSYQIWIGRGGNTTDGGGER

SEQ ID NO: 19583 - protein, 908 aa, Eilema sororculum
MGDNQLSHQLARALRAILKLIQGISAQIINENNNLNRAKHEVEFDKDPFKYSRNIFSDKKQDRLLLNNDQIYSYYKNNYEVPKHEKPYGEPKAQKPSNPHFTFNCNPPSLEEIEHQIKKKPTKTAPGPDGIPYIIYKKCPSVRKHLLSIFNRIWSSKEIPAAFGRANFVLIPKKEIVTSPKDARPIALTNTISKIFFSWLQFKMTNFMINNNYFRPNHQKGFLPGISGCLEHNSLLAESLKDARLNERQITVCWIDLENAFGSVHHQLMLFALKWYNFPSIIREIIASYYDKLKFVINTKDGHTQPLNYNVGLFQGCCLSPIVFNIVINILIDSITTHERKWGYRFKLNGKYTESILAFADDLAILTRSPKQCQDLLRKVDEFCTWTDGMKTKPSKCYCLCLGRRGTRYTSYDPGLSIGGENVSTISETVPFKFLGRKIDNRGCTPALEEVINNFIIDIQKVDQQPLSNVKKAWIYDNYLTSRLNWPFLVYDISQSLLKKLDANVTKTLKSWLGLAQSADPSTLYRASNNFGMTFKKPSELYKHLRVTKMHVLAKSKDEIVQALPKDQSTKELESRLQFHKKFMIGSQTGRVGLGNTRRQSDKDITKSFLQVDENNTYKVHAMNLEVQNEWLTLGEFCIPIALKWRTLIYDWSPALLKFYLNAFQLTLPDQSNLVRWGKATDKTCNSCGEAIGTARHLLVGCRTLLDRGHYSRRHDKVLEIVREAVSLAVARAKKGLTTNQRNDVAFVKEGCSKKTNQKPYSILIAAADWTLLADSYEKHYKIPEDVCASSSRPDIFLFSKQQKRAVLVELTVPWETNIPKDHAIKINKYFDLTNELTKNGYVVKLYAVEVGARGIPAKSLYNLFKDLGLPRASVSSLLKRISKTALIGSYQIWIGRGGNTTDGGGER

SEQ ID NO: 19584 - protein, 908 aa, Conopomorpha cramerella
MGDKQLSHQLARALRSILKLIQGVSVQIMKETNSFNRAKHEVEFDRDPFKYSRNIFNDSQQNRLLLSNDQIYNYYKSYYEVPKYEKLYTDPRAQRPANPQFTFDCNPPSLEEIELKIKQKSTKSAPGPDGIPNIIYKKCPSVRKHLLSIFRKIWSSKEIPAAFGKANFVLIPKKETVTSPSDTRPIALTNTISKIFFSWLQYKMTSYMIHNNYFRPNHQKGFLPGISGCLEHNTLLAESLKDARSNERQITACWIDLENAFGSVQHELMLFALKWYNFPPIIIETIASYYQKLKFVIKIKEGHTQPLNYNIGLFQGCCLSPIVFNIVINILIDSILIYEKKWGYRFKTNGKYTESVLAFADDLAILTRNPKQCQELLRKVDEFCMWTDGMRVKPSKCYCLALGRRDTRYMSYDPGLSIGGEKVSIISETVPFKFLGRKINHRGCTPALDEVIDDFIVNLSKVDQQPLSNVKKAWIYDNYLTSRLNWPFLVYDINQNLLKKLDANVTKTLKSWLGLAQSADPSTLYRASNNFGMKLKKPSELYKHLRVTKTRVLSKSKDEIVQALPKDKNMSELESRLQFHKKIMVGTQTGRAGLGCTRKQTDKEIAKSFLKQDENDIYRVHAMNLEMQNEWLTLGEFCIPLALKWRTLIYDWSPALLKFYLNAFQLTLPDQSNLVRWGKATDKTCNTCGEAIGTARHLLVGCKTLLDRGLYSRRHDRVLEIVRDAVSLAVARAKKGLTTNIRNDIKFVKKGSSKKTPQKPYSVLATATDWTLLVDAYEKHYRIPEDICTSTSRPDIFLFSRLKKRVILIELTVPWETNMPKDHAIKTNKYFDLTNELTKNGFLVTLYAVEVGARGIPAKSVYNLFKDLGLPRASVSSLLERTSKAALVRSYQIWIGRRGNMGAGEGEC

SEQ ID NO: 19585 - protein, 908 aa, Eilema sororculum
MGDNQLSHQLARALRAILKLIQGISAQIINESNNLNRAKHEVEFDKDPFKYSRNIFSDKKQDRLLLNNDQIYSYYKNNYEVPKHEKPYGEPKAQKPSNPHFIFNCNPPSLEEIEHQIKKKPTKTAPGPDGIPYIIYKKCPSVRKHLLSIFNRIWSSKEIPAAFGRANFVLIPKKEIVTSPKDARPIALTNTISKIFFSWLQFKMTNFMINNNYFRPNHQKGFLPGISGCLEHNSLLAESLKDARLNERQITVCWIDLENAFGSVHHQLMLFALKWYNFPSIIREIIASYYDKLKFVINTKDGHTQPLNYNVGLFQGCCLSPIVFNIVINILLDSITTYERKWGYRFKLNGKYTESILAFADDLAILTRSPKQCQDLLRKVDEFCTWTDGMKTKPSKCYCLCLGRRGTRYTSYDPGLSIGGENVSTISETVPFKFLGRKIDNRGCTPALEEVINNFIIDIQKVDQQPLSNVKKAWIYDNYLTSRLNWPFLVYDISQSLLKKLDANVTKTLKSWLGLAQSADPSTLYRASNNFGMTFKKPSELYKHLRVTKMHVLAKSKDEIVQALPKDQSTKELESRLQFHKKFMIGSQTGRVGLGNTRRQSDKDITKSFLQVDENNTYKVHAMNLEVQNEWLTLGEFCIPIALKWRTLIYDWSPALLKFYLNAFQLTLPDQSNLVRWGKATDKTCNSCGEAIGTARHLLVGCRTLLDRGHYSRRHDKVLEIVREAVSLAVARAKKGLTTNQRNDVAFVKEGCSKKTNQKPYSILIAAADWTLLADSYEKHYKIPEDVCASSSRPDIFLFSKQQKRAVLVELTVPWETNIPKDHAIKINKYFDLTNELTKNGYVVKLYAVEVGARGIPAKSLYNLFKDLGLPRASVSSLLKRISKTALIGSYQIWIGRGGNTTDGGGER

SEQ ID NO: 19586 - protein, 919 aa, Eilema depressum
MRKKKRDLIKRLRFAKAMGDNQLSHQLARALRSILKLIQGISFQIINENNNFIRAKHEVEFDKDPFKYSRNIFSDRKQDRLPLSNDQIHSYYKSNYEVPKYKKPYSKPNAQKPVSPHFAFDCNPPSLDEIEQQIKKKPTKTAPGPDGIPYIIYKKCPSVRKHLLSIFNRIWSSKEVPAAFGKANFVLIPKKEIVTSPKDARPIALTNTISKVFFSWLQFKMANFMINNNYFRPNHQKGFLPGISGCLEHNSLLAESLKDARSNEKQITVCWIDLENAFGSVQHELMLFALKWYHFPSTIWEIISSYYGKLKFVIKTKDGYTQPLNYNVGLFQGCCLSPIVFNIVINILIDNISTHDKKWGYRFKLNGKYTESILAFADDLAILTRNPKQCQDLLRRVDDFCAWTDGMKTKPSKCYCLCLGRRGTKYTSYDPGLSIGGENVSTISETVPFKFLGRKIDNRGCTPALDELIDSFIIDLKKVDHQPISNVKKAWIYDNYLTSRLNWPFLIYDINQSLLKKLDASVTKTLKSWLGLAQSADPSALYRSANNFGMTLKKPSELYKHLRVTKMHVLSKSKDEIVKVLPKDKNASELESRLQFHKKFMIGSQTGRVGLGNIQKQTDKEITKSFLQTDENNTYKVHAMNLEMQNEWLTLGEFCIPIALKWRTIIYDWSPALLKFYLNAFQLTLPDQSNLVRWGKATDKTCNSCGEATGTARHLLVGCRTLLDRGHYSRRHDKVLEIIREAVSLAVARAKKGLTTNQRNDIVFVKEGCSKKSPQKPYSILIAAVDWTILVDTYEKHYKIPEDICASSSRPDIFLFSRSHRRAVLVELTVPWETNIPKDHAIKTNKYFDLTNELTKNGYVVKLYAVEVGARGIPAKSLYNLLKDLGLPRASVSSLLNRISKAALIGSYQIWIGRGGEHY

SEQ ID NO: 19587 - protein, 908 aa, Eilema sororculum
MGDNQLSHQLARALRAILKLIQGISAQIINESNNLNRAKHEVEFDKDPFKYSRNIFSDKKQDRLLLNNDQIYSYYKNNYEVPKHEKPYGEPKAQKPSNPHFTFNCNPPSLEEIEHQIKKKPTKTAPGPDGIPYIIYKKCPSVRKHLLSIFNRIWSSKEIPAAFGRANFVLIPKKEIVTSPKDARPIALTNTISKIFFSWLQFKMTNFMINNNYFRPNHQKGFLPGISGCLEHNSLLAESLKDARLNERQITVCWIDLENAFGSVHHQLMLFALKWYNFPSIIREIIASYYDKLKFVINTKDGHTQPLNYNVGLFQGCCLSPIVFNIVINILLDSITTYERKWGYRFKLNGKYTESILAFADDLAILTRSPKQCQDLLRKVDEFCTWTDGMKTKPSKCYCLCLGRRGTRYTSYDPGLSIGGENVSTISETVPFKFLGRKIDNRGCTPALEEVINNFIIDIQKVDQQPLSNVKKAWIYDNYLTSRLNWPFLVYDISQSLLKKLDANVTKTLKSWLGLAQSADPSTLYRASNNFGMTFKKPSELYKHLRVTKMHVLAKSKDEIVQALPKDQSTKELESRLQFHKKFMIGSQTGRVGLGNTRRQSDKDITKSFLQVDENNTYKVHAMNLEVQNEWLTLGEFCIPIALKWRTLIYDWSPALLKFYLNAFQLTLPDQSNLVRWGKATDKTCNSCGEAIGTARHLLVGCRTLLDRGHYSRRHDKVLEIVREAVSLAVARAKKGLTTNQRNDVAFVKEGCSKKTNQKPYSILIAAADWTLLADSYEKHYKIPEDVCASSSRPDIFLFSKQQKRAVLVELTVPWETNIPKDHAIKINKYFDLTNELTKNGYVVKLYAVEVGARGIPAKSLYNLFKDLGLPRASVSSLLKRISKTALIGSYQIWIGRGGNTTDGGGER

SEQ ID NO: 19588 - protein, 705 aa, Eilema depressum
MANFMINNNYFRPNHQKGFLPGISGCLEHNSLLAESLKDARSNEKQITVCWIDLENAFGSVQHELMFFALKWYHFPSTIWEIISSYYGKLKFVINTKDGYTQPLNYNVGLFQGCCLSPIVFNIVINILIDNISTHDKKWGYRFKLNGKYTESILAFADDLAILTRNPKQCQDLLRRVDDFCAWTDGMKTKPSKCYCLCLGRRGTRYTSYDPGLSIGGENVSTISETVPFKFLGRKIDNRGCTPALDELIDSFIIDLKKVDQQPISNVKKAWIYDNYLTSRLNWPFLIYDINQSLLKKLDASVTKTLKSWLGLAQSADPSALYRSANNFGMTLKKPSELYKHLRVTKMHVLSKSKDEIVKVLPKDKNASELESRLQFHKKFMIGSQTGRVGLGNIQKQTDKEITKSFLQTDENNTYKVHAMNLEMQNEWLTLGEFCIPIALKWRTIIYDWSPALLKFYLNAFQLTLPDQSNLVRWGKATDKTCNSCGEATGTARHLLVGCRTLLDRGHYSRRHDKVLEIIREAVSLAVARAKKGLTTNQRNDIVFVKEGCSKKSPQKPYSILIAAVDWTILVDTYEKHYKIPEDICASSSRPDIFLFSRSHRRAVLVELTVPWETNIPKDHAIKTNKYFDLTNELTKNGYVVKIYAVEVGARGIPAKSLYNLLKDLGLPRASVSSLLNRISKAALIGSYQIWIGRGGNTTDGGGER

SEQ ID NO: 19589 - protein, 925 aa, Eilema sororculum
MRKRKRDLIKRLRIAKAMGDNQLSHQLARALRAILKLIQGISAQIINENNNLNRAKHEVEFDKDPFKYSRNIFSDKKQDRLLLNNDQIYSYYKNNYEVPKHEKPYGEPKAQKPSNPHFTFNCNPPSLEEIEHQIKKKPTKTAPGPDGIPYIIYKKCPSVRKHVLSIFNRIWSSKEIPAAFGRANFVLIPKKEIVTSPKDARPIALTNTISKIFFSWLQLKMTNFMINNNYFRPNHQKGFLPGISGCLEHNSLLAESLKDARLNERQITVCWIDLENAFGSVHHQLMLFALKWYNFPSIIREIIASYYDKLKFVINTKDGHTQPLNYNVGLFQGCCLSPIVFNIVINILIDSITTHERKWGYRFKLNGKYTESILAFADDLAILTRSPKQCQDLLRKVDEFCTWTEGMKTKPSKCYCLCLGRRGTRYTSYDPGLSIGGENVSTISETVPFKFLGRQIDNRGCTPALEEVINNFIIDIQKVDQQPLSNVKKAWIYDNYLTSRLNWPFLVYDISQSLLKKLDANVTKTWKSWLGLAQSADPSTLYRASNNFGMTFKKPSELYKHLRVTKMHVLAKSKDEIVQALPKDQSTKELESRLQFHKKFMIGSQTGRVGLGNTRRQSDKDITKSFLQVDENNTYKVHAMNLEIQNEWLTLGEFCIPIALKWRTLIYDWSPALLKFYLNAFQLTLPDQSNLVRWGKATDKTCNSCGEAIGTARHLLVGCRTLLDRGHYSRRHDKVLEIVREAVSLAVARAKKGLTTNQRNDVAFVKEGCSKKTNQKPYSILIAAADWTLLADSYEKHYKIPEDVCASSSRPDIFLFSKQQKRAVLVELTVPWETNIPKDHAIKINKYFDLTNELTKNGYVVKLYAVEVGARGIPAKSLYNLFKDLGLPRASVSSLLKRISKTALIGSYQIWIGRGGNTTDGGGER

SEQ ID NO: 19590 - protein, 898 aa, Eilema sororculum
MGMAWAILKLIQGISAQIINENNNLNRAKHEVEFDKDPFKYSRNIFSDKKQDRLLLNNDQIYSYYKNNYEVPKHEKPYGEPKAQKPSNPHFTFNCNPPSLEEIEHQIKKKPTKTAPGPDGIPYIIYKKCPSVRKHVLSIFNRIWSSKEIPAAFGRANFVLIPKKEIVTSPKDARPIALTNTISKIFFSWLQLKMTNFMINNNYFRPNHQKGFLPGISGCREHNSLLAESLKDARLNERQITVCWIDLENAFGSVHHQLMLFALKWYNFPSIIREIIASYYDKLKFVINTKDGHTQPLNYNVGLFQGCCLSPIVFNIVINILIDSITTHERKWGYRFKLNGKYTESILAFADDLAILTRSPKQCQDLLRKVDEFCTWTEGMKTKPSKCYCLCLGRRGTRYTSYDPGLSIGGENVSTISETVPFKFLGRQIDNRGCTPALEEVINNFIIDIQKVDQQPLSNVKKAWIYDNYLTSRLNWPFLVYDISQSLLKKLDANVTKTLKSWLGLAQSADPSTLYRASNNFGMTFKKPSELYKHLRVTKMHVLAKSKDEIVQALPKDQSTKELESRLQFHKKFMIGSQTGRVGLGNTRRQSDKDITKSFLQVDENNTYKVHAMNLEIQNEWLTLGEFCIPIALKWRTLIYDWSPALLKFYLNAFQLTLPDQSNLVRWGKATDKTCNSCGEAIGTARHLLVGCRTLLDRGHYSRRHDKVLEIVREAVSLAVARAKKGLTTNQRNDVAFVKEGCSKKTNQKPYSILIAAADWTLLADSYEKHYKIPEDVCASSSRPDIFLFSKQQKRAVLVELTVPWETNIPKDHAIKINKYFDLTNELTKNGYVVKLYAVEVGARGIPAKSLYNLFKDLGLPRASVSSLLKRISKTALIGSYQIWIGRGGNTTDGGGER

SEQ ID NO: 19591 - protein, 1058 aa, Eilema sororculum
MCKTCGKIYKKRAWFLKHLKLHDGVGARQSSVSSSTITTDRVDPHISQGKPDCKSNQEPINIRARLSIPSLKSSTWKAHDQNLAILLEHPGTKQDLNDQVESFQVSIYSYLHEYYPPPPNHARKNRENAFKIKMRKRKRDLIKRLRIAKAMGDNQLSHQLARALRAILKLIQGISAQIINENNNLNRAKHEVEFDKDPFKYSRNIFSDKKQDRLLLNNDQIYSYYKNNYEVPKHEKPYGEPKAQKPSNPHFTFNCNPPSLEEIEHQIKKKPTKTAPGPDGIPYIIYKKCPSVRKHVLSIFNRIWSSKEIPAAFGRANFVLIPKKEIVTSPKDARPIALTNTISKIFFSWLQLKMTNFMINNNYFRPNHQKGFLPGISGCLEHNSLLAESLKDARLNERQITVCWIDLENAFGSVHHQLMLFALKWYNFPSIIREIIASYYDKLKFVINTKDGHTQPLNYNVGLFQGCCLSPIVFNIVINILIDSITTHERKWGYRFKLNGKYTESILAFADDLAILTRSPKQCQDLLRKVDEFCTWTEGMKTKPSKCYCLCLGRRGTRYTSYDPGLSIGGENVSTISETVPFKFLGRQIDNRGCTPALEEVINNFIIDIQKVDQQPLSNVKKAWIYDNYLTSRLNWPFLVYDISQSLLKKLDANVTKTLKSWLGLAQSADPSTLYRASNNFGMTFKKPSELYKHLRVTKMHVLAKSKDEIVQALPKDQSTKELESRLQFHKKFMIGSQTGRVGLGNTRRQSDKDITKSFLQVDENNTYKVHAMNLEIQNEWLTLGEFCIPIALKWRTLIYDWSPALLKFYLNAFQLTLPDQSNLVRWGKATDKTCNSCGEAIGTARHLLVGCRTLLDRGHYSRRHDKVLEIVREAVSLAVARAKKGLTTNQRNDVAFVKEGCSKKTNQKPYSILIAAADWTLLADSYEKHYKIPEDVCASSSRPDIFLFSKQQKRAVLVELTVPWETNIPKDHAIKINKYFDLTNELTKNGYVVKLYAVEVGARGIPAKSLYNLFKDLGLPRASVSSLLKRISKTALIGSYQIWIGRGGNTTDGGGER

SEQ ID NO: 19592 - protein, 1122 aa, Eilema sororculum
MTIGKTIDCWKDSRGQGLASQAPVFLNLAKSPIKKNTPRTIREGGRKNCPSRIKPNDHGENSDLTCKTCGKIYKKRAWFLKHLKLHDGVGARQSSVSSSTITTDRVDPHISQGKPDCKSNQEPINIRARLSIPSLKSSTWKAHDQNLAILLEHPGTKQDLNDQVESFQVSIYSYLHEYYPPPPNHARKNRENAFKIKMRKRKRDLIKRLRIAKAMGDNQLSHQLARALRAILKLIQGISAQIINENNNLNRAKHEVEFDKDPFKYSRNIFSDKKQDRLLLNNDQIYSYYKNNYEVPKHEKPYGEPKAQKPSNPHFTFNCNPPSLEEIEHQIKKKPTKTAPGPDGIPYIIYKKCPSVRKHVLSIFNRIWSSKEIPAAFGRANFVLIPKKEIVTSPKDARPIALTNTISKIFFSWLQLKMTNFMINNNYFRPNHQKGFLPGISGCLEHNSLLAESLKDARLNERQITVCWIDLENAFGSVHHQLMLFALKWYNFPSIIREIIASYYDKLKFVINTKDGHTQPLNYNVGLFQGCCLSPIVFNIVINILIDSITTHERKWGYRFKLNGKYTESILAFADDLAILTRSPKQCQDLLRKVDEFCTWTEGMRTKPSKCYCLCLGRRGTRYTSYDPGLSIGGENVSTISETVPFKFLGRQIDNRGCTPALEEVINNFIIDIQKVDQQPLSNVKKAWIYDNYLTSRLNWPFLVYDISQSLLKKLDANVTKTLKSWLGLAQSADPSTLYRASNNFGMTFKKPSELYKHLRVTKMHVLAKSKDEIVQALPKDQSTKELESRLQFHKKFMIGSQTGRVGLGNTRRQSDKDITKSFLQVDENNTYKVHAMNLEIQNEWLTLGEFCIPIALKWRTLIYDWSPALLKFYLNAFQLTLPDQSNLVRWGKATDKTCNSCGEAIGTARHLLVGCRTLLDRGHYSRRHDKVLEIVREAVSLAVARAKKGLTTNQRNDVAFVKEGCSKKTNQKPYSILIAAADWTLLADSYEKHYKIPEDVCASSSRPDIFLFSKQQKRAVLVELTVPWETNIPKDHAIKINKYFDLTNELTKNGYVVKLYAVEVGARGIPAKSLYNLFKDLGLPRASVSSLLKRISKTALIGSYQIWIGRGGNTTDGGGER

SEQ ID NO: 19593 - protein, 925 aa, Eilema sororculum
MRKRKRDLIKRLRIAKAMGDNQLSHQLARALRAILKLIQGISAQIINENNNLNRAKHEVEFDKDPFKYSRNIFSDKKQDRLLLNNDQIYSYYKNNYEVPKHEKPYGEPKAQKPSNPHFTFNCNPPSLEEIEHQIKKKPTKTAPGPDGIPYIIYKKCPSVRKHVLSIFNRIWSSKEIPAAFGRANFVLIPKKEIVTSPKDARPIALTNTISKIFFSWLQLKMTNFMINNNYFRPNHQKGFLPGISGCLEHNSLLAESLKDARLNERQITVCWIDLENAFGSVHHQLMLFALKWYNFPSIIREIIASYYDKLKFVINTKDGHTQPLNYNVGLFQGCCLSPIVFNIVINILIDSITTHERKWGYRFKLNGKYTESILAFADDLAILTRSPKQCQDLLRKVDEFCTWTEGMKTKPSKCYCLCLGRRGTRYTSYDPGLSIGGENVSTISETVPFKFLGRQIDNRGCTPALEEVINNFIIDIQKVDQQPLSNVKKAWIYDNYLTSRLNWPFLVYDISQSLLKKLDANVTKTLKSWLGLAQSADPSTLYRASNNFGMTFKKPSELYKHLRVTKMHVLAKSKDEIVQALPKDQSTKELESRLQFHKKIMIGSQTGRVGLGNTRRQSDKDITKSFLQVDENNTYKVHAMNLEIQNEWLTLGEFCIPIALKWRTLIYDWSPALLKFYLNAFQLTLPDQSNLVRWGKATDKTCNSCGEAIGTARHLLVGCRTLLDRGHYSRRHDKVLEIVREAVSLAVARAKKGLTTNQRNDVAFVKEGCSKKTNQKPYSILIAAADWTLLADSYEKHYKIPEDVCASSSRPDIFLFSKQQKRAVLVELTVPWETNIPKDHAIKINKYFDLTNELTKNGYVVKLYAVEVGARGIPAKSLYNLFKDLGLPRASVSSLLKRISKTALIGSYQIWIGRGGNTTDGGGER

SEQ ID NO: 19594 - protein, 925 aa, Eilema depressum
MRKKKRDLIKRLRFAKAMGDNQLSHQLARALRSILKLIQGISFQIINENNNFIRAKHEVEFDKDPFKYSRNIFSDRKQDRLPLSNDQIHSYYKSNYEVPKYKKPYSKPNAQKPVSPHFTFDCNPPSLDEIEQQIKKKPTKTAPGPDGIPYIIYKKCPSVRKHLLSIFNRIWSSKEVPAAFGKANFVLIPKKEIVTSPKDARPIALTNTISKIFFSWLQFKMANFMINNNYFRPNHQKGFLPGISGCLEHNSLLAESLKDARSNEKQITVCWIDLENAFGSVQHELMLFALKWYHFPSTIWEIISSYYGKLKFVINTKDGYTQPLNYNVGLFQGCCLSPIVFNIVINILIDNISTHDKKWGYRFKLNGKYTESILAFADDLAILTRNPKQCQDLLRRVDDFCAWTDGMKTKPSKCYCLCLGRRGTRYTSYDPGLSIGGENVSTISETVPFKFLGRKIDNRGCTPALDELIDSFIIDLKKVDQQPISNVKKAWIYDNYLTSRLNWPFLIYDINQSLLKKLDASVTKTLKSWLGLAQSADPSALYRSANNFGMTLKKPSELYKHLRVTKMHVLSKSKDEIVKVLPKDKNASELESRLQFHKKFMIGSQTGRVGLGNIQKQTDKEITKSFLQTDENNTYKVHAMNLEMQNEWLTLGEFCIPIALKWRTIIYDWSPALLKFYLNAFQLTLPDQSNLVRWGKATDKTCNSCGEATGTARHLLVGCRTLLDRGHYSRRHDKVLEIIREAVSLAVARAKKGLTTNQRNDIVFVKEGCSKKSPQKPYSILIAAVDWTILVDTYEKHYKIPEDICASSSRPDIFLFSRSHRRAVLVELTVPWETNIPKDHAIKTNKYFDLTNELTKNGYVVKLYAVEVGARGIPAKSLYNLLKDLGLPRASVSSLLNRISKAALIGSYQIWIGRGGNTTDGGGER

SEQ ID NO: 19595 - protein, 925 aa, Eilema sororculum
MRKRKRDLIKRLRIAKAMGDNQLSHQLARALRAILKLIQGISAQIINENNNLNRAKHEVEFDKDPFKYSRNIFSDKKQDRLLLNNDQIYSYYKNNYEVPKHEKPYGEPKAQKPSNPHFTFNCNPPSLEEIEHQIKKKPTKTAPGPDGIPYIIYKKCPSVRKHVLSIFNRIWSSKEIPAAFGRANFVLIPKKEIVTSPKDARPIALTNTISKIFFSWLQLKMTNFMINNNYFRPNHQKGFLPGISGCLEHNSLLAESLKDARLNERQITVCWIDLENAFGSVHHQLMLFALKWYNFPSIIREIIASYYDKLKFVINTKDGHTQPLNYNVGLFQGCCLSPIVFNIVINILIDSITTHERKWGYRFKLNGKYTESILAFADDLAILTRSPKQCQDLLRKVDEFCTWTEGMRTKPSKCYCLCLGRRGTRYTSYDPGLSIGGENVSTISETVPFKFLGRQIDNRGCTPALEEVINNFIIDIQKVDQQPLSNVKKAWIYDNYLTSRLNWPFLVYDISQSLLKKLDANVTKTLKSWLGLAQSADPSTLYRASNNFGMTFKKPSELYKHLRVTKMHVLAKSKDEIVQALPKDQSTKELESRLQFHKKFMIGSQTGRVGLGNTRRQSDKDITKSFLQVDENNTYKVHAMNLEIQNEWLTLGEFCIPIALKWRTLIYDWSPALLKFYLNAFQLTLPDQSNLVRWGKATDKTCNSCGEAIGTARHLLVGCRTLLDRGHYSRRHDKVLEIVREAVSLAVARAKKGLTTNQRNDVAFVKEGCSKKTNQKPYSILIAAADWTLLADSYEKHYKIPEDVCASSSRPDIFLFSKQQKRAVLVELTVPWETNIPKDHAIKINKYFDLTNELTKNGYVVKLYAVEVGARGIPAKSLYNLFKDLGLPRASVSSLLKRISKTALIGSYQIWIGRGGNTTDGGGER

SEQ ID NO: 19596 - protein, 1056 aa, Eilema sororculum
MQENLQEEKRAWFLKHLKLHDGVGARQSSVSSSTITTDRVDPHISQGKPDCKSNQEPINIRARLSIPSLKSSTWKAHDQNLAILLEHPGTKQDLNDQVESFQVSIYSYLHEYYPPPPNHARKNRENAFKIKMRKRKRDLIKRLRIAKAMGDNQLSHQLARALRAILKLIQGISAQIINENNNLNRAKHEVEFDKDPFKYSRNIFSDKKQDRLLLNNDQIYSYYKNNYEVPKHEKPYGEPKAQKPSNPHFTFNCNPPSLEEIEHQIKKKPTKTAPGPDGIPYIIYKKCPSVRKHVLSIFNRIWSSKEIPAAFGRANFVLIPKKEIVTSPKDARPIALTNTISKIFFSWLQLKMTNFMINNNYFRPNHQKGFLPGISGCLEHNSLLAESLKDARLNERQITVCWIDLENAFGSVHHQLMLFALKWYNFPSIIREIIASYYDKLKFVINTKDGHTQPLNYNVGLFQGCCLSPIVFNIVINILIDSITTHERKWGYRFKLNGKYTESILAFADDLAILTRSPKQCQDLLRKVDEFCTWTEGMKTKPSKCYCLCLGRRGTRYTSYDPGLSIGGENVSTISETVPFKFLGRQIDNRGCTPALEEVINNFIIDIQKVDQQPLSNVKKAWIYDNYLTSRLNWPFLVYDISQSLLKKLDANVTKTLKSWLGLAQSADPSTLYRASNNFGMTFKKPSELYKHLRVTKMHVLAKSKDEIVQALPKDQSTKELESRLQFHKKFMIGSQTGRVGLGNTRRQSDKDITKSFLQVDENNTYKVHAMNLEIQNEWLTLGEFCIPIALKWRTLIYDWSPALLKFYLNAFQLTLPDQSNLVRWGKATDKTCNSCGEAIGTARHLLVGCRTLLDRGHYSRRHDKVLEIVREAVSLAVARAKKGLTTNQRNDVAFVKEGCSKKTNQKPYSILIAAADWTLLADSYEKHYKIPEDVCASSSRPDIFLFSKQQKRAVLVELTVPWETNIPKDHAIKINKYFDLTNELTKNGYVVKLYAVEVGARGIPAKSLYNLFKDLGLPRASVSSLLKRISKTALIGSYQIWIGRGGNTTDGGGER

SEQ ID NO: 19597 - protein, 1125 aa, Eilema sororculum
MSSDLETKLILLNQKKELLFARINRWYKSSKSVVCFDITTRANEDFLAETETIDDVRDKFESIVDQINSLNLSLQSPVESDYSCLDSFDELYSRIKRIRNKLSTLKVKEVASHGPSNSNASVVKLEMLVIPSFDGRPENWNTFYQSFKANIHSNTQLSDSQRVQYLFSKLTKDALKFTAGIVPSSETYSIVWDALVNKYQDKRSLGSYYLNNMLDLKNCSPSVNSLDSFIGIYSSSIAALKELGINDLTDFVFLQCALRKMDTLTIQAFELSVRGVEIPTTQQLIDFVQDYAKMIERSNPRSSSYAKSSTAGTPQSNDRRVQRNSKSFVVSVPINNKSNAPAVVDASCCLCGGRDHRHLYNCAQFKNMQNAKARYEFIKSKRGCVNCLTKKEIVTSPKDARPIALTNTISKIFFSWLQLKMTNFMINNNYFRPNHQKGFLPGISGCLEHNSLLAESLKDARLNERQITVCWIDLENAFGSVHHQLMLFALKWYNFPSIIREIIASYYDKLKFVINTKDGHTQPLNYNVGLFQGCCLSPIVFNIVINILIDSITTHERKWGYRFKLNGKYTESILAFADDLAILTRSPKQCQDLLRKVDEFCTWTEGMKTKPSKCYCLCLGRRGTRYTSYDPGLSIGGENVSTISETVPFKFLGRQIDNRGCTPALEEVINNFIIDIQKVDQQPLSNVKKAWIYDNYLTSRLNWPFLVYDISQSLLKKLDANVTKTLKSWLGLAQSADPSTLYRASNNFGMTFKKPSELYKHLRVTKMHVLAKSKDEIVQALPKDQSTKELESRLQFHKKFMIGSQTGRVGLGNTRRQSDKDITKSFLQVDENNTYKVHAMNLEIQNEWLTLGEFCIPIALKWRTLIYDWSPALLKFYLNAFQLTLPDQSNLVRWGKATDKTCNSCGEAIGTARHLLVGCRTLLDRGHYSRRHDKVLEIVREAVSLAVARAKKGLTTNQRNDVAFVKEGCSKKTNQKPYSILIAAADWTLLADSYEKHYKIPEDVCASSSRPDIFLFSKQQKRAVLVELTVPWETNIPKDHAIKINKYFDLTNELTKNGYVVKLYAVELGARGIPAKSLYNLFKDLGLPRASVSSLLKRISKTALIGSYQIWIGRGGNTTDGGGER

SEQ ID NO: 19598 - protein, 1041 aa, Eilema sororculum
MTIGKTIDCWKDSRGHGLASQAPVLNLAKSPIKKNTPRTIREGGRKNCPSRIKPNDHGENSDLTCKTCGKIYKKRAWFLKHLKLHDGVGARQSSVSSSTITTDRVDPHISQGKPDCKSNQEPINIRARLSIPSLKSSTWKAHDQNLAILLEHPGTKQDLNDQVESFQVSIYSYLHEYYPPPPNHARKNRENAFKIKMRKRKRDLIKRLRIAKAMGDNQLSHQLARALRAILKLIQGISAQIINENNNLNRAKHEVEFDKDPFKYSRNIFSDKKQDRLLLNNDQIYSYYKNNYEVPKHEKPYGEPKAQKPSNPHFTFNCNPPSLEEIEHQIKKKPTKTAPGPDGIPYIIYKKCPSVRKHLLSIFNRIWSSKEIPAAFGRANFVLIPKKEIVTSPKDARPIALTNTISKIFFSWLQFKMTNFMINNNYFRPNHQKGFLPGISGCLEHNSLLAESLKDARLNERQITVCWIDLENAFGSVHHQLMLFALKWYNFPSIIREIIASYYDKLKFVINTKDGHTQPLNYNVGLFQGCCLSPIVFNIVINILIDSITTHERKWGYRFKLNGKYTESILAFADDLAILTRSPKQCQDLLRKVDEFCTWTEGMKTKPSKCYCLCLGRRGTRYTSYDPGLSIGGENVSTVSETVPFKFLGRQIDNRGCTPALEEVINNFIIDIQKVDQQPLSNVKKAWIYDNYLTSRLNWPFLVYDISQSLLKKLDANVTKTLKSWLGLAQSADPSTLYRASNNFGMTFKKPSELYKHLRVTKMHVLAKSKDEIVQALPKDQSTKELESRLQFHKKIMIGSQTGRVGLGNTRRQSDKDITKSFLQVDENNTYKVHAMNLEIQNEWLTLGEFCIPIALKWRTLIYDWSPALLKFYLNAFQLTLPDQSNLVRWGKATDKTCNSCGEAIGTARHLLVGCRTLLDRGHYSRRHDKVLEIVREAVSLAVARAKKGLTTNQRNDVAFVKEGCSKKTNQKPYSILIAAADWTLLADSYEKHYKIPEDVCASSSRPDIFLFSKQQKRAVLVELTVPWETNIPKDHAIKKK

SEQ ID NO: 19599 - protein, 1023 aa, Eilema depressum
MDPHISHGEPECDTNQEPINIRARLSIPSLKSTTWKAHDQNLAILLEHPGTKQDLNSQVESFQVSIYSYLHEHYPPSLPYARKNRENAFKIKMRKKKKKKKKKRDLIKRLRFAKAMGDNQLSHQLARALRSILKLIQGISFQIINENNNFIRAKHEVEFDKDPFKYSRNIFSDRKQDRLPLSNDQIHSYYKSNYEVPKYKKPYSKPNAQKPVSPHFTFDCNPPSLDEIEQQIKKKPTKTAPGPDGIPYIIYKKCPSVRKHLLSIFNRIWSSKEVPAAFGKANFVLIPKKEIVTSPKDARPIALTNTISKIFFSWLQFKMANFMINNNYFRPNHQKGFLPGISGCLEHNSLLAESLKDARSNEKQITVCWIDLENAFGSVQHELMLFALKWYHFPSTIWEIISSYYGKLKFVINTKDGYTQPLNYNVGLFQGCCLSPIVFNIVINILIDNISTHDKKWGYRFKLNGKYTESILAFADDLAILTRNPKQCQDLLRRVDDFCAWTDGMKTKPSKCYCLCLGRRGTRYTSYDPGLSIGGENVSTISETVPFKFLGRKIDNRGCTPALDELIDSFIIDLKKVDQQPISNVKKAWIYDNYLTSRLNWPFLIYDINQSLLKKLDASVTKTLKSWLGLAQSADPSALYRSANNFGMTLKKPSELYKHLRVTKMHVLSKSKDEIVKVLPKDKNASELESRLQFHKKFMIGSQTGRVGLGNIQKQTDKEITKSFLQTDENNTYKVHAMNLEMQNEWLTLGEFCIPIALKWRTIIYDWSPALLKFYLNAFQLTLPDQSNLVRWGKATDKTCNSCGEATGTARHLLVGCRTLLDRGHYSRRHDKVLEIIREAVSLAVARAKKGLTTNQRNDIVFVKEGCSKKSPQKPYSILIAAVDWTILVDTYEKHYKIPEDICASSSRPDIFLFSRSHRRAVLVELTVPWESNIPKDHAIKTNKYFDLTNELTKNGYVVKLYAVEVGARGIPAKSLYNLLKDLGLPRASVSSLLNRISKAALIGSYQIWIGRGGNTTDGGGER

SEQ ID NO: 19600 - protein, 908 aa, Eilema sororculum
MGDNQLSHQLARALRAILKLIQGISAQIINENNNLNRAKHEVEFDKDPFKYSRNIFSDKKQDRLLLNNDQIYSYYKNNYEVPKHEKPYGEPKAQKPSNPHFTFNCNPPSLEEIEHQIKKKPTKTAPGPDGIPYIIYKKCPSVRKHLLSIFNRIWSSKEIPAAFGRANFVLIPKKEIVTSPKDARPIALTNTISKIFFSWLQFKMTNFMINNNYFRPNHQKGFLPGISGCLEHNSLLAESLKDARLNERQITVCWIDLENAFGSVHHQLMLFALKWYNFPSIIREIIASYYDKLKFVINTKDGHTQPLNYNVGLFQGCCLSPIVFNIVINILIDSITTHERKWGYRFKLNGKYTESILAFADDLAILTRSPKQCQDLLRKVDEFCTWTDGMKTKPSKCYCLCLGRRGTRYTSYDPGLSIGGENVSTISETVPFKFLGRKIDNRGCTPALEEVINNFIIDIQKVDQQPLSNVKKAWIYDNYLTSRLNWPFLVYDISQSLLKKLDANVTKTLKSWLGLAQSADPSTLYRASNNFGMTFKKPSELYKHLRVTKMHVLAKSKDEIVQALPKDQSTKELESRLQFHKKFMIGSQTGRVGLGNTRRQSDKDITKSFLQVDENNTYKVHAMNLEVQNEWLTLGEFCIPIALKWRTLIYDWSPALLKFYLNAFQLTLPDQSNLVRWGKATDKTCNSCGEAIGTARHLLVGCRTLLDRGHYSRRHDKVLEIVREAVSLAVARAKKGLTTNQRNDVAFVKEGCSKKTNQKPYSILIAAADWTLLADSYEKHYKIPEDVCASSSRPDIFLFSKQQKRAVLVELTVPWETNIPKDHAIKINKYFDLTNELTKNGYVVKLYAVEVGARGIPAKSLYNLFKDLGLPRASVSSLLKRISKTALIGSYQIWIGRGGNTTNGGGER

SEQ ID NO: 19601 - protein, 925 aa, Eilema sororculum
MRKRKRDLIKRLRIAKAMGDNQLSHQLARALRAILKLIQGISAQIINENNNLNRAKHEVEFDKDPFKYSRNIFSDKKQDRLLLNNDQIYSYYKNNYEVPKHEKPYGEPKAQKPSNPHFTFNCNPPSLEEIEHQIKKKPTKTAPGPDGIPYIIYKKCPSVRKHVLSIFNRIWSSKEIPAAFGRANFVLIPKKEIVTSPKDARPIALTNTISKIFFSWLQLKMTNFMINNNYFRPNHQKGFLPGISGCLEHNSLLAESLKDARLNERQITVCWIDLENAFGSVHHQLMLFALKWYNFPSIIREIIASYYDKLKFVINTKDGHTQPLNYNVGLFQGCCLSPIVFNIVINILIDSITTHERKWGYRFKLNGKYTESILAFADDLAILTRNPKQCQDLLRKVDEFCTWTEGMKTKPSKCYCLCLGRRGTRYTSYDPGLSIGGENVSTISETVPFKFLGRQIDNRGCTPALEEVINNFIIDIQKVDQQPLSNVKKAWIYDNYLTSRLNWPFLVYDISQSLLKKLDANVTKTLKSWLGLAQSADPSTLYRASNNFGMTFKKPSELYKHLRVTKMHVLAKSKDEIVQALPKDQSTKELESRLQFHKKFMIGSQTGRVGLGNTRRQSDKDITKSFLQVDENNTYKVHAMNLEIQNEWLTLGEFCIPIALKWRTLIYDWSPALLKFYLNAFQLTLPDQSNLVRWGKATDKTCNSCGEAIGTARHLLVGCRTLLDRGHYSRRHDKVLEIVREAVSLAVARAKKGLTTNQRNDVAFVKEGCSKKTNQKPYSILIAAADWTLLADSYEKHYKIPEDVCASSSRPDIFLFSKQQKRAVLVELTVPWETNIPKDHAIKINKYFDLTNELTKNGYVVKLYAVEVGARGIPAKSLYNLFKDLGLPRASVSSLLKRISKTALIGSYQIWIGRGGNTTDGGGER

SEQ ID NO: 19602 - protein, 925 aa, Eilema sororculum
MRKRKRDLIKRLRIAKAMGDNQLSHQLARALRAILKLIQGISAQIINENNNLNRAKHEVEFDKDPFKYSRNIFSDKKQDRLLLNNDQIYSYYKNNYEVPKHEKPYGEPKAQKPSNPHFTFNCNPPSLEEIEHQIKKKPTKTAPGPDGIPYIIYKKCPSVRKHVLSIFNRIWSSKEIPAAFGRANFVLIPKKEIVTSPKDARPIALTNTISKIFFSWLQLKMTNFMINNNYFRPNHQKGFLPGISGCLEHNSLLAESLKDARLNERQITVCWIDIENAFGSVHHQLMLFALKWYNFPSIIREIIASYYDKLKFVINTKDGHTQPLNYNVGLFQGCCLSPIVFNIVINILIDSITTHERKWGYRFKLNGKYTESILAFADDLAILTRSPKQCQDLLRKVDEFCTWTEGMKTKPSKCYCLCLGRRGTRYTSYDPGLSIGGENVSTISETVPFKFLGRQIDNRGCTPALEEVINNFIIDIQKVDQQPLSNVKKAWIYDHYLTSRLNWPFLVYDISQSLLKKLDANVTKTLKSWLGLAQSADPSTLYRASNNFGMTFKKPSELYKHLRVTKMHVLAKSKDEIVQALPKDQSTKELESRLQFHKKFMIGSQTGRVGLGNTRRQSDKDITKSFLQVDENNTYKVHAMNLEIQNEWLTLGEFCIPIALKWRTLIYDWSPALLKFYLNAFQLTLPDQSNLVRWGKATDKTCNSCGEAIGTARHLLVGCRTLLDRGHYSRRHDKVLEIVREAVSLAVARAKKGLTTNQRNDVAFVKEGCSKKTNQKPYSILIAAADWTLLADSYEKHYKIPEDVCASSSRPDIFLFSKQQKRAVLVELTVPWETNIPKDHAIKINKYFDLTNELTKNGYVVKLYAVEVGARGIPAKSLYNLFKDLGLPRASVSSLLKRISKTALIGSYQIWIGRGGNTTDGGGER

SEQ ID NO: 19603 - protein, 1051 aa, Eilema sororculum
MIYSYGYKSRMIKLHDGVGARQSSVSSSTITTDRVDPHISQGKPDCKSNQEPINIRARLSIPSLKSSTWKAHDQNLAILLEHPGTKQDLNDQVESFQVSIYSYLHEYYPPPPNHARKNRENAFKIKMRKRKRDLIKRLRIAKAMGDNQLSHQLARALRAILKLIQGISAQIINENNNLNRAKHEVEFDKDPFKYSRNIFSDKKQDRLLLNNDQIYSYYKNNYEVPKHEKPYGEPKAQKPSNPHFTFNCNPPSLEEIEHQIKKKPTKTAPGPDGIPYIIYKKCPSVRKHVLSIFNRIWSSKEIPAAFGRANFVLIPKKEIVTSPKDARPIALTNTISKIFFSWLQLKMTNFMINNNYFRPNHQKGFLPGISGCLEHNSLLAESLKDARLNERQITVCWIDLENAFGSVHHQLMLFALKWYNFPSIIREIIASYYDKLKFVINTKDGHTQPLNYNVGLFQGCCLSPIVFNIVINILIDSITTHERKWGYRFKLNGKYTESILAFADDLAILTRSPKQCQDLLRKVDEFCTWTEGMKTKPSKCYCLCLGRRGTRYTSYDPGLSIGGENVSTISETVPFKFLGRQIDNRGCTPALEEVINNFIIDIQKVDQQPLSNVKKAWIYDNYLTSRLNWPFLVYDISQSLLKKLDANVTKTLKSWLGLAQSADPSTLYRASNNFGMTFKKPSELYKHLRVTKMHVLAKSKDEIVQALPKDQSTKELESRLQFHKKFMIGSQTGRVGLGNTRRQSDKDITKSFLQVDENNTYKVHAMNLEIQNEWLTLGEFCIPIALKWRTLIYDWSPALLKFYLNAFQLTLPDQSNLVRWGKATDKTCNSCGEAIGTARHLLVGCRTLLDRGHYSRRHDKVLEIVREAVSLAVARAKKGLTTNQRNDVAFVKEGCSKKTNQKPYSILIAAADWTLLADSYEKHYKIPEDVCASSSRPDIFLFSKQQKRAVLVELTVPWETNIPKDHAIKINKYFDLTNELTKNGYVVKLYAVEVGARGIPAKSLYNLFKDLGLPRASVSSLLKRISKTALIGSYQIWIGGGGNTTDGGGER

SEQ ID NO: 19604 - protein, 1097 aa, Eilema sororculum
MLYAKSPIKKNTPRTIREGGRKNCPSRIKPNDHGENSDLTCKTCGKIYKKRAWFLKHLKLHDGVGARQSSVSSSTITTDRVDPHISQGKPDCKSNQEPINIRARLSIPSLKSSTWKAHDQNLAILLEHPGTKQDLNDQVESFQVSIYSYLHEYYPPPPNHARKNRENAFKIKMRKRKRDLIKRLRIAKAMGDNQLSHQLARALRAILKLIQGISAQIINENNNLNRAKHEVEFDKDPFKYSRNIFSDKKQDRLLLNNDQIYSYYKNNYEVPKHEKPYGEPKAQKPSNPHFTFNCNPPSLEEIEHQIKKKPTKTAPGPDGIPYIIYKKCPSVRKHVLSIFNRIWSSKEIPAAFGRANFVLIPKKEIVTSPKDARPIALTNTISKIFFSWLQLKMTNFMINNNYFRPNHQKGFLPGISGCLEHNSLLAESLKDARLNERQITVCWIDLENAFGSVHHQLMLFALKWYNFPSIIREIIASYYDKLKFVINTKDGHTQPLNYNVGLFQGCCLSPIVFNIVINILIDSITTHERKWGYRFKLNGKYTESILAFADDLAILTRSPKQCQDLLRKVDEFCTWTEGMKTKPSKCYCLCLGRRGTRYTSYDPGLSIGGENVSTISETVPFKFLGRQIDNRGCTPALEEVINNFIIDIQKVDQQPLSNVKKAWIYDNYLTSRLNWPFLVYDISQSLLKKLDANVTKTLKSWLGLAQSADPSTLYRASNNFGMTFKKPSELYKHLRVTKMHVLAKSKDEIVQALPKDQSTKELESRLQFHKKFMIGSQTGRVGLGNTRRQSDKDITKSFLQVDENNTYKVHAMNLEIQNEWLTLGEFCIPIALKWRTLIYDWSPALLKFYLNAFQLTLPDQSNLVRWGKATDKTCNSCGEAIGTARHLLVGCRTLLDRGHYSRRHDKVLEIVREAVSLAVARAKKGLTTNQRNDVAFVKEGCSKKTNQKPYSILIAAADWTLLADSYEKHYKIPEDVCASSSRPDIFLFSKQQKRAVLVELTVPWETNIPKDHAIKINKYFDLTNELTKNGYVVKLYAVEVGARGIPAKSLYNLFKDLGLPRASVSSLLKRISKTALIGSYQIWIGRGGNTTDGGGER

SEQ ID NO: 19605 - protein, 908 aa, Eilema sororculum
MGDNQLSHQLARALRAILKLIQGISAQIINENNNLNRAKHEVEFDKDPFKYSRNIFSDKKQDRLLLNNDQIYSYYKNNYEVPKHEKPYGEPKAQKPSNPQFTFNCNPPSLEEIEHQIKKKPTKTAPGPDGIPYIIYKKCPSVRKHVLSIFNRIWSSKEIPAAFGRANFVLIPKKEIVTSPKDARPIALTNTISKIFFSWLQLKMTNFMINNNYFRPNHQKGFLPGISGCLEHNSLLAESLKDARLNERQITVCWIDLENAFGSVHHQLMLFALKWYNFPSIIREIIASYYDKLKFVINTKDGHTQPLNYNVGLFQGCCLSPIVFNIVINILIDSITTHERKWGYRFKLNGKYTESILAFADDLAILTRSPKQCQDLLRKVDEFCTWTEGMKTKPSKCYCLCLGRRGTRYTSYDPGLSIGGENVSTISETVPFKFLGRQIDNRGCTPALEEVINNFIIDIQKVDQQPLSNVKKAWIYDNYLTSRLNWPFLVYDISQSLLKKLDANVTKTLKSWLGLAQSADPSTLYRASNNFGMTFKKPSELYKHLRVTKMHVLAKSKDEIVQALPKDQSTKELESRLQFHKKFMIGSQTGRVGLGNTRRQSDKDITKSFLQVDENNTYKVHAMNLEIQNEWLTLGEFCIPIALKWRTLIYDWSPALLKFYLNAFQLTLPDQSNLVRWGKATDKTCNSCGEAIGTARHLLVGCRTLLDRGHYSRRHDKVLEIVREAVSLAVARAKKGLTTNQRNDVAFVKEGCSKKTNQKPYSILIAAADWTLLADSYEKHYKIPEDVCASSSRPDIFLFSKQQKRAVLVELTVPWETNIPKDHAIKINKYFDLTNELTKNGYVVKLYAVEVGARGIPAKSLYNLFKDLGLPRASVSSLLKRISKTALIGSYQIWIGRGGNTTDGGGER

SEQ ID NO: 19606 - protein, 925 aa, Eilema depressum
MRKKKRDLIKRLRFAKAMGDNQLSHQLARALRSILKLIQGISFQIINENNNFIRAKHEVEFDKDPFKYSRNIFSDRKQDRLPLSNDQIHSYYKSNYEVPKYKKPYSKPNAQKPVSPHFTFDCNPPSLDEIEQQIKKKPTKTAPGPDGIPYIIYKKCPSVRKHLLSIFNRIWSSKEVPAAFGKANFVLIPKKEIVTSPKDARPIALTNTISKIFFSWLQFKMANFMINNNYFRPNHQKGFLPGISGCLEHNSLLAESLKDARSNEKQITVCWIDLENAFGSVQHELMLFALQWYHFPSTIWEIISSYYGKLKFVINTKDGYTQPLNYNVGLFQGCCLSPIVFNIVINILIDNISTHDKKWGYRFKLNGKYTESILAFADDLAILTRNPKQCQDLLRRVDDFCAWTDGMKTKPSKCYCLCLGRRGTRYTSYDPGLSIGGENVSTISETVPFKFLGRKIDNRGCTPALDELIDSFIIDLKKVDQQPISNVKKAWIYDNYLTSRLNWPFLIYDINQSLLKKLDASVTKTLKSWLGLAQSADPSALYRSANNFGMTLKKPSELYKHLRVTKMHVLSKSKDEIVKVLPKDKNASELESRLQFHKKFMIGSQTGRVGLGNIQKQTDKEITKSFLQTDENNTYKVHAMNLEMQNEWLTLGEFCIPIALKWRTIIYDWSPALLKFYLNAFQLTLPDQSNLVRWGKATDKTCNSCGEATGTARHLLVGCRTLLDRGHYSRRHDKVLEIIREAVSLAVARAKKGLTTNQRNDIVFVKEGCSKKSPQKPYSILIAAVDWTILVDTYEKHYKIPEDICASSSRPDIFLFSRSHRRAVLVELTVPWETNIPKDHAIKTNKYFDLTNELTKNGYVVKLYAVEVGARGIPAKSLYNLLKDLGLPRASVSSLLNRISKAALIGSYQIWIGRGGNTTDGGGER

SEQ ID NO: 19607 - protein, 1121 aa, Eilema sororculum
MTIGKTIDCWKDSRGQGLASQAPVLNLAKSPIKKNTPRTIREGGRKNCPSRIKPNDHGENSDLTCKTCGKIYKKRAWFLKHLKLHDGVGARQSSVSSSTITTDRVDPHISQGKPDCKSNQEPINIRARLSIPSLKSSTWKAHDQNLAILLEHPGTKQDLNDQVESFQVSIYSYLHEYYPPPPNHARKNRENAFKIKLRKRKRDLIKRLRIAKAMGDNQLSHQLARALRAILKLIQGISAQIINENNNLNRAKHEVEFDKDPFKYSRNIFSDKKQDRLLLNNDQIYSYYKNNYEVPKHEKPYGEPKAQKPSNPHFTFNCNPPSLEEIEHQIKKKPTKTAPGPDGIPYIIYKKCPSVRKHLLSIFNRIWSSKEIPAAFGRANFVLIPKKEIVTSPKDARPIALTNTISKIFFSWLQFKMTNFMINNNYFRPNHQKGFLPGISGCLEHNSLLAESLKDARLNERQITVCWIDLENAFGSVHHQLMLFALKWYNFPSIIREIIASYYDKLKFVINTKDGHTQPLNYNVGLFQGCCLSPIVFNIVINILIDSITTHERKWGYRFKLNGKYTESILAFADDLAILTRSPKQCQDLLRKVDEFCTWTDGMKTKPSKCYCLCLGRRGTRYTSYDPGLSIGGENVSTISETVPFKFLGRKIDNRGCTPALEEVINNFIIDIQKVDQKPLSNVKKAWIYDSYLTSRLNWPFLVYDISQSLLKKLDANVTKTLKSWLGLAQSADPSTLYRASNNFGMTFKKPSELYKHLRVTKMHVLAKSKDEIVQALPKDQSTKELESRLQFHKKFMIGSQTGRVGLGNTRRQSDKDITKSFLQVDENNTYKVHAMNLEVQNEWLTLGEFCIPIALKWRTLIYDWSPALLKFYLNAFQLTLPDQSNLVRWGKATDKTCNSCGEAIGTARHLLVGCRTLLDRGHYSRRHDKVLEIVREAVSLAVARAKKGLTTNQRNDVAFVKEGCSKKTNQKPYSILIAAADWTLLADSYEKHYKIPEDVCASSSRPDIFLFSKQQKRAVLVELTVPWETNIPKDHAIKINKYFDLTNELTKNGYVVKLYAVEVGARGIPAKSLYNLFKDLGLPRASVSSLLKRISKTALIGSYQIWIGRGGNTTDGGGER

SEQ ID NO: 19608 - protein, 908 aa, Eilema sororculum
MGDNQLSHQLARALRAILKLIQGISAQIINENNNLNRAKHEVEFDKDPFKYSRNIFSDKKQDRLLLNNDQIYSYNKNNYEVPKHEKPYGEPKAQKPSNPHFTFNCNPPSLEEIEHQIKKKPTKTAPGPDGIPYIIYKKCPSVRKHLLSIFNRIWSSKEIPAAFGRANFVLIPKKEIVTSPKDARPIALTNTISKIFFSWLQFKMTNFMINNNYFRPNHQKGFLPGISGCLEHNSLLAESLKDARLNERQITVCWIDLENAFGSVHHQLMLFALKWYNFPSIIREIIASYYDKLKFVINTKDGHTQPLNYNVGLFQGCCLSPIVFNIVINILIDSITTYERKWGYRFKLNGKYTESILAFADDLAILTRSPKQCQDLLRKVDEFCTWTDGMKTKPSKCYCLCLGRRGTRYTSYDPGLSIGGENVSTISKTVPFKFLGRKIDNRGCTPALEEVINNFIIDIQKVDQQPLSNVKKAWIYDNYLTSRLNWPFLVYDISQSLLKKLDANVTKTLKSWLGLAQSADPSTLYRASNNFGMTFKKPSELYKHLRVTKMHVLAKSKDEIVQALPKDQSTKELESRLQFHKKFMIGSQTGRVGLGNTRRQSDKDITKSFLQVDENNTYKVHAMNLEVQNEWLTLGEFCILIALKWRTLIYDWSPALLKFYLNAFQLTLPDQSNLVRWGKATDKTCNSCGEAIGTARHLLVGCRTLLDRGHYSRRHDKVLEIVREAVSLAVARAKKGLTTNQRNDVAFVKEGCSKKTNQKPYSILIAAADWTLHADSYEKHYKIPEDVCASSSRPDIFLFSKQQKRAVLVELTVPWETNIPKDHAIKINKYFDLTNELTKNGYVVKLYAVEVGARGIPAKSLYNLFKDLGLPRASVSSLLKRISKTALIGSYQIWIGRGGNTTDGGGER

SEQ ID NO: 19609 - protein, 925 aa, Eilema depressum
MRKKKRDLIKRLRFAKAMGDNQLSHQLARALRSILKLIQGISFQIINENNNFIRAKHEVEFDKDPFKYSRNIFSDRKQDRLPLSNDQIHSYYKSNYEVPKYKKPYSKPNAQKPVSPHFTFDCNPPSLDEIEQQIKKKPTKTAPGPDGIPYIIYKKCPSVRKHLLSIFNRIWSSKEVPAAFGKANFVLIPKKEIVTSPKDARPIALTNTISKIFFSWLQFKMANFMINNNYFRPNHQKGFLPGISGCLEHNSLLAESLKDARSNEKQITVCWIDLENAFGSVQHELMLFALKWYHFPSTIWEIISSYYGKLKFVINTKDGYTQPLNYNVGLFQGCCLSPIVFNIVINLLIDNISTHDKKWGYRFKLNGKYTESILAFADDLAILTRNPKQCQDLLRRVDDFCAWTDGMKTKPSKCYCLCLGRRGTRYTSYDPGLSIGGENVSTISETVPFKFLGRKIDNRGCTPALDELIDSFIIDLKKVDQQPISNVKKAWIYDNYLTSRLNWPFLIYDINQSLLKKLDASVTKTLKSWLGLAQSADPSALYRSANNFGMTLKKPSELYKHLRVTKMHVLSKSKDEIVKVLPKDKNASELESRLQFHKKFMIGSQTGRVGLGNIQKQTDKEITKSFLQTDENNTYKVHAMNLEMQNEWLTLGEFCIPIALKWRTIIYDWSPALLKFYLNAFQLTLPDQSNLVRWGKATDKTCNSCGEATGTARHLLVGCRTLLDRGHYSRRHDKVLEIIREAVSLAVARAKKGLTTNQRNDIVFVKEGCSKKSPQKPYSILIAAVDWTILVDTYEKHYKIPEDICASSSRPDIFLFSRSHRRAVLVELTVPWETNIPKDHAIKTNKYFDLTNELTKNGYVVKLYAVEVGARGIPAKSLYNLLKDLGLPRASVSSLLNRISKAALIGSYQIWIGRGGNTTDGGGER

SEQ ID NO: 19610 - protein, 925 aa, Eilema sororculum
MRKRKRDLIKRLRIAKAMGDNQLSHQLARALRAILKLIQGISAQIINENNNLNRAKHEVEFDKDPFKYSRNIFSDKKQDRLLLNNDQIYSYYKNNYEVPKHEKPYGEPKAQKPSNPHFTFNCNPPSLEEIEHQIKKKPTKTAPGPDGIPYIIYKKCPSVRKHLLSIFNRIWSSKEIPAAFGRANFVLIPKKEIVTSPKDARPIALTNTISKIFFSWLQFKMTNFMINNNYFRPNHQKGFLPGISGCLEHNSLLAESLKDARLNERQITVCWIDLENAFGSVHHQLMLFALKWYNFPSIIREIIASYYDKLKFVINTKDGHTQPLNYNVGLFQGCCLSPIVFNIVINILIDSITTHERKWGYRFKLNGKYTESILAFADDLAILTRSPKQCQDLLRKVDEFCTWTEGMKTKPSKCYCLCLGRRGTRYTSYDPGLSIGGENVSTISETVPFKFLGRQIDNRGCTPALEEVINNFIIDIQKVDQQPLSNVKKAWIYDNYLTSRLNWPFLVYDISQSLLKKLDANVTKTLKSWLGLAQSADPSTLYRASNNFGMTFKKPSELYKHLRVTKMHVLAKSKDEIVQALPKDQSTKELESRLQFHKKFMIGSQTGRVGLGNTRRQSDKDITKSFLQVDENNTYKVHAMNLEIQNEWLTLGEFCIPIALKWRTLIYDWSPALLKFYLNAFQLTLPDQSNLVRWGKATDKTCNSCGEAIGTARHLLVGCRTLLDRGHYSRRHDKVLEIVREAVSLAVARAKKGLTTNQRNDVAFVKEGCSKKTNQKPYSILIAAADWTLLADSYEKHYKIPEDVCASSSRPDIFLFSKQQKRAVLVELTVPWETNIPKDHAIKINKYFDLTNELTKNGYVVKLYAVEVGARGIPAKSLYNLFKDLGLPRASVSSLLKRISKTALIGSYQIWIGRGGNTTDGGGER

SEQ ID NO: 19611 - protein, 925 aa, Eilema depressum
MRKKKRDLIKRLRFAKAMGDNQLSHQLARALRSILKLIQGISFQIINENNNFIRAKHEVEFDKDPFKYSRNIFSDRKQDRLPLSNDQIHSYYKSNYEVPKYKKPYSKPNAQKPVSPHFTFDCNPPSLDEIEQQIKKKPTKTAPGPDGIPYIIYKKCPSVRKHLLSIFNRIWSSKEVPAAFGKANFVLIPKKEIVTSPKDARPIALTNTISKIFFSWLQFKMANFMINNNYFRPNHQKGFLPGISGCLEHNSLLAESLKDARSNEKQITVCWIDLENAFGSVQHELMLFALKWYHFPSTIWEIISSYYGKLKFVINTKDGYTQPLNYNVGLFQGCCLSPIVFNIVINILIDNISTHDKKWGYRFKLNGKYTESILAFADDLAILTRNPKQCQDLLRRVDDFCAWTDGMKTKPSKCYCLCLGRRGTRYTSYDPGLSIGGENVSTISETVPFKFLGRKIDNRGCTPALDELIDSFIIDLKKVDQQPISNVKKAWIYDNYLTSRLNWPFLIYDINQSLLKKLDASVTKTLKSWLGLAQSADPSALYRSANNFGMTLKKPSELYKHLRVTKMHVLSKSKDEIVKIIPKDKNASELESRLQFHKKFMIGSQTGRVGLGNIQKQTDKEITKSFLQTDENNTYKVHAMNLEMQNEWLTLGEFCIPIALKWRTIIYDWSPALLKFYLNAFQLTLPDQSNLVRWGKATDKTCNSCGEATGTARHLLVGCRTLLDRGHYSRRHDKVLEIIREAVSLAVARAKKGLTTNQRNDIVFVKEGCSKKSPQKPYSILIAAVDWTILVDTYEKHYKIPEDICASSSRPDIFLFSRSHRRAVLVELTVPWETNIPKDHAIKTNKYFDLTNELTKNGYVVKLYAVEVGARGIPAKSLYNLLKDLGLPRASVSSLLNRISKAALIGSYQIWIGRGGNTSDGGGER

SEQ ID NO: 19612 - protein, 925 aa, Eilema sororculum
MRKRKRDLIKRLRIAKAMGDNQLSHQLARALRAILKLIQGISAQIINENNNLNRAKHEVEFDKDPFKYSRNIFSDKKQDRLLLNNDQIYSYYKNNYEVPKHEKPYGEPKAQKPSNPHFTFNCNPPSLEEIEHQIKKKPTKTAPGPDGIPYIIYKKCPSVRKHVLSIFNRIWSSKEIPAAFGRANFVLIPKKEIVTSPKDARPIALTNTISKIFFSWLQLKMTNFMINNNYFRPNHQKGFLPGISGCLEHNSLLAESLKDARLNERQITVCWIDLENAFGSVHHQLMLFALKWYNFPSIIREIIASYYDKLKFVINTKDGHTQPLNYNVGLFQGCCLSPIVFNIVINILIDSITTHERKWGYRFKLNGKYTESILAFADDLAILTRSPKQCQDLLRKVDEFCTWTEGMKTKPSKCYCLCLGRRGTRYTSYDPGLSIGGENVSTISETVPFKFLGRQIDNRGCTPALEEVINNFIIDIQKVDQQPLSNVKKAWIYDNYLTSRLNWPFLVYDISQSLLKKLDANVTKTLKSWLGLAQSADPSTLYRASNNFGMTFKKPSELYKHLRVTKMHVLAKSKDEIVQALPKDQSTKELESRLQFHKKFMMGSQTGRVGLGNTRRQSDKDITKSFLQVDENNTYKVHAMNLEIQNEWLTLGEFCIPIALKWRTLIYDWSPALLKFYLNAFQLTLPDQSNLVRWGKATDKTCNSCGEAIGTARHLLVGCRTLLDRGHYSRRHDKVLEIVREAVSLAVARAKKGLTTNQRNDVAFVKEGCSKKTNQKPYSILIAAADWTLLADSYEKHYKIPEDVCASSSRPDIFLFSKQQKRAVLVELTVPWETNIPKDHAIKINKYFDLTNELTKNGYVVKLYAVEVGARGIPAKSLYNLFKDLGLPRASVSSLLKRISKTALIGSYQIWIGRGGNTTDGGGER

SEQ ID NO: 19613 - protein, 925 aa, Eilema sororculum
MRKRKRDLIKRLRIAKAMGDNQLSHQLARALRAILKLIQGISAQIINENNNLNRAKHEVEFDKDPFKYSRNIFSDKKQDRLLLNNDQIYSYYKNNYEVPKHEKPYGEPKAQKPSNPHFTFNCNPPSLEEIEHQIKKKPTKTAPGPDGIPYIIYKKCPSVRKHVLSIFNRIWSSKEIPAAFGRANFVLIPKKEIVTSPKDARPIALTNTISKIFFSWLQLKMTNFMINNNYFRPNHQKGFLPGISGCLEHNSLLAESLKDARLNERQITVCWIDLENAFGSVHHQLMLFALKWYNFPSIIREIIASYYDKLKFVINTKDGHTQPLNYNVGLFQGCCLSPIVFNIVINILIDSITTHERKWGYRFKLNGKYTESILAFADDLAILTRSPKQCQDLLRKVDEFCTWTEGMKTKPSKCYCLCLGRRGTRYTSYDPGLSIGGENVSTISETVPFKFLGRQIDNRGCTPALEEVINNFIIDIQKVDQQPLSNVKKAWIYDNYLTSRLNWPFLVYDISQSLLKKLDANVTKTLKSWLGLAQSADPSTLYRASNNFGMTFKKPSELYKHLRVTKMHVLAKSKDETVQALPKDQSTKELESRLQFHKKFMIGSQTGRVGLGNTRRQSDKDITKSFLQVDENNTYKVHAMNLEIQNEWLTLGEFCIPIALKWRTLIYDWSPALLKFYLNAFQLTLPDQSNLVRWGKATDKTCNSCGEAIGTARHLLVGCRTLLDRGHYSRRHDKVLEIVREAVSLAVARAKKGLTTNQRNDVAFVKEGCSKKTNQKPYSILIAAADWTLLADSYEKHYKIPEDVCASSSRPDIFLFSKQQKRAVLVELTVPWETNIPKDHAIKINKYFDLTNELTKNGYVVKLYAVEVGARGIPAKSLYNLFKDLGLPRASVSSLLKRISKTALIGSYQIWIGRGGNTTDGGGER

SEQ ID NO: 19614 - protein, 925 aa, Eilema sororculum
MRKRKRDLIKRLRIAKAMGDNQLSHQLARALRAILKLIQGISAQIINENNNLNRAKHEVEFDKDPFKYSRNIFSDKKQDRLLLNNDQIYSYYKNNYEVPKHEKPYGEPKAQKPSNPHFTFNCNPPSLEEIEHQIKKKPTKTAPGPDGIPYIIYKKCPSVRKHVLSIFNRIWSSKEIPAAFGRANFVLIPKKEIVTSPKDARPIALTNTISKIFFSWLQLKMTNFMINNNYFRPNHQKGFLPGISGCLEHNSLLAESLKDARLNERQITVCWIDLENAFGSVHHQLMLFALKWYNFPSIIREIIASYYDKLKFVINTKDGHTQPLNYNVGLFQGCCLSPIVFNIVINILIDSITTHERKWGYRFKLNGKYTESILAFADDLAILTRSPKQCQDLLRKVDEFCTWTEGMKTKPSKCYCLCLGRRGTRYTSYDPGLSIGGENVSTISETVPFKFLGRQIDNRGCTPALEEVINNFIIDIQKVDQQPLSNVKKAWIYDNYLTSRLNWPFLVYDISQSLLKKLDANVTKTLKSWLGLAQSADPSTLYRASNNFGMTFKKPSDLYKHLRVTKMHVLAKSKDEIVQALPKDQSTKELESRLQFHKKFMMGSQTGRVGLGNTRRQSDKDITKSFLQVDENNTYKVHAMNLEIQNEWLTLGEFCIPIALKWRTLIYDWSPALLKFYLNAFQLTLPDQSNLVRWGKATDKTCNSCGEAIGTARHLLVGCRTLLDRGHYSRRHDKVLEIVREAVSLAVARAKKGLTTNQRNDVAFVKEGCSKKTNQKPYSILIAAADWTLLADSYEKHYKIPEDVCASSSRPDIFLFSKQQKRAVLVELTVPWETNIPKDHAIKINKYFDLTNELTKNGYVVKLYAVEVGARGIPAKSLYNLFKDLGLPRASVSSLLKRISKTALIGSYQIWIGRGGNTTDGGGER

SEQ ID NO: 19615 - protein, 925 aa, Eilema sororculum
MRKRKRDLIKRLRIAKAMGDNQLSHQLARALRAILKLIQGISAQIINENNNLNRAKHEVEFDKDPFKYSRNIFSDKKQDRLLLNNDQIYSYYKNNYEVPKHEKPYGEPKAQKPSNPHFTFNCNPPSLEEIEHQIKKKPTKTAPGPDGIPYIIYKKCPSVRKHVLSIFNRIWSSKEIPAAFGRANFVLIPKKEIVTSPKDARPIALTNTISKIFFSWLQLKMTNFMINNNYFRPNHQKGFLPGISGCLEHNSLLAESLKDARLNERQITVCWIDLENAFGSVHHQLMLFALKWYNFPSIIREIIASYYDKLKFVINTKDGHTQPLNYNVGLFQGCCLSPIVFNIVINILIDSITTHERKWGYRFKLNGKYTESILAFADDLAILTRSPKQCQDLLRKVDEFCTWTEGMKTKPSKCYCLCLGRRGTRYTSYDPGLSIGGENVSTISETVPFKFLGRQIDNRGCTPALEEVINNFIIDIQKVDQQPLSNVKKAWIYDNYLTSRLNWPFLVYDISQSLLKKLDANVTKTLKSWLGLAQSADPSTLYRASNNFGMTFKKPSELYKHLRVTKMHVLAKSKDEIVQALPKDQSTKELESRLQFHKKFMIGSQTGRVGLGNTRRQSDKDITKSFLQVDENNTYKVHAMNLEIQNEWLTLGEFCIPIALKWRTLIYDWSPALLKFYLNAFQLTLPDQSNLVRWGKATDKTCNSCGEAIGTARHLLVGCRTLLDRGHYSRRHDKVLEIVREAVSLAVARAKKDLTTNQRNDVAFVKEGCSKKTNQKPYSILIAAADWTLLADSYEKHYKIPEDVCASSSRPDIFLFSKQQKRAVLVELTVPWETNIPKDHAIKINKYFDLTNELTKNGYVVKLYAVEVGARGIPAKSLYNLFKDLGLPRASVSSLLKRISKTALIGSYQIWIGRGGNTTDGGGER

SEQ ID NO: 19616 - protein, 926 aa, Eilema sororculum
MRKRKRDLIKRLRIAKAMGDNQLSHQLARALRAILKLIQGISAQIINENNNLNRAKHEVEFDKDPFKYSRNIFSDKKQDRLLLNNDQIYSYYKNNYEVPKHEKPYGEPKAQKPSNPHFTFNCNPPSLEEIEHQIKKKPTKTAPGPDGIPYIIYKKCPSVRKHVLSIFNRIWSSKEIPAAFGRANFVLIPKKEIVTSPKDARPIALTNTISKIFFSWLQLKKMTNFMINNNYFRPNHQKGFLPGISGCLEHNSLLAESLKDARLNERQITVCWIDLENAFGSVHHQLMLFALKWYNFPSIIREIIASYYDKLKFVINTKDGHTQPLNYNVGLFQGCCLSPIVFNIVINILIDSITTHERKWGYRFKLNGKYTESILAFADDLAILTRSPKQCQDLLRKVDEFCTWTEGMKTKPSKCYCLCLGRRGTRYTSYDPGLSIGGENVSTISETVPFKFLGRQIDNRGCTPALEEVINNFIIDIQKVDQQPLSNVKKAWIYDNYLTSRLNWPFLVYDISQSLLKKLDANVTKTLKSWLGLAQSADPSTLYRASNNFGMTFKKPSELYKHLRVTKMHVLAKSKDEIVQALPKDQSTKELESRLQFHKKFMIGSQTGRVGLGNTRRQSDKDITKSFLQVDENNTYKVHAMNLEIQNEWLTLGEFCIPIALKWRTLIYDWSPALLKFYLNAFQLTLPDQSNLVRWGKATDKTCNSCGEAIGTARHLLVGCRTLLDRGHYSRRHDKVLEIVREAVSLAVARAKKGLTTNQRNDVAFVKEGCSKKTNQKPYSILIAAADWTLLADSYEKHYKIPEDVCASSSRPDIFLFSKQQKRAVLVELTVPWETNIPKDHAIKINKYFDLTNELTKNGYVVKLYAVEVGARGIPAKSLYNLFKDLGLPRASVSSLLKRISKTALIGSYQIWIGRGGNTTDGGGER

SEQ ID NO: 19617 - protein, 925 aa, Eilema depressum
MRKKKRDLIKRLRFAKAMGDNQLSHQLARALRSILKLIQGISFQIINENNNFIRAKHEVEFDKDPFKYSRNIFSDRKQDRLPLSNDQIHSYYKSNYEVPKYKKPYSKPNAQKPVSPHFTFDCNPPSLDEIEQQIKKKPTKTAPGPDGIPYIIYKKCPSVRKHLLSIFNRIWSSKEVPAAFGKANFVLIPKKEIVTSPKDARPIALTNTISKIFFSWLQFKMANFMINNNYFRPNHQKGFLPGISGCLEHNSLLAESLKDARSNEKQITVCWIDLENAFGSVQHELMLFALKWYHFPSTIWEIISSYYGKLKFVINTKDGYTQPLNYNVGLFQGCCLSPIVFNIVINILIDNISTHDKKWGYRFKLNGKYTESILAFADDLAILTRNPKQCQDLLRRVDDFCAWTDGMKTKPSKCYCLCLGRRGTRYTSYDPGLSIGGENVSTISETVPFKFLGRKIDNRGCTPALDELIDSFIIDLKKVDQQPISNVKKAWIYDNYLTSRLNWPFLIYDINQSLLKKLDASVTKTLKSWLGLAQSADPSALYRSANNFGMTLKKPSELYKHLRVTKMHVLSKSKDEIVKVLPKDKNASELESRLQFHKKFMMGSQTGRVGLGNIQKQTDKEITKSFLQTDENNTYKVHAMNLEMQNEWLTLGEFCIPIALKWRTIIYDWSPALLKFYLNAFQLTLPDQSNLVRWGKATDKTCNSCGEATGTARHLLVGCRTLLDRGHYSRRHDKVLEIIREAVSLAVARAKKGLTTNQRNDIVFVKEGCSKKSPQKPYSILIAAVDWTILVDTYEKHYKIPEDICASSSRPDIFLFSRSHRRAVLVELTVPWETNIPKDHAIKTNKYFDLTNELTKNGYVVKLYAVEVGARGIPAKSLYNLLKDLGLPRASVSSLLNRISKAALIGSYQIWIGRGGNTTDGGGER

SEQ ID NO: 19618 - protein, 925 aa, Eilema depressum
MRKKKRDLIKRLRFAKAMGDNQLSHQLARALRSILKLIQGISVQIINENNNFIRAKHEVEFDKDPFKYSRNIFSDRKQDRLPLSNDQIHSYYKSNYEVPKYKKLYSKPNAQKPVSPHFTFDCNPPSLDEIEQQIKKKPTKTAPGPDGIPYIIYKKCPSVRKHLLSIFNRIWSSKEVPAAFGKANFVLIPKKEIVTSPKDARPIALTKTISKIFFSWLQFKMANFMINNNYFRPNHQKGFLPGISGCLEHNSLLAESLKDARSNEKQITVCWIDLENAFGSVQHELMLFALKWYHFPSTIWEIISSYYGKLKFVINTKDGYTQPLNYNVGLFQGCCLSPIVFNIVINILIDNISTHDKKWGYRFKLNGKYTESILAFADDLAILTRNPKQCQDLLRRVDDFCAWTDGMKTKPSKCYCLCLGRRGTRYTSYDPGLSIGGENVSTISETVPFKFLGRKIDNRGCTPALDELIDSFIIDLKKVDQQPISNVKKAWIYDNYLTSRLNWPFLIYDINQSLLKKLDASVTKTLKSWLGLAQSADPSALYRSANNFGMTLKKPSELYKHLRVTKMHVLSKSKDEIVKVLPKDKNASELESRLQFHKKFMIGSQTGRVGLGNIQRQTDKEITKSFLQTDENNTYKVHAMNLEMQNEWLNLGEFCIPIALKWRTIIYDWSPALLKFYLNAFQLTLPDQSNLVRWGKATDKTCNSCGEATGTARHLLVGCRALLDRGHYSRRHDKVLEIIREAVSLAVARAKKGLTTNQRNDIVFVKEGCSKKSPQKPYSILIAAVDWTILVDAYEKHYKIPEDICASSSRPDIFLFSRSHRRAVLVELTVPWETNIPKDHAIKTNKYFDLTNELTKNGYVVKLYAVEVGARGIPAKSLYNLLKDLGLPRASVSSLLNRISKAALIGSYQIWIGRGGNTTDGGGER

SEQ ID NO: 19619 - protein, 925 aa, Eilema depressum
MRKKKRDLIKRLRFAKAMGDNQLSHQLARALRSILKLIQGISMQIINENNNFNRAKHEVEFDKDPFKYSRNIFCDRKQDRLPLSNDQIHSYYKSNYEVPKYEKLYNKPNAQKPLSPHFTFDCNPPSLEEIEHQIKKKPTKTAPGPDGIPYIIYKKCPSVRKHLLSIFNRIWSSKVVPAAFGKANFVLIPKKEIVTSPKDARPIALTNTISKIFFSWLQFKMTNFMINNNYFRRNHQKGFLPGISGCLEHNSLLAESLKDARSNEKQITVCWIDLENAFGSVQHELMLFALKWYHFPSIIWEIISSYYGKLKFVINTKDGYTQPLNYNVGLFQGCCLSPIVFNIVINILIDNISTHDKKWGYRFKLNGKYTESILAFADDLAILTRNPKQCQDLLRRVDDFCAWTDGMKTKPSKCYCLCLGRRGTRYTSYDPGLSIGGENVSTISETVPFKFLGRKIDNRGCTPALDELIDSFIIDLKKVDQQPISNVKKAWIYENYLTSRLNWPFLIYDINQSLLKKLDASVTKTLKSWLGLAQSADPSALYRSANNFGMTFKKPSELYKHLRVTKMHVLSKSKDEIVKVLPKDKNASELESRLQFHKKFMIGSQTGRVGLGNIRKQTDKEITKSFLQADENNTYKVHAMNLEMQNEWLTLGEFCIPIALKWRTIIYDWSPALLKFYLNAFQLTLPDQSNLVRWGKATDKKCNSCGEATGTARHLLVGCRTLLDRGHYSRRHDKVLEIIREAVSLAVARAKKGLTTNQRNDIMFVKEGCSKKSSQKPYSILITAVDWTILVDTYEKHYKIPEDICASSSRPDIFLFSRSHRRAVLVELTVPWETNIPKDHAIKTNKYFDLTNELTKNGYVVKLYAVEVGARGIPAKSLYNLLKDLGLPRASVSSLLNRISKAALIGSYQIWIGRGGNTTDGGGER

SEQ ID NO: 19620 - protein, 705 aa, Eilema sororculum
MTNFMINNNYFRPNHQKGFLPGISGCLEHNSLLAESLKDARLNERQITVCWIDLENAFGSVHHQLMLFALKWYNFPSIIREIIASYYDKLKFVINTKDGHTQPLNYNVGLFQGCCLSPIVFNIVINILIDSITTHERKWGYRFKLNGKYTESILAFADDLAILTRSPKQCQDLLRKVDEFCTWTEGMKTKPSKCYCLCLGRRGTRYTSYDPGLSIGGENVSTISETVPFKFLGRQIDNRGCTPALEEVINNFIIDIQKVDQQPLSNVKKAWIYDNYLTSRLNWPFLVYDISQSLLKKLDANVTKTLKSWLGLAQSADPSTLYRASNNFGMTFKKPSELYKHLRVTKMHVLAKSKDEIVQALPKDQSTKELESRLQFHKKFMIGSQTGRVGLGNTRRQSDKDITKSFLQVDENNTYKVHAMNLEIQNEWLTLGEFCIPIALKWRTLIYDWSPALLKFYLNAFQLTLPDQSNLVRWGKATDKTCNSCGEAIGTARHLLVGCRTLLDRGHYSRRHDKVLEIVREAVSLAVARAKKGLTTNQRNDVAFVKEGCSKKTNQKPYSILIAAADWTLLADSYEKHYKIPEDVCASSSRPDIFLFSKQQKRAVLVELTVPWETNIPKDHAIKINKYFDLTNELTKNGYVVKLYAVEVGARGIPAKSLYNLFKDLGLPRASVSSLLKRISKTALIGSYQIWIGRGGNTTDGGGER

SEQ ID NO: 19621 - protein, 908 aa, Eilema sororculum
MGDNQLSHQLARALRAILKLIQGISAQIINENNNLNRAKHEVEFDKDPFKYSRNIFSDKKQDRLLLNNDQIYSYYKNNYEVPKHEKPYGEPKAQKPSNPHFTFNCNPPSLEEIEHQIKKKPTKTAPGPDGIPYIIYKKCPSVRKHVLSIFNRIWSSKEIPAAFGRANFVLIPKKEIVTSPKDARPIALTNTISKIFFSWLQLKMTNFMINNNYFRPNHQKGFLPGISGCLEHNSLLAESLKDARLNERQITVCWIDLENAFGSVHHQLMLFALKWYNFPSIIREIIASYYDKLKFVINTKDGHTQPLNYNVGLFQGCCLSPIVFNIVINILIDSITTHERKWGYRFKLNGKYTESILAFADDLAILTRSPKQCQDLLRKVDEFCTWTEGMKTKPSKCYCLCLGRRGTRYTSYDPGLSIGGENVSTISETVPFKFLGRQIDNRGCTPALEEVINNFIIDIQKVDQQPLSNVKKAWIYDNYLTSRLNWPFLVYDISQSLLKKLDANVTKTLKSWLGLAQSADPSTLYRASNNFGMTFKKPSELYKHLRVTKMHVLAKSKDEIVQALPKDQSTKELESRLQFHKKFMIGSQTGRVGLGNTRRQSDKDITKSFLQVDENNTYKVHAMNLEIQNEWLTLGEFCIPIALKWRTLIYDWSPALLKFYLNAFQLTLPDQSNLVRWGKATDKTCNSCGEAIGTARHLLVGCRTLLDRGHYSRRHDKVLEIVREAVSLAVARAKKGLTTNQRNDVAFVKEGCSKKTNQKPYSILIAAADWTLLADSYEKHYKIPEDVCASSSRPDIFLFSKQQKRAVLVELTVPWETNIPKDHAIKINKYFDLTNELTKNGYVVKLYAVEVGARGIPAKSLYNLFKDLGLPRASVSSLLKRISKTALIGSYQIWIGRGGNTTDGGGER

SEQ ID NO: 19622 - protein, 873 aa, Conopomorpha cramerella
MGDKQLSHQLARALRSILKLIQGVSVQIMKETNSFNRAKHEVEFDRDPFKYSRNIFNDSQQNRLLLSNDQIYNYYKSYYEVPKYEKLYTDPRAQRPANPQFTFDCNPPSLEEIELKIKQKSTKSAPGPDGIPNIIYKKCPSVRKHLLSIFRKIWSSKEIPAAFGKANFVLIPKKETVTSPSDTRPIALTNTISKIFFSWLQYKMTSYMIHNNYFRPNHQKGFLPGISGCLEHNTLLAESLKDARSNERQITACWIDLENAFGSVQHELMLFALKWYNFPPIIIETIASYYQKLKFVIKIKEGHTQPLNYNIGLFQGCCLSPIVFNIVINILIDSILIYEKKWGYRFKTNGKYTESVLAFADDLAILTRNPKQCQELLRKVDEFCMWTDGMRVKPSKCYCLALGRRDTRYMSYDPGLSIGGEKVSIISETVPFKFLGRKINHRGCTPALDEVIDDFIVNLSKVDQQPLSNVKKAWIYDNYLTSRLNWPFLVYDINQNLLKKLDANVTKTLKSWLGLAQSADPSTLYRASNNFGMKLKKPSELYKHLRVTKTRVLSKSKDEIVQALPKDKNMSELESRLQFHKKFMVGTQTGRAGLGCTRKQTDKEIAKSFLKQDENDIYRVHAMNLEMQNEWLTLGEFCIPLALKWRTLIYDWSPALLKFYLNAFQLTLPDQSNLVRWGKATDKTCNTCGEAIGTARHLLVGCKTLLDRGLYSRRHDRVLEIVRDAVSLAVARAKKGLTTNIRNDIKFVKEGSSKKTPQKPYSVLATATDWTLLVDAYEKHYRIPEDICTSASRPDIFLFSRLKKRVILIELTVPWETNIPKDHAIKTNKYFDLTNELTKNGFLVTLYAVEVGARGIPAKSLYNLKTSDYQEPR

SEQ ID NO: 19623 - protein, 925 aa, Eilema sororculum
MRKRKRDLIKRLRIAKAMGDNQLSHQLARALRAILKLIQGISAQIINENNNLNRAKHEVEFDKDPFKYSRNIFSDKKQDRLLLNNDQIYSYYKNNYEVPKHEKPYGEPKAQKPSNPHFTFNCNPPSLEEIEHQIKKKPTKTAPGPDGIPYIIYKKCPSVRKHVLSIFNRIWSSKEIPAAFGRANFVLIPKKEIVTSPKDARPIALTNTISKIFFSWLQLKMTNFMINNNYFRPNHQKGFLPGISGCLEHNSLLAESLKDARLNERQITVCWIDLENAFGSVHHQLMLFALKWYNFPSIIREIIASYYDKLKFVINTKDGHTQPLNYNVGLFQGCCLSPIVFNIVINILIDSITTHERKWGYRFKLNGKYTESILAFADDLAILTRSPKQCQDLFRKVDEFCTWTEGMKTKPSKCYCLCLGRRGTRYTSYDPGLSIGGENVSTISETVPFKFLGRQIDNRGCTPALEEVINNFIIDIQKVDQQPLSNVKKAWIYDNYLTSRLNWPFLVYDISQSLLKKLDANVTKTLKSWLGLAQSADPSTLYRASNNFGMTFKKPSELYKHLRVTKMHVLAKSKDEIVQALPKDQSTKELESRLQFHKKFMIGSQTGRVGLGNTRRQSDKDITKSFLQVDENNTYKVHAMNLEIQNEWLTLGEFCIPIALKWRTLIYDWSPALLKFYLNAFQLTLPDQSNLVRWGKATDKTCNSCGEAIGTARHLLVGCRTLLDRGHYSRRHDKVLEIVREAVSLAVARAKKGLTTNQRNDVAFVKEGCSKKTNQKPYSILIAAADWTLLADSYEKHYKIPEDVCASSSRPDIFLFSKQQKRAVLVELTVPWETNIPKDHAIKINKYFDLTNELTKNGYVVKLYAVEVGARGIPAKSLYNLFKDLGLPRASVSSLLKRISKTALIGSYQIWIGRGGNTTDGGGER

SEQ ID NO: 19624 - protein, 922 aa, Eilema sororculum
MRKRKRDLIKRLRIAKAMGDNQLSHQLARALRAILKLIQGISAQIINENNNLNRAKHEVEFDKDPFKYSRNIFSDKKQDRLLLNNDQIYSYYKNNYEVPKHEKPYGEPKAQKPSNPHFTFNCNPPSLEEIEHQIKKKPTKTAPGPDGIPYIIYKKCPSVRKHVLSIFNRIWSSKEIPAAFGRANFVLIPKKEIVTSPKDARPIALTNTISKIFFSWLQLKMTNFMINNNYFRPNHQKGFLPGISGCLEHNSLLAESLKDARLNERQITVCWIDLENAFGSVHHQLMLFALKWYNFPSIIREIIASYYDKLKFVINTKDGHTQPLNYNVGLFQGCCLSPIVFNIVINILIDSITTHERKWGYRFKLNGKYTESILAFADDLAILTRSPKQCQDLLRKVDEFCTWTEGMKTKPSKCYCLCLGRRGTRYTSYDPGLSIGGENVSTISETVPFKFLGRQIDNRGCTPALEEVINNFIIDIQKVDQQPLSNVKKAWIYDNYLTSRLNWPFLVYDISQSLLKKLDANVTKTLKSWLGLAQSADPSTLYRASNNFGMTFKKPSELYKHLRVTKMHVLAKSKDEIVQALPKDQSTKELESRLQFHKKFMIGSQTGRVGLGNTRRQSDKDITKSFLQVDENNTYKVHAMNLEIQNEWLTLGEFCIPIALKWRTLIYDWSPALLKFYLNAFQLTLPDQSNLVRWGKATDKTCNSCGEAIGTARHLLVGCRTLLDRGHYSRRHDKVLEIVREAVSLAVARAKKGLTTNQRNDVAFVKEGCSKKTNQKPYSILIAAADWTLLADSYEKHYKIPEDVCASSSRPDIFLFSKQQKRAVLVELTVPWETNIPKDHAIKINKYFDLTNELTKNGYVVKLEVGARGIPAKSLYNLFKDLGLPRASVSSLLKRISKTALIGSYQIWIGRGGNTTDGGGER

SEQ ID NO: 19625 - protein, 949 aa, Eilema depressum
MSYEHYPPSLPYARKNRENAFKIKMRKKKRDLIKRLRFAKAMGDNQLSHQLARALRSILKLIQGISFQIINENNNFIRAKHEVEFDKDPFKYSRNIFSDRKQDRLPLSNDQIHSYYKSNYEVPKYKKPYSKPNAQKPVSPHFTFDCNPPSLDEIEQQIKKKPTKTAPGPDGIPYIIYKKCPSVRKHLLSIFNRIWSSKEVPAAFGKANFVLIPKKEIVTSPKDARPIALTNTISKIFFSWLQFKMANFMINNNYFRPNHQKGFLPGISGCLEHNSLLAESLKDARSNEKQITVCWIDLENAFGSVQHELMLFALKWYHFPSTIWEIISSYYGKLKFVINTKDGYTQPLNYNVGLFQGCCLSPIVFNIVINILIDNISTHDKKWGYRFKLNGKYTESILAFADDLAILTRNPKQCQDLLRRVDDFCAWTDGMKTKPSKCYCLCLGRRGTRYTSYDPGLSIGGENVSTISETVPFKFLGRKIDNRGCTPALDELIDSFIIDLKKVDQQPISNVKKAWIYDNYLTSRLNWPFLIYDINQSLLKKLDASVTKTLKSWLGLAQSADPSALYRSANNFGMTLKKPSELYKHLRVTKMHVLSKSKDEIVKVLPKDKNASELESRLQFHKKFMIGSQTGRVGLGNIQKQTDKEITKSFLQTDENNTYKVHAMNLEMQNEWLTLGEFCIPIALKWRTIIYDWSPALLKFYLNAFQLTLPDQSNLVRWGKATDKTCNSCGEATGTARHLLVGCRTLLDRGHYSRRHDKVLEIIREAVSLAVARAKKGLTTNQRNDIVFVKEGCSKKSPQKPYSILIAAVDWTILVDTYEKHYKIPEDICASSSRPDIFLFSRSHRRAVLVELTVPWETNIPKDHAIKTNKYFDLTNELTKNGYVVKLYAVEVGARGIPAKSLYNLLKDLGLPRASVSSLLNRISKAALIGSYQIWIGRGGNTTDGGGER

SEQ ID NO: 19626 - protein, 925 aa, Eilema sororculum
MRKRKRDLIKRLRIAKAMGDNQLSHQLARALRAILKLIQGISAQIINENNNLNRAKHEVEFHKDPFKYSRNIFSDKKQDRLLLNNDQIYSYYKNNYEVPKHEKPYGEPKAQKPSKPHFTFNCNPPSLEEIEHQIKKKPTKTAPGPDGIPYIIYKKCPSVRKHVLSIFNRIWSSKEIPAAFGRANFVLIPKKEIVTSPKDARPIALTNTISKIFFSWLQLKMTNFMINNNYFRPNHQKGFLPGISGCLEHNSLLAESLKDARLNERQITVCWIDLENAFGSVHHQLMLFALKWYNFPSIIREIIASYYDKLKFVINTKDGHTQPLNYNVGLFQGCCLSPIVFNIVINILIDSITTHERKWGYRFKLNGKYTESILAFADDLAILTRSPKQCQDLLRKVDEFCTWTEGMKTKPSKCYCLCLGRRGTRYTSYDPGLSIGGENVSTISETVPFKFLGRQIDNRGCTPALEEVINNFIIDIQKVDQQPLSNVKKAWIYDNYLTSRLNWPFLVYDISQSLLKKLDANVTKTLKSWLGLAQSADPSTLYRASNNFGMTFKKPSELYKHLRVTKMHVLAKSKDEIVQALPKDQSTKELESRLQFHKKFMIGSQTGRVGLGNTRRQSDKDITKSFLQVDENNTYKVHAMNLEIQNEWLTLGEFCIPIALKWRTLIYDWSPALLKFYLNAFQLTLPDQSNLVRWGKATDKTCNSCGEAIGTARHLLVGCRTLLDRGHYSRRHDKVLEIVREAVSLAVARAKKGLTTNQRNDVAFVKEGCSKKTNQKPYSILIAAADWTLLADSYEKHYKIPEDVCASSSRPDIFLFSKQQKRAVLVELTVPWETNIPKDHAIKINKYFDLTNELTKNGYVVKLYAVEVGARGIPAKSLYNLFKDLGLPRASVSSLLKRISKTALIGSYQIWIGRGGNTTDGGGER

SEQ ID NO: 19627 - protein, 925 aa, Eilema depressum
MRKKKRDLIKRLRFAKAMGDNQLSHQLARALRSILKLIQGISFQIINENNNFIRAKHEVEFDKDPFKYSRNIFSDRKQDRLPLSNDQIHSYYKSNYEVPKYKKPYSKPNAQKPVSPHFTFDCNPPSLDEIEQQIKKKPTKTAPGPDGIPYIIYKKCPSVRKHLLSIFNRIWSSKEVPAAFGKANFVLIPKKEIVTSPKDARPIALTNTISKIFFSWLQFKMANFMINNNYFRPNHQKGFLPGISGCLEHNSLLAESLKDARSNEKQITVCWIDLENAFGSVQHELMLFALKWYHFPSTIWEIISSYYGKLKFVINTKDGYTQPLNYNVGLFQGCCLSPIVFNIVINILIDNISTHDKKWGYRFKLNGKYTESILAFADDLAILTRNPKQCQDLLRRVDDFCAWTDGMKTKPSKCYCLCLGRRGTRYTSYDPGLSIGGENVSTISETVPFKFLGRKIDNRGCTPALDELIDSFIIDLKKVDQQPISNVKKAWIYDNYLTSRLNWPFLIYDINQSLLKKLDASVTKTLKSWLGLAQSADPSALYRSANNFGMTLKKPSELYKHLRVTKMHVLSKSKDEIVKILPKDKNASELESRLQFHKKFMIGSQTGRVGLGNIQKQTDKEITKSFLQTDENNTYKVHAMNLEMQNEWLTLGEFCIPIALKWRTIIYDWSPALLKFYLNAFQLTLPDQSNLVRWGKATDKTCNSCGEATGTARHLLVGCRTLLDRGHYSRRHDKVLEIIREAVSLAVARAKKGLTTNQRNDIVFVKEGCSKKSPQKPYSILIAAVDWTILVDTYEKHYEIPEDICASSSRPDIFLFSRSHRRAVLVELTVPWETNIPKDHAIKTNKYFDLTNELTKNGYVVKLYAVEVGARGIPAKSLYNLLKDLGLPRASVSSLLNRISKAALIGSYQIWIGRGGNTSDGGGER

SEQ ID NO: 19628 - protein, 705 aa, Eilema sororculum
MTNFMINNNYFRPNHQKGFLPGISGCLEHNSLLAESLKDARLNERQITVCWIDLENAFGSVHHQLMLFALKWYNFPSIIREIIASYYDKLKFVINTKDGHTQPLNYNVGLFQGCCLSPIVFNIVINILIDSITTHERKWGYRFKLNGKYTESILAFADDLAILTRSPKQCQDLLRKVDEFCTWTEGMKTKPSKCYCLCLGRRGTRYTSYDPGLSIGGENVSTISETVPFKFLGRQIDNRGCTPALEEVINNFIIDIQKVDQQPLSNVKKAWIYDNYLTSRLNWPFLVYDISQSLLKKLDANVTKTLRSWLGLAQSADPSTLYRASNNFGMTFKKPSELYKHLRVTKMHVLAKSKDEIVQALPKDQSTKELESRLQFHKKFMIGSQTGRVGLGNTRRQSDKDITKSFLQVDENNTYKVHAMNLEIQNEWLTLGEFCIPIALKWRTLIYDWSPALLKFYLNAFQLTLPDQSNLVRWGKATDKTCNSCGEAIGTARHLLVGCRTLLDRGHYSRRHDKVLEIVREAVSLAVARAKKGLTTNQRNDVAFVKEGCSKKTNQKPYSILIAAADWTLLADSYEKHYKIPEDVCASSSRPDIFLFSKQQKRAVLVELTVPWETNIPKDHAIKINKYFDLTNELTKNGYVVKLYAVEVGARGIPAKSLYNLFKDLGLPRASVSSLLKRISKTALIGSYQIWIGRGGNTTDGGGER

SEQ ID NO: 19629 - protein, 908 aa, Conopomorpha cramerella
MGDKQLSHQLARALRSILKLIQGVSVQIMKETNSFNRAKHEVEFDRDPFKYSRNIFNDSQQNRLLLSNDQIYNYYKSYYEVPKYEKLYTDPRAQRPANPQFTFDCNPPSLEEIELKIKQKSTKSAPGPDGIPNIIYKKCPSVRKHLLSIFRKIWSSKEIPAAFGKANFVLIPKKETVTSPSDTRPIALTNTISKIFFSWLQYKMTSYMIHNNYFRPNHQKGFLPGISGCLEHNTLLAESLKDARSNERQITACWIDLENAFGSVQHELMLFALKWYNFPPIIIETIASYYQKLKFVIKIKEGHTQPLNYNIGLFQGCCLSPIVFNIVINILIDSILIYEKKWGYRFKTNGKYTESVLAFADDLAILTRNPKQCQELLRKVDEFCMWTDGMRVKPSKCYCLALGRRDTRYMSYDPGLSIGGEKVSIISETVPFKFLGRKINHRGCTPALDEVIDDFIVNLSKVDQQPLSNVKKAWIYDNYLTSRLNWPFLVYDINQNLLKKLDANVTKTLKSWLGLAQSADPSTLYRASNNFGMKLKKPSELYKHLRVTKTRVLSKSKDEIVQALPKDKNMSELESRLQFHKKFMVGTQTGRAGLGCTRKQTDKEIAKSFLKQDENDIYRVHAMNLEMQNEWLTLGEFCIPLALKWRTLIYDWSPALLKFYLNAFQLTLPDQSNLVRWGKATDKTCNTCGEAIGTARHLLVGCKTLLDRGLYSRRHDRVLEIVRDAVSLAVARAKKGLTTNIRNDIKFVKEGSSKKTPQKPYSVLATATDWTLLVDAYEKHYRIPEDICTSTSRPDIFLFSRLKKRLILIELTVPWETNIPKDHAIKTNKYFDLTNVLTKNGFLVTLYAVEVGARGIPAKSLYNLFKDLGLPRASVSSLLERTSKAALVGSYQIWIGRRGNMGTGEGEC

SEQ ID NO: 19630 - protein, 925 aa, Eilema sororculum
MRKRKRDLIKRLRIAKAMGDNQLSHQLARALRAILKLIQGISAQIINENNNLNRAKHEVEFDKDPFKYSRNIFSDKKQDRLLLNNDQIYSYYKNNYEVPKHEKPYGEPKAQKPSNPHFTFNCNPPSLEEIEHQIKKKPTKTAPGPDGIPYIIYKKCPSVRKHVLSIFNRIWSSKEIPAAFGRANFVLIPKKEIVTSPKDARPIALTNTISKIFFSWLQLKMTNFMINNNYFRPNHQKGFLPGISGCLEHNSLLAESLKDARLNERQITVCWIDLENAFGSVHHQLMLFALKWYNFPSIIREIIASYYDKLKFVINTKDGHTQPLNYNVGLFQGCCLSPIVFNIVINILIDSITTHERKWGYRFKLNGKYTESILAFADDLAILTRSPKQCQDLLRKVDEFCTWTEGMKTKPSKCYCLCLGRRGTRYTSYDPGLSIGGENVSTISETVPFKFLGRQIDNRGCTPALEEVINNFIIDIQKVDQQPLSNVKKAWIYDNYLTSRLNWPFLVYDISQSLLKKLDANVTKTLKSWLGLAQSADPSTLYRASNNFGMTFKKPSELYKHLRVTKMHVLAKSKDEIVQALPKDQSTKELESRLQFHKKFMIGSQTGRVGLGNTRRQSDKDITKSFLQVDENNTYKVHAMNLEIQNEWLTLGEFCIPIALKWRTLIYDWSPALLKFYLNAFQLTLPDQSNLVRWGKATDKTCNSCGEAIGTARHLLVGCRTLLDRGHYSRRHDKVLEIVREAVSLAVARAKKGLTTNQRNDVAFVKEGCSKKTNQKPYSILIAAADWTLLADSYEKHYKIPEDVCALSSRPDIFLFSKQQKRAVLVELTVPWETNIPKDHAIKINKYFDLTNELTKNGYVVKLYAVEVGARGIPAKSLYNLFKDLGLPRASVSSLLKRISKTALIGSYQIWIGRGGNTTDGGGER

SEQ ID NO: 19631 - protein, 1122 aa, Eilema sororculum
MTIGKTIDCWKDSRGQGLASQAPVFLNLAKSPIKKNTPRTIREGGRKNCPSRIKPNDHGENSDLTCKTCGKIYKKRAWFLKHLKLHDGVGARQSSVSSSTITTDRVDPHISQGKPDCKSNQEPINIRARLSIPSLKSSTCKAHDQNLAILLEHPGTKQDLNDQVESFQVSIYSYLHEYYPPPPNHARKNRENAFKIKMRKRKRDLIKRLRIAKAMGDNQLSHQLARALRAILKLIQGISAQIINENNNLNRAKHEVEFDKDPFKYSRNIFSDKKQDRLLLNNDQIYSYYKNNYEVPKHEKPYGEPKAQKPSNPHFTFNCNPPSLEEIEHQIKKKPTKTAPGPDGIPYIIYKKCPSVRKHVLSIFNRIWSSKEIPAAFGRANFVLIPKKEIVTSPKDARPIALTNTISKIFFSWLQLKMTNFMINNNYFRPNHQKGFLPGISGCLEHNSLLAESLKDARLNERQITVCWIDLENAFGSVHHQLMLFALKWYNFPSIIREIIASYYDKLKFVINTKDGHTQPLNYNVGLFQGCCLSPIVFNIVINILIDSITTHERKWGYRFKLNGKYTESILAFADDLAILTRSPKQCQDLLRKVDEFCTWTEGMKTKPSKCYCLCLGRRGTRYTSYDPGLSIGGENVSTISETVPFKFLGRQIDNRGCTPALEEVINNFIIDIQKVDQQPLSNVKKAWIYDHYLTSRLNWPFLVYDISQSLLKKLDANVTKTLKSWLGLAQSADPSTLYRASNNFGMTFKKPSELYKHLRVTKMHVLAKSKDEIVQALPKDQSTKELESRLQFHKKFMIGSQTGRVGLGNTRRQSDKDITKSFLQVDENNTYKVHAMNLEIQNEWLTLGEFCIPIALKWRTLIYDWSPALLKFYLNAFQLTLPDQSNLVRWGKATDKTCNSCGEAIGTARHLLVGCRTLLDRGHYSRRHDKVLEIVREAVSLAVARAKKGLTTNQRNDVAFVKEGCSKKTNQKPYSILIAAADWTLLADSYEKHYKIPEDVCASSSRPDIFLFSKQQKRAVLVELTVPWETNIPKDHAIKINKYFDLTNELTKNGYVVKLYAVEVGARGIPAKSLYNLFKDLGLPRASVSSLLKRISKTALIGSYQIWIGRGGNTTDGGGER

SEQ ID NO: 19632 - protein, 908 aa, Eilema sororculum
MGDNQLSHQLARALRAILKLIQGISAQIINENNNLNRAKHEVEFDKDPFKYSRNIFSDKKQDRLLLNNDQIYSYYKNNYEVPKHEKPYGEPKAQKPSNPHFTFNCNPPSLEEIEHQIKKKPTKTAPGPDGIPYIIYKKCPSVRKHLLSIFNRIWSSKEIPATFGRANFVLIPKKEIVTSPKDARPIALTNTISKIFFSWLQFKMTNFMINNNYFRPNHQKGFLPGISGCLEHNSLLAESLKDARLNERQITVCWIDLENAFGSVHHQLMLFALKWYNFPSIIREIIASYYDKLKFVINTKDGHTQPLNYNVGLFQGCCLSPIVFNIVINILIDSITTHERKWGYRFKLNGKYTESILAFADDLAILTRSPKQCQDLLRKVDEFCTWTDGMKTKPSKCYCLCLGRRGTRYTSYDPGLSIGGENVSTISETVPFKFLGRKIDNRGCTPALEEVINNFIIDIQKVDQQPLSNVKKAWIYDNYLTSRLNWPFLVYDISQSLLKKLDANVTKTLKSWLGLAQSADPSTLYRASNNFGMTFKKPSELYKHLRVTKMHVLAKSKDEIVQALPKDQSTKELESRLQFHKKFMIGSQTGRVGLGNTRRQSDKDITKSFLQVDENNTYKVHAMNLEVQNEWLTLGEFCIPIALKWRTLIYDWSPALLKFYLNAFQLTLPDQSNLVRWGKATDKTCNSCGEAIGTARHLLVGCRTLLDRGHYSRRYDKVLEIVREAVSLAVARAKKGLTTNQRNDVAFVKEGCSKKTNQKPYSILIAAADWTLLADSYEKHYKIPEDVCASSSRPDIFLFSKQQKRAVLVELTVPWETNIPKDHAIKINKYFDLTNELTKNGYVVKLYAVEVGARGIPAKSLYNLFKDLGLPRASVSSLLKRISKTALIGSYQIWIGRGGNTTDGGGER

SEQ ID NO: 19633 - protein, 961 aa, Eilema sororculum
MMVESFQVSIYSYLHEYYPPPPNHARKNRENAFKIKMRKRKRDLIKRLRIAKAMGDNQLSHQLARALRAILKLIQGISAQIINENNNLNRAKHEVEFDKDPFKYSRNIFSDKKQDRLLLNNDQIYSYYKNNYEVPKHEKPYGEPKAQKPSNPHFTFNCNPPSLEEIEHQIKKKPTKTAPGPDGIPYIIYKKCPSVRKHVLSIFNRIWSSKEIPAAFGRANFVLIPKKEIVTSPKDARPIALTNTISKIFFSWLQLKMTNFMINNNYFRPNHQKGFLPGISGCLEHNSLLAESLKDARLNERQITVCWIDLENAFGSVHHQLMLFALKWYNFPSIIREIIASYYDKLKFVINTKDGHTQPLNYNVGLFQGCCLSPIVFNIVINILIDSITTHERKWGYRFKLNGKYTESILAFADDLAILTRSPKQCQDLLRKVDEFCTWTEGMKTKPSKCYCLCLGRRGTRYTSYDPGLSIGGENVSTISETVPFKFLGRQIDNRGCTPALEEVINNFIIDIQKVDQQPLSNVKKAWIYDNYLTSRLNWPFLVYDISQSLLKKLDANVTKTLKSWLGLAQSADPSTLYRASNNFGMTFKKPSELYKHLRVTKMHVLAKSKDEIVQALPKDQSTKELESRLQFHKKFMIGSQTGRVGLGNTRRQSDKDITKSFLQVDENNTYKVHAMNLEIQNEWLTLGEFCIPIALKWRTLIYDWSPALLKFYLNAFQLTLPDQSNLVRWGKATDKTCNSCGEAIGTARHLLVGCRTLLDRGHYSRRHDKVLEIVREAVSLAVARAKKGLTTNQRNDVAFVKEGCSKKTNQKPYSILIAAADWTLLADSYEKHYKIPEDVCASSSRPDIFLFSKQQKRAVLVELTVPWETNIPKDHAIKINKYFDLTNELTKNGYVVKLYAVEVGARGIPAKSLYNLFKDLGLPRASVSSLLKRISKTALIGSYQIWIGRGGNTTDGGGER

SEQ ID NO: 19634 - protein, 1122 aa, Eilema sororculum
MTIGKTIDCWKDSRGQGLASQAPVFLNLAKSPIKKNTPRTIREGGRKNCPSRIKPNDHGENSDLTCKTCGKIYKKRAWFLKHLKLHDGVGARQSSVSSSTITTDRVDPHISQGKPDCKSNQEPINIRARLSIPSLKSSTWKAHDQNLAILLEHPGTKQDLNDQVESFQVSIYSYLHEYYPPPPNHARKNRENAFKIKMRKRKRDLIKRLRIAKAMGDNQLSHQLARALRAILKLIQGISAQIINENNNLNRAKHEVEFDKDPFKYSRNIFSDKKQDRLLLNNDQIYSYYKNNYEVPKHEKPYGEPKAQKPSNPHFTFNCNPPSLEEIEHQIKKKPTKTAPGPDGIPYIIYKKCPSVRKHVLSIFNRIWSSKEIPAAFGRANFVLIPKKEIVTSPKDARPIALTNTISKIFFSWLQLKMTNFMINNNYFRPNHQKGFLPGISGCLEHNSLLAESLKDARLNERQITVCWIDLENAFGSVHHQLMLFALKWYNFPSIIREIIASYYDKLKFVINTKDGHTQPLNYNVGLFQGCCLSPIVFNIVINILIDSITTHERKWGYRFKLNGKYTESILAFADDLAILTRSPKQCQDLLRKVDEFCTWTEGMKTKPSKCYCLCLGRRGTRYTSYDPGLSIGGENVSTISETVPFKFLGRQIDNRGCTPALEEVINNFIIDIQKVDQQPLSNVKKAWIYDHYLTSRLNWPFLVYDISQSLLKKLDANVTKTLKSWLGLAQSADPSTLYRASNNFGMTFKKPSELYKHLRVTKMHVLAKSKDEIVQALPKDQSTKELESRLQFHKKFMIGSQTGRVGLGNTRRQSDKDITKSFLQVDENNTYKVHAMNLEIQNEWLTLGEFCIPIALKWRTLIYDWSPALLKFYLNAFQLTLPDQSNLVRWGKATDKTCNSCGEAIGTARHLLVGCRTLLDRGHYSRRHDKVLEIVREAVSLAVARAKKGLTTNQRNDVAFVKEGCSKKTNQKPYSILIAAADWTLLADSYEKHYKIPEDVCASSSRPDIFLFSKQQKRAVLVELTVPWETNIPKDHAIKINKYFDLTNELTKNGYVVKLYAVEVGARGIPAKSLYNLFKDLGLPRASVSSLLKRISKTALIGSYQIWIGRGGNTTDGGGER

SEQ ID NO: 19635 - protein, 925 aa, Eilema sororculum
MRKRKRDLIKRLRIAKAMGDNQLSHQLARALRAILKLIQGISAQIINENNNLNRAKHEVEFDKDPFKYSRNIFSDKKQDRLLLNNDQIYSYYKNNYEVPKHEKPYGEPKAQKPSNPHFTFNCNPPSLEEIEHQIKKKPTKTAPGPDGIPYIIYKKCPSVRKHVLSIFNRIWSSKEIPAAFGRANFVLIPKKEIVTSPKDARPIALTNTISKIFFSWLQLKMTNFMINNNYFRPNHQKGFLPGISGCLEHNSLLAESLKDARLNERQITVCWIDLENAFGSVHHQLMLFALKWYNFPSIIREIIASYYDKLKFVINTKDGHTQPLNYNVGLFQGCCLSPIVFNIVINILIDSITTHERKWGYRFKLNGKYTESILAFADDLAILTRSPKQCQDLLRKVDEFCTWTEGMKTKPSKCYCLCLGRRGTRYTSYDPGLSIGGENVSTISETVPFKFLGRQIDNRGCTPALEEVINNFIIDIQKVDQQPLSNVKKAWIYDNYLTSRLNWPFLVYDISQSLLKKLDANVTKTLKSWLGLAQSADPSTLYRASNNFGMTFKKPSELYKHLRVTKMHVLAKSKDEIVQALPKDQSTKELESRLQFHKKFMIGSQTGRVGLGNTRRQSDKDITKSFLQVDENNTYKVHAMNLEIQNEWLTLGEFCIPIALKWRTLIYDWSPALLKFYLNAFQLTLPDQSNLVRWGKATDKTCNSCGEAIGTARHLLVGCRTLLDRGHYSRRHDKVLEIVREAVSLAVARAKKGLTTNQRNDVAFVKEGCSKKTNQKPYSILIAAADWTLLADSYEKHYNIPEDVCASSSRPDIFLFSKQQKRAVLVELTVPWETNIPKDHAIKINKYFDLTNELTKNGYVVKLYAVEVGARGIPAKSLYNLFKDLGLPRASVSSLLKRISKTALIGSYQIWIGRGGNTTDGGGER

SEQ ID NO: 19636 - protein, 1122 aa, Eilema sororculum
MTIGKTIDCWKDSRGQGLASQAPVFLNLAKSPIKKNTPRTIREGGRKNCPSRIKPNDHGENSNLTCKTCGKIYKKRAWFLKHLKLHDGVGARQSSVSSSTITTDRVDPHISQGKPDCKSNQEPINIRARLSIPSLKSSTWKAHDQNLAILLEHPGTKQDLNDQVESFQVSIYSYLHEYYPPPPNHARKNRENAFKIKMRKRKRDLIKRLRIAKAMGDNQLSHQLARALRAILKLIQGISAQIINENNNLNRAKHEVEFDKDPFKYSRNIFSDKKQDRLLLNNDQIYSYYKNNYEVPKHEKPYGEPKAQKPSNPHFTFNCNPPSLEEIEHQIKKKPTKTAPGPDGIPYIIYKKCPSVRKHVLSIFNRIWSSKEIPAAFGRANFVLIPKKEIVTSPKDARPIALTNTISKIFFSWLQLKMTNFMINNNYFRPNHQKGFLPGISGCLEHNSLLAESLKDARLNERQITVCWIDLENAFGSVHHQLMLFALKWYNFPSIIREIIASYYDKLKFVINTKDGHTQPLNYNVGLFQGCCLSPIVFNIVINILIDSITTHERKWGYRFKLNGKYTESILAFADDLAILTRSPKQCQDLLRKVDEFCTWTEGMKTKPSKCYCLCLGRRGTRYTSYDPGLSIGGENVSTISETVPFKFLGRQIDNRGCTPALEEVINNFIIDIQKVDQQPLSNVKKAWIYDHYLTSRLNWPFLVYDISQSLLKKLDANVTKTLKSWLGLAQSADPSTLYRASNNFGMTFKKPSELYKHLRVTKMHVLAKSKDEIVQALPKDQSTKELESRLQFHKKFMIGSQTGRVGLGNTRRQSDKDITKSFLQVDENNTYKVHAMNLEIQNEWLTLGEFCIPIALKWRTLIYDWSPALLKFYLNAFQLTLPDQSNLVRWGKATDKTCNSCGEAIGTARHLLVGCRTLLDRGHYSRRHDKVLEIVREAVSLAVARAKKGLTTNQRNDVAFVKEGCSKKTNQKPYSILIAAADWTLLADSYEKHYKIPEDVCASSSRPDIFLFSKQQKRAVLVELTVPWETNIPKDHAIKINKYFDLTNELTKNGYVVKLYAVEVGARGIPAKSLYNLFKDLGLPRASVSSLLKRISKTALIGSYQIWIGRGGNTTDGGGER

SEQ ID NO: 19637 - protein, 1002 aa, Eilema depressum
MRTARRCNLSRASSKYFAATTWKAHDQNLAILLEHPGTKQDLNSQVESFQVSIYSYLHEHYPPSLPYARKNRENAFKIKMRKKKRDLIKRLRFAKAMGDNQLSHQLARALRSILKLIQGISFQIINENNNFIRAKHEVEFDKDPFKYSRNIFSDRKQDRLPLSNDQIHSYYKSNYEVPKYKKPYSKPNAQKPVSPHFTFDCNPPSLDEIEQQIKKKPTKTAPGPDGIPYIIYKKCPSVRKHLLSIFNRIWSSKEVPAAFGKANFVLIPKKEIVTSPKDARPIALTNTISKIFFSWLQFKMANFMINNNYFRPNHQKGFLPGISGCLEHNSLLAESLKDARSNEKQITVCWIDLENAFGSVQHELMLFALKWYHFPSTIWEIISSYYGKLKFVINTKDGYTQPLNYNVGLFQGCCLSPIVFNIVINILIDNISTHDKKWGYRFKLNGKYTESILAFADDLAILTRNPKQCQDLLRRVDDFCAWTDGMKTKPSKCYCLCLGRRGTRYTSYDPGLSIGGENVSTISETVPFKFLGRKIDNRGCTPALDELIDSFIIDLKKVDQQPISNVKKAWIYDNYLTSRLNWPFLIYDINQSLLKKLDASVTKTLKSWLGLAQSADPSALYRSANNFGMTLKKPSELYKHLRVTKMHVLSKSKDEIVKILPKDKNASELESQFHKKFMIGSQTGRVGLGNIQKQTDKEITKSFLQTDENNTYKVHAMNLEMQNEWLTLGEFCIPIALKWRTIIYDWSPALLKFYLNAFQLTLPDQSNLVRWGKATDKTCNSCGKATGTARHLLVGCRTLLDRGHYSRRHDKVLEIIREAVGLAVARAKKGLTTNQRNDIVFVKEGCSKKSPQKPYSILIAAVDWTILVDTYEKHYKIPEDICASSSRPDIFLFSRSHRRAVLVELTVPWETNIPKDHAIKTNKYFDLTNELTKNGYVVKLYAVEVGARGIPAKSLYNLLKDLGLPRASVSSLLNRISKAALIGSYQIWIGRGGNTSDGGGER

SEQ ID NO: 19638 - protein, 997 aa, Danaus plexippus
MKQSTWKVHDDNLADLLEHPGSKQDLNSRVETFQNTIYDYFNEQYPPRNHYARKNKDNSFKIKMRRKKRELIKNLRIAKALGDNHLSHQLARALRSILKLIQGISAQTAENRDNFDRAKQEVDFDKNPFEYSKTIFKKERGQLLLTNEQIYDHFKSTYEVPKSVRLYADPNEQKPGIPRFDFHGIPPTLDEISIQIKKKSSKSAPGPDGIPYIVFKKCPSVRKHLTYIYDKIWSRKQIPECFGKAIFVLIPKKDRVTDPKDTRPIALTNTISKIFFSVLQTRMTRFMLSNRYFRPNHQKGFLPGISGCLEHNTLLSESLKDARKSERQITVCWIDLENAFGSIQHELMLFALRWYNFPPLVTDMIASYYSKLKFSITTKEGHSKTFSYNVGLFQGCCLSPIVFNIVINILVDKLTSNEKKWGYRFKFNNKYTESILAFADDLAILTRNPKHCQVLLDEVDRFCEWTDGLRTKPSKCHCLCLGRRSTRYTSYDPGLSLGGQCISTVTENAPFKFLGRKIDNIGRTPSLEGIVDSFLNDLNKVDSQQISNVKKAWIYDNYLTSRLNWPFLVYDFNKTLLSKLDAGVIKMLKLWLGLALTADSSALFRDRNSFGMSLKRPSELYKHLRVSKRYILGKSQDDVVTSLPKDKDAPELESRLQFHKQFMIGAQSNRVGLGSSRKVQDTDILKSFIRQDENDKYKIHAISLEMQNEWLDIGDFCIPLALKWRTLIHDWSPALLKFYLNAFQMTLPDQSNLVRWGKGTEKTCYICGKAVGTARHLLVGCKVLLDSGQYSRRHDRVLEIIREAVSLSVARAQKGITTNERSVGFVREGTRAIKTNVKPYSILKAATDWTIMMDTCEKQYKIPEDICASASRPDIFMYSRILKRVVMIELTVPWETNIPKDHTIKVNKYYELTNELTRNRFVVDLYAVEVGARGITAKSLYNLLKDLGLSRTHINSFLERTSKAALVGSFQIWLGRERSLDSGGSTPCNAMDPAPAR

SEQ ID NO: 19639 - protein, 991 aa, Danaus plexippus
MKQSTWKVHDDNLADLLEHPGSKQELNSRVETFQNTIYDYFNEQYPPRNHYARKNKDNSFKIKMRRKKRELIKNLRIAKALGDNHLSHQLARALRSILKLIQGISAQTAENRDNFDRAKQEVDFDKNPFEYSKTIFKKERGQLLLTNEQIYDHFKSTYEVPKSVRLYADPNEQKPGIPRFDFHGIPPTLDEISIQIKKKSSKSAPGPDGIPYIVFKKCPSVRKHLTYIYDKIWSRKQIPECFGKAIFVLIPKKDRVTDPKDTRPIALTNTISKIFFSVLQTRMTRFMLSNRYFRPNHQKGFLPGISGCLEHNTLLSESLKDARKSERQITVCWIDLENAFGSIQHELMLFALRWYNFPPLVTDMIASYYSKLKFSITTKEGHSKTFSYNVGLFQGCCLSPIVFNIVINILVDKLTSNEKKWGYRFKFNNKYTESILAFADDLAILTRNPKQCQVLLDEVDRFCEWTDGLRTKPSKCHCLCLGRRSTRYTSYDPGLSLGGQCISTVTENAPFKFLGRKIDNIGRTPSLEGIVDSFLNDLNKVDSQQISNVKKAWIYDNYLTSRLNWPFLVYDFNKTLLSKLDAGVIKMLKLWLGLALTADSSALFRDRNSFGMSLKRPSELYKHLRVSKRYILGKSQDDVVTSLPKDKDAPELESRLQFHKQFMIGAQSNRVGLGSSRKVQDTDILKSFIRQDENDKYKIHAISLEMQNEWLDIGDFCIPLALKWRTLIHDWSPALLKFYLNAFQMTLPDQSNLVRWGKGTEKTCYICGKAVGTARHLLVGCRVLLDSGQYSRRHDRVLEIIREAVSLSVARAQKGITTNERSVGFVREGIRTIKTNVKPYSILKAATDWTIMMDTCEKQYKIPEDICASASRPDIFMYSRILKRVVMIELTVPWETNIPKDHTIKVNKYYELTNELTRNRFVVDLYAVEVGARGITAKSLYNLLKDLGLSRTHINSFLERTSKAALVGSFQIWLGRERSLDSGGERLTRVS

SEQ ID NO: 19640 - protein, 991 aa, Danaus chrysippus
MKQSTWKVHDDNLAVLLEHPGSKQELNSQVETFQNTVYDYFNEQYPPRNHYARKNKENSFKIKMRKKKRELIKNLRIAKALGDNHLSHQLARALRSILKLIQGISAQTAEYRGNFDRAKQEVDFDKNPFEYSKTIFKKERGQLLLTNDQIYDHFKSTYEVPKSVRLYTDPNEQKPKIPHIDFHGIPPTLDEISSHIKRKSSKSAPGPDGIPYIVFKKCPSVRKHLINIYGKIWSRKQIPECFGKAIFVLIPKKDRVTDPKDTRPIALTNTISKIFFSVLQTRMTRFMLSNKYFRPNHQKGFLPGISGCLEHNTLLSESLKDARKSERQITVCWIDLENAFGSIQHELMLFALRWYNFPPLVRDMIASYYSKLRFSIITKEGPSKSLSYNVGLFQGCCLSPITFNIVINILVDKLICNEKKWGYRFKFNNKYTESILAFADDLAILTRHPKHCQVLLDEVDKFCEWTDGLRTKPSKCHCLCLGRRNTRYTSYDPGLSIGGQCVSTVTEDAPFKFLGRKIDNIGRTPSLEGIVDSFLNDLNKVDSQQISNVKKAWIYDNYLTSRLNWPFLVYDFSKTLLSKLDAGVIKMLKLWLGLALTADSSALFRDRNSFGMNLKRPSELYKHLRVSKRHILGKSHDDVVTSLPKDNDAPELESRLQFHKQFMIGAQNNRVGLGSSRKVQDTDILKSFIRQDENDKYKIHAMSLEMQNEWLDIGDFCIPLALKWRTLIHDWSPALLKFYLNAFQMTLPDQSNLVRWGKGTEKTCYICGKAVGTAKHLLVGCKVLLDSGQYSRRHDRVLEIIREAVSLSVARAQREITTNERSIGFVREGTRAIKSNVKPYSILKAASDWTIMMDTYEKQYKIPEDICASASRPDIFLYSRILKRVVMIELTVPWETNIPKDHAIKVNKYYELTNELTRNRFVVDLYAVEVGARGITAKSLYNLLKDLGLSRTNINSFLERTSKAALVGSFQIWLGRERNLDSGGERITRVS

SEQ ID NO: 19641 - protein, 928 aa, Danaus plexippus
MRRKKRELIKNLRIAKALGDNHLSHQLARALRSILKLIQGISAQTAENRDNFDRAKQEVDFDKNPFEYSKTIFKKERGQLLLTNEQIYDHFKSTYEVPKSVRLYADPNEQKPGIPRFDFHGIPPTLDEISIQIKKKSSKSAPGPDGIPYIVFKKSPSVRKHLTYIYDKIWSRKQIPECFGKAIFVLIPKKDRVTDPKDTRPIALTNTISKIFFSVLQTRMTRFMLSNRYFRPNHQKGFLPEISGCLEHNTLLSESLKDARKSERQITVCWIDLENAFGSIQHELMLFALRWYNFPPLVTDMIASYYSKLKFSITTKEGHSKTFSYNVGLFQGCCLSPIVFSIVINILVDKLTSNEKKWGYRFKFNNKYTESILAFADDLAILTRNPKHCQVLLDEVDRFCEWTDGLRTKPSKCHCLCLGRRSTRYTSYDPGLSLGGQCISTVTENAPFKFLGRKIDNIGRTPSLEGIVDSFLNDLNKVDSQQISNVKKAWIYDNYLTSRLNWPFLVYDFNKTLLSKLDAGVIKMLKLWLGLALTADSSALFRDRNSFGMSLKRPSELYKHLRVSKRYILGKSQDDVVTSLPKDKDAPELESRLQFHKQLMIGAQSNRVGLGSSRKVQDTDILKSFIRQDENDKYKIHAISLEMQNEWLDIGDFCIPLALKWRTLIHDWSPALLKFYLNAFQMTLPDQSNLVRWGKGTEKTCYICGKAVGTARHLLVGCKVLLDSGKYSRRHDRVLEIIREAVSLSVARAQKGITTNERSVGFVREGIRTIKTNVKPYSILKAATDWTIMMDTCEKQYKIPEDICASASRPDIFMYSRILKRVVMIELTVPWETNIPKDHTIKVNKYYELTNELTRNRFVVDLYAVEVGARGITAKSLYNLLKDLGLSRTHINSFLERTSKAALVGSFQIWLGRERSLDSGGERLTRVS

SEQ ID NO: 19642 - protein, 928 aa, Danaus chrysippus
MRKKKRELIKNLRIAKALGDNHLSHQLARALRSILKLIQGISAQTAEYRDNFDRAKQEVDFDKNPFEYSKTIFKKERGQLLLTNDQIYDHFKSTYEVPKSLRRYRDPNDQKPEFPRIEFHGIPPTLEELSSQIKRKSSKSAPGPDGIPYIVFKKCASVRKHLLNIYGKIWSRKQIPECFGKAIFVLIPKKDRVTDPKDTRPIALTNTISKIFFSVLQTRMTRFMLSNNYFRPNHQKGFLPGISGCLEHNTLLSESLKDARKSERQITVCWIDLENAFGSIQHELMLFALRWYNFPPLVRDMIASYYSKLRFSIITKEGPSKSLSYNVGLFQGCCLSPIAFNIVINILVDKLICNEKKWGYRFKFNNKYTESILAFADDLAILTRNPKHCQVLLDEVDKFCEWTDGLRTKPSKCHCLCLGRRNTRYTSYDPGLSLGGQCISTVTENAPFKFLGRKIDNIGRTPSLEGIVDSFLNDLNKVDSQLISNVKKAWIYENYLTSRLNWPFLVYDFNKTLLSKLDAGVIKMLKLWLGLALTADSSALFRGSNSFGMSLKRPSELYKHLRVSKRYILGKSHDDIVTSLPKDEDAPELESRLQFHKQFMIGAQSNRAGLGSNRKVQDADILKSFIRQDENDKYKIHAMNLEMQNEWLDIGDFCIPLALKWRTLIYDWSPALLKFYLNAFQMTLPDQSNLVRWGKSTEKTCYICGKAVGTAKHLLVGCKVLLDSGQYSRRHDRVLEVIREAVSLSVARAQKGITTNERSVGFVREGTRATKSNVKPYSILKAASDWTIMMDTYEKQYKIPEDICASASRPDIFLFSRILKRVVIIELTVPWETNIPKDHTIKVNKYYELTNELTRNRFVVDLYAVEVGARGITAKSLYNLLKDLGLSRTHINAFLERTSKAALVGSFQIWLGRERSLDSGGERITRVS

SEQ ID NO: 19643 - protein, 991 aa, Danaus plexippus
MKQSTWKVHDDNLADLLEHPGSKQDLNSRVETFQNTIYDYFNEQYPPRNHYARKNKDNSFKIKMRRKKRELIKNLRIAKALGDNHLSHQLARALRSILKLIQGISAQTAKNRDNFDRAKQEVDFDKNPFEYSKTIFKKERGQLLLTNEQIYDHFKSTYEVPKSVRLYADPNDQKPGIPRFDFHGIPPTLDEISIQIKKKSSKSAPGPDGIPYIVFKKCPSVRKHLTYIYDKIWSRKQIPECFGKAIFVLIPKKDRVTDPKDTRPIALTNTISKIFFSVLQTRMTRFMLSNMYFRPNHQKGFLPGISGCLEHNSLLSESLKDARKSERQITVCWIDLENAFGSIQHELMLFALRWYNFPPLVTDMIALYYSKLKFSITTKEGHSKPFSYNVGLFQGCCLSPIVFNIVINILVDKLTSNEKKWGYRFKFNNKYTESILAFADDLAILTRNPKHCQVLLDEVDRFCEWTDGLRTKPSKCHCLCLGRRSTRYTSYDPGLSLGGQCISTVTENAPFKFLGRKIDNIGRTPSLEGIVDSFLNDLNKVDSQQISNVKKAWIYDNYLTSRLNWPFLVYDFNKTLLSKLDAGVIKMLKLWLGLALTADSSALFRDRNSFGMSLKRPSELYKHLRVSKRYILGKSQDDVVTSLPKDKDAPELESRLQFHKQFMIGAQSNRVGLGSSRKVQDTDILKSFIRQDENDKYKIHAISLEMQNEWLDIGDFCIPLALKWRTLIHDWSPALLKFYLNAFQMTLPDQSNLVRWGKGTEKTCYICGKAVGTARHLLVRCKVLLDSGQYSRRHDRVLEIIREAVSLSVARAQKEITTNERSVGFVREGTRAIKTNVKPYSILKAATDWTIMMDKYEKQYKIPEDICASASRPDIFMYSRILKRVVMIELTVPWETNIPKDHTIKVNKYYELTNELTRNRFVVDLYAVEVGARGITAKSLYNLLKDLGLSRTHINSFLERTSKAALVGSFQIWLGRERSLDSGGERLTRVS

SEQ ID NO: 19644 - protein, 908 aa, Eilema depressum
MGDNQLSHQLSRALRSILKLIQGISFQIINENNNFIRAKHEVEFDKDPFKYSRNIFSDRKQDRLPLSNDQIHSYYKSNYEVPKYKKPYSKPNAQKPVSPHFTFDCNPPSLDEIEQQIKKKPTKTAPGPDGIPYIIYKKCPSVRKHLLSIFNRIWSSKEVPAAFGKANFVLIPKKEIVTSPKDARPIALTNTISKIFFSWLQFKMANFMINNNYFRPKHQKGFLPGISGCLEHNSLLAESLKDARSNEKQITVCWIDLENAFGSVQHELMLFALKWYHFPSTIWEIISSYYGKLKFVINTKDGYTQPLNYNVGLFQGCCLSPIVFNIVINILIDNISTHDKKWGYRFKLNGKYTESILAFADDLAILTRNPKQCQDLLRRVDDFCAWTDGMKTKPSKCYCLCLGRRGTRYTSYDPGLSIGGENVSTIYETVPFKFLGRKIDNRGCTPALDELIDSFIIDLKKVDQQPISNVKKAWIYDNYLTSRLNWPFLIYDINQSLLKKLDASVTKTLKSWLGLAQSADPSALYRSANNFGMTLKKPSELYKHLRVTKMHVLSKSKDEIVKVLPKDKNGSELESRLQFHKKFMIGSQTGRVGLGNIQKQTDKEITKSFLQTDENNTYKVHAMNLEMQNEWLTLGEFCIPIALKWRTIIYDWSPALLKFYLNAFQLTLPDQSNLVRWGKATDKTCNSCGEATGTARHLLVGCRTLLDRGHYSRRHDKVLEIIREAVSLAVARAKKGLTTNQRNDIVFVKEGCSKKSPQKPYSILIAAVDWTILVDTYEKHYKIPEDICASSSRPDIFLFSRSHRRAVLVELTVPWETNIPKDHAIKTNKYFDLTNELTKNGYVVKLYAVEVGARGIPAKSLYNLLKDLGLPRASVSSLLNRISKAALIGSYQIWIGRGGNTTDGGGER

SEQ ID NO: 19645 - protein, 928 aa, Danaus chrysippus
MRKKIRELIKNLRIAKALGDNHLSHQLARALRSILKLIQGISAQTAEYRGNFDRAKQEVDFDKNPFEYSKTIFKKERGQLLLTNDQIYDHFKSTYEVPKSVRLYTDPNEQKPEIPHIDFHGIPPTLDEISSHIKRKSSKSAPGPDGIPYIVFKKCPSVRKHLINIYGKIWSRKQIPECFGKAIFVLIPKKDRVTDPKDTRPIALTNTISKIFFSVLQTRMTRFMLSNKYFRPNHQKGFLPGISGCLEHNTLLSESLKDARKSERQITVCWIDLENAFGSIQHELMLFALRWYNFPPLVSDMIASYYSKLKFSIITKEGPSKSLSYNVGLFQGCCLSPIVFNIIINILVDKLISNEKKWGYRFKFNNKYTESILAFADDLAILTRLPKHCQVLLDEVDKFCEWTDGLRTKPSKCHCLCLGRRNTRYTSYDPGLSIGGQCVSTVTEDAPFKFLGRKIDNIGRTPSLEGIVDSFLNDLNKVDSQQISNVKKAWIYDNYLTSRLNWPFLVYDFSKTLLSKLDAGVIKMLKLWLGLALTADSSALFRDRNSFGMNLKRPSELYKHLRVSKRHILGKSHDDVVTSLPKDNDAPELESRLQFHKQFMIGAQNNRVGLGSSRKVQDTDILKSFIRQDENDKYKIHAMSLEMQNEWLDIGDFCIPLALKWRTLIHDWSPALLKFYLNAFQMTLPDQSNLVRWGKGTEKTCYICGKAVGTAKHLLVGCKVLLDSGQYSRRHDRVLEIIREAVSLSVARAQREITTNERSIGFVREGTRAIKSNVKPYSILKAASDWTIMMDTYEKQYKIPEDICASASRPDIFLYSRILKRVVMIELTVPWETNIPKDHAIKVNKYYELTNELTRNRFVVDLYAVEVGARGITAKSLYNLLKDLGLSRTNINSFLERTSKAALVGSFQIWLGRERNLDSGGERITRVS

SEQ ID NO: 19646 - protein, 709 aa, Danaus plexippus
MTRFMLSNRYFRPNHQKGFLPGISGCLEHNTLLSESLKDARKSERQITVCWIDLENAFGSIQHESMLFALRWYNFPPLVTDMIASYYSKLKFSTTTKEGHSKTFSYNVGLFQGCCLSPIVFNIVINILVDRLTSNEKKWGYRFKFNNKYTESILAFADDLAILTRNPKHCQVLLDEVDRFCEWTDGLRTKPSKCHCLCLGRRSTRYTSYDPGLSLGGQCISTVTENAPFKFLGRKIDNIGRTPSLEGIVDSFLNDLNKVDSQQISNVKKAWIYDNYLTSRLNWPFLVYDFNKTLLSKLDAGVIKMLKLWIGLALTADSSALFRDRNSFGMSLKRPSELYKHLRVSKRYILGKSQDDVVTSLPKDKDAPELESRLQFHKQFMIGAQSNRVGLGSSRKVQDTDILKSFIRQDENDKYKIHAISLEMQNEWLDIGDFCIPLALKWRTLIHDWSPALLKFYLNAFQMTLPDQSNLVRWGKGTEKTCYICGKAVGTARHLLVGCKVLLDSGQYSRRHDNFLEIIREAVSLSVARAQKGITTNERSVGFVREGIRTIKTNVKPYSILKAATDWTIMMDTCEKQYKIPEDICASASRPDIFMYSRILKRVVMIELTVPWETNIPKDHTIKVNKYYELTNELTRNRFVVDLYAVEVGARGITAKSLYNLLKDLGLSRTHINSFLERTSKAALVGSFQIWLGRERSLDSGGERLTRVS

SEQ ID NO: 19647 - protein, 928 aa, Danaus chrysippus
MRKKKRELIKNLRIAKALGDNHLSHQLARALRSILKLIQGISAQTAEYRDNFDRAKQEVDFDKNPFEYSKTIFKKERGQLLLTNDQIYDHFKSTYEVPKSLRRYRDPNDQKPEFPRIEFHGIPPTLEELSSQIKRKSSKSAPGPDGIPYIVFKKCASVRKHLLNIYGKIWSRKQIPECFGKAIFVLIPKKDRVTDPKDTRPIALTNTISKIFFSVLQTRMTRFMLSNNYFRPNHQKGFLPGISGCLEHNTLLSESLKDARKSERQITVCWIDLENAFGSIQHELMLFALRWYNFPPLVRDMIASYYSKLRFSIITKEGPSKSLSYNVGLFQGCCLSPIAFNIVINILVDKLICNEKKWGYRFKFNNKYTESILAFADDLAILTRNPKHCQVLLDEVDKFCEWTDGLRTKPSKCHCLCLGRRNTRYTSYDPGLSLGGQCISTVTENAPFKFLGRKIDNIGRTPSLEGIVDSFLNDLNKVDSQLISNVKKAWIYENYLTSRLNWPFLVYDFNKTLLSKLDAGVIKMLKLWLGLALTADSSALFRGSNSFGMSLKRPSELYKHLRVSKRYILGKSHDDIVTSLPKDEDAPELESRLQFHKQFMIGAQSNRAGLGSNRKVQDADILKSFIRQDENDKYKIHAMNLEMQNEWLDIGDFCIPLALKWRTLIYDWSPALLKFYLNAFQMTLPDQSNLVRWGKSTEKTCYICGKAVGTAKHLLVGCKVLLDSGQYSRRHDRVLEVIREAVSLSVARAQKGITTNERSVGFVREGTRATKSNVKPYSILKAASDWTIMMDTYEKQYKIPEDICASASRPDIFLFSRILKRVVMIELTVPWETNIPKDHTIKVNKYYELTNELTRNRFVVDLYAVEVGARGITAKSLYNLLKDLGLSRTHINAFLERTSKAALVGSFQIWLGRERSLDSGGERITRVS

SEQ ID NO: 19648 - protein, 928 aa, Danaus plexippus
MRRKKRELIKNLRIAKALGDNHLSHQLARALRSILKLIQGISAQTAENRDNFDRAKQEVDFDKNPFEYSKTIFKKERGQLLLTNEQIYDHFKSTYEVPKSVRLYADPNEQKPGIPRFDFHGIPPTLDEISIQIKKKSSKSAPGPDGIPYIVFKKCPSVRKHLTHIYDKIWSRKQIPECFGKAIFVLIPKKDRVTDPKDTRPIALTNTISKIFFSVLQTRMTRFMLSNRYFRPNHQKGFLPGISGCLEHNTLLSESLKDARKSERQITVCWIDLENAFGSIQHELMLFALRWYNFPPLVTDMIASYYSKLKFSITTKEGHSKTFSYNVGLFQGCCLSPIVFNIVINILVDKLTSNEKKWGYRFKFNNKYTESILAFADDLAILTRNPKHCQVLLDEVDRFCEWTDGLRTKPSKCHCLCLGRRSTRHTSYDPGLSLGGQCISTVTENAPFKFLGRKIDNIGRTPSLEGIVDSFLNDLNKVDSQQISNVKKAWIYDNYLTSRLNWPFLVYDFNKTLLSKLDAGVIKMLKLWLGLALTADSSALFRDRNSFGMSLKRPSELYKHLRVSKRYILGKSQDDVVTSLPKDKDAPELESRLQFHKQFMIGAQSNRVGLGSSRKVQDTDILKSFIRQDENDKYKIHAISLEMQNEWLDIGDFCIPLALKWRTLIHDWSPALLKFYLNAFQMTLPDQSNLVRWGKGTEKTCYICGKAVGTARHLLVGCRVLLDSGQYSRRHDRVLEIIREAVSLSVARAQKGITTNERSVGFVREGIRTIKTNVKPYSILKAATDWTIMMDTCEKQYKIPGDICASASRPDIFMYSRILKRVVMIELTVPWETNIPKDHTIKVNKYYELTNELTRNRFVVDLYAVEVGARGITAKSLYNLLKDLGLSRTHINLFLERTSKAALVGSFQIWLGRERSLDSGGERLTRVS

SEQ ID NO: 19649 - protein, 709 aa, Danaus plexippus
MTRFMLSNRYFRPNHQKGFLPGISGCLEHNTLLSESLKDARKSERQITVCWIDLENAFGSIQHELMLFALRWYNFPPLVTDMIASYYSKLKFSITTKEGHSKTFSYNVGLFQGCCLSPIVFNIVINILVDKLTSNEKKWGYRFKFNNKYTESILAFADDLAILTRNPKHCQVLLDEVDRFCEWTDGLRTKPSKCHCLCLGRRSTRYTSYDPGLSLGGQCISTVTENAPFKFLGRKIDNMGRTPSLEGIVDSFLNDLNKVDSQQISNVKKAWIYDNYLTSRLNWPFLVYDFNKTLLSKLDAGVIKMLKLWLGLALTADSSALFRDRNSFGMSLRRPSELYKHLRVSKRYILGKSQDDVVTSLPKDKDAPELESRLQFHKQFMIGAQSNRVGLGSSRKVQDTDILKSFIRQDENDKYKIHAISLEMQNEWLDIGDFCIPLALKWRTLIHDWSPALLKFYLNAFQMTLPDQSNLVRWGKGTEKTCYICGKAVGTARHLLVGCKVLLDSGQYSRRHDRVLEIIREAVSLSVARAQKEITTNERSVGFVREGTRAIKTNVKPYSILKAATDWTIMMDTYEKQYKIPEDICASASRPDIFMYSRILKRVVMIELTVPWETNIPKDHTIKVNKYYELTNELTRNRFVVDLYAVEVGARGITAKSLYNLLKDLGLSRTHINSFLERISKAALVGSFQIWLGRERSLDSGGERLTRVS

SEQ ID NO: 19650 - protein, 991 aa, Danaus plexippus
MKQSTWKVHDDNLADLLEHPGSKQDLNSRVETFQNTIYDYFNEQYPPRNHYARKNKDNSFKIKMRRKKRELIKNLRIAKALGDNHLSHQLARALRSILKLIQGISAQTAKNRDIFDRAKQEVDFDKNPFEYSKTIFKKERGQLLLTNEQIYDHFKSTYEVPKSVRLYADPNDQKPGIPRFDFHGIPPTLDEISIQIKKKSSKSAPGPDGIPYIVFKKCPSVRKHLINIYDKIWSRKQIPECFGKAIFVLIPKKDRVTDPKDTRPIALTNTISKIFFSVLQTRMTRFMLSNRYFRPNHQKGFLPGISGCLEHNTLLSESLKDARKSERQITVCWIDLENAFGSIQHELMLFALRWYNFPPLVTDMIASYYSKLKFSITTKEGHSKTFSYNVGLFQGCCLSPIVFNIVINILVDKLTSNEKKWGYRFKFNNKYTESILAFADDLAILTRNPKHCQVLLDEVDRFCEWTDGLRTKPSKCHCLCLGRRSTRYTSYDPGLSLGGQCISTVTENAPFKFLGRKIDNMGRTPSLEGIVDSFLNDLNKVDSQQISNVKKAWIYDNYLTSRLNWPFLVYDFNKTLLSKLDAGVIKMLKLWLGLALTADSSALFRDRNSFGMSLRRPSELYKHLRVSKRYILGKSQDDVVTSLPKDKDAPELESRLQFHKQFMIGAQSNRVGLGSSRKVQDTDILKSFIRQDENDKYKIHAISLEMQNEWLDIGDFCIPLALKWRTLIHDWSPALLKFYLNAFQMTLPDQSNLVRWGKGTEKTCYICGKAVGTARHLLVGCKVLLDSGQYSRRHDRVLEIIREAVSLSVARAQKEITTNERSVGFVREGTRAIKTNVKPYSILKAATDWTIMMDTYEKQYKIPEDICASASRPDIFMYSRILKRVVMIELTVPWETNIPKDHTIKVNKYYELTNELTRNRFVVDLYAVEVGARGITAKSLYNLLKDLGLSRTHINSFLERISKAALVGSFQIWLGRERSLDSGGERLTRVS

SEQ ID NO: 19651 - protein, 991 aa, Danaus chrysippus
MKQSTWKVHDDNLAVLLEHPGSKQELNSQVETFQNTVYDYFNEQYPPRNHYARKNKENSFKIKMRKKKRELIKNLRIAKALGDNHLSHQLARALRSILKLIQGISAQTAEYRGNFDRAKQEVDFDKNPFEYSKTIFKKERGQLLLTNDQIYDHFKSTYEVPKSVRLYTDPNEQKPEIPHIDFHGIPPTLDEISSHIKRKSSKSAPGPDGIPYIVFKKCPSVRKHLINIYGKIWSRKQIPECFGKAIFVLIPKKDRVTDPKDTRPIALTNTISKIFFSVLQTRMTRFMLSNKYFRPNHQKGFLPGISGCLEHNTLLSESLKDARKSERQITVCWIDLENAFGSIQHELMLFALRWYNFPPLVRDMIASYYSKLRFSIITKEGPSKSLSYNVGLFQGCCLSPITFNIVINILVDKLICNEKKWGYRFKFNNKYTESILAFADDLAILTRHPKHCQVLLDEVDKFCEWTDGLRTKPSKCHCLCLGRRNTRYTSYDPGLSIGGQCVSTVTEDAPFKFLGRKIDNIGRTPSLEGIVDSFLNDLNKVDSQQISNVKKAWIYDNYLTSRLNWPFLVYDFSKTLLSKLDAGVIKMLKLWLGLALTADSSALFRDRNSFGMNLKRPSELYKHLRVSKRHILGKSHDDVVTSLPKDNDAPELESRLQFHKQFMIGAQNNRVGLGSSRKVQDTDILKSFIRQDENDKYKIHAMSLEMQNEWLDIGDFCIPLALKWRTLIHDWSPALLKFYLNAFQMTLPDQSNLVRWGKGTEKTCYICGKAVGTAKHLLVGCKVLLDSGQYSRRHDRVLEIIREAVSLSVARAQREITTNERSIGFVREGTRAIKSNVKPYSILKAASDWTIMMDTYEKQYKIPEDICASASRPDIFLYSRILKRVVMIELTVPWETNIPKDHAIKVNKYYELTNELTRNRFVVDLYAVEVGARGITAKSLYNLLKDLGLSRTNINSFLERTSKAALVGSFQIWLGRERNLDSGGERITRVS

SEQ ID NO: 19652 - protein, 977 aa, Danaus chrysippus
MLLEHPGSKQELNSQVETFQNTVYDYFNEQYPPRNHYARKNKENSFKIKMRKKKRELIKNLRIAKALGDNHLSHQLARALRSILKLIQGISAQTAEYRGNFDRAKQEVDFDKNPFEYSKTIFKKERGQLLLTNDQIYDHFKSTYEVPKSVRLYTDPNEQKPEIPHIDFHGIPPTLDEISSHIKRKSSKSAPGPDGIPYIVFKKCPSVRKHLINIYGKIWSRKQIPECFGKAIFVLIPKKDRVTDPKDTRPIALTNTISKIFFSVLQTRMTRFMLSNKYFRPNHQKGFLPGISGCLEHNTLLSESLKDARKSERQITVCWIDLENAFGSIQHELMLFALRWYNFPPLVRDMIASYYSKLRFSIITKEGPSKSLSYNVGLFQGCCLSPITFNIVINILVDKLICNEKKWGYRFKFNNKYTESILAFADDLAILTRHPKHCQVLLDEVDKFCEWTDGLRTKPSKCHCLCLGRRNTRYTSYDPGLSIGGQCVSTVTEDAPFKFLGRKIDNIGRTPSLEGIVDSFLNDLNKVDSQQISNVKKAWIYDNYLTSRLNWPFLVYDFSKTLLSKLDAGVIKMLKLWLGLALTADSSALFRDRNSFGMNLKRPSELYKHLRVSKRHILGKSHDDVVTSLPKDNDAPELESRLQFHKQFMIGAQNNRVGLGSSRKVQDTDILKSFIRQDENDKYKIHAMSLEMQNEWLDIGDFCIPLALKWRTLIHDWSPALLKFYLNAFQMTLPDQSNLVRWGKGTEKTCYICGKAVGTAKHLLVGCKVLLDSGQYSRRHDRVLEIIREAVSLSVARAQREITTNERSIGFVREGTRAIKSNVKPYSILKAASDWTIMMDTYEKQYKIPEDICASASRPDIFLYSRILKRVVMIELTVPWETNIPKDHAIKVNKYYELTNELTRNRFVVDLYAVEVGARGITAKSLYNLLKDLGLSRTNINSFLERTSKAALVGSFQIWLGRERNLDSGGERITRVS

SEQ ID NO: 19653 - protein, 832 aa, Danaus plexippus
MPKSVRLYADPNEQKPGIPRFDFHGIPPTLDEISIQIKKKSSKSAPGPDGIPYIVFKKCPSVRKHLTYIYDKIWSRKQIPECFGKAIFVLIPKKDRVTDPKDTRPIALTNTISKIFFSVLQTRMTRFMLSNRYFRPNHQKGFLPGISGCLEHNTLLSESLKDARKSERQITVCWIDLENAFGSIQHELMLFALRWYNFPPLVTDMIASYYSKLKFSITTKEGHSKTFSYNVGLFQGCCLSPIIFNIVINILVDRLTSNEKKWGYRFKFNNKYTESILAFADDLAILTRNPKHCQVLLDEVDRFCEWTNGLRTKPSKCHCLCLGRRSTRYTSYDPGLSLGGQCISTVTENAPFKFLGRKIDNIGRTPSLEGIVDSFLNDLNKVDSQQISNVKKAWIYDNYLTSRLNWPFLVYDFNKTLLSKLDAGVIKMLKLWLGLALTADSSALFRDRNSFGMSLKRPSELYKHLRVSKRYILGKSQDDVVTSLPKDKDAPELESRLQFHKQFMIGAQSNRVGLGSSRKVQDTDILKSFIRQDENDKYKIHAISLEMQNEWLDIGDFCIPLALKWRTLIHDWSPALLKFYLNAFQMTLPDQSNLVRWGKGTEKTCYICGKAVGTARHLLVGCKVLLDSGQYSRRHDRVLEIIREAVSLSVARAQKGITTNERSVGFVREGIRTIKTNVKPYSILKAATDWTIMMDTCEKQYKIPEDICASASRPDIFMYSRILKRVVMIELTVPWETNIPKDHTIKVNKYYELTNELTRNRFVVDLYAVEVGARGITAKSLYNLLKDLGLSRTHINSFLERTSKAALVGSFQIWLGRERSLDSGGERLTRVS

SEQ ID NO: 19654 - protein, 991 aa, Danaus chrysippus
MKQSTWKVHDDNLAVLLEHPGSKQELNSQVETFQNTVYDYFNEQYPPRNHYARKNKENSFKIKMRKKKRELIKNLRIAKALGDNHLSHQLARALRSILKLIQGISAQTAEYRGNFDRAKQEVDFDKNPFEYSKTIFKKERGQLLLTNDQIYDHFKSTYEVPKSVRLYTDPNEQKPEIPHIDFHGIPPTLDEISSHIKRKSSKSAPGPDGIPYIVFKKCPSVRKHLINIYGKIWSRKQIPECFGKAIFVLIPKKDRVTDPKDTRPIALTNTISKIFFSVLQTRMTRFMLSNKYFRPNHQKGFLPGISGCLEHNTLLSESLKDARKSERQITVCWIDLENAFGSIQHELMLFALRWYNFPPLVRDMIASYYSKLRFSIITKEGPSKSLSYNVGLFQGCCLSPITFNIVINILVDKLICNEKKWGYRFKFNNKYTESILAFADDLAILTRHPKHCQVLLDEVDKFCEWTDGLRTKPSKCHCLCLGRRNTRYTSYDPGLSIGGQCVSTVTEDAPFKFLGRKIDNIGRTPSLEGIVDSFLNDLNKVDSQQISNVKKAWIYDNYLTSRLNWPFLVYDFSKTLLSKLDAGVIKMLKLWLGLALTADSSALFRDRNSFGMNLKRPSELYKHLRVSKRHILGKSHDDVVTSLPKDNDAPELESRLQFHKQFMIGAQNNRVGLGSSRKVQDTDILKSFIRQDENDKYKIHAMSLEMQNEWLDIGDFCIPLALKWRTLIHDWSPALLKFYLNAFQMTLPDQSNLVRWGKGTEKTCYICGKAVGTAKHLLVGCKVLLDSGQYSRRHDRVLEIIREAVSLSVARAQREITTNERSIGFVREGTRAIKSSVKPYSILKAASDWTIMMDTYEKQYKIPEDICASASRPDIFLYSRILKRVVMIELTVPWETNIPKDHAIKVNKYYELTNELTRNRFVVDLYAVEVGARGITAKSLYNLLKDLGLSRTNINSFLERTSKAALVGSFQIWLGRERNLDSGGERITRVS

SEQ ID NO: 19655 - protein, 991 aa, Danaus plexippus
MKQSTWKVHDDNLADLLEHPGSKQELNSRVETFQNTIYDYFNEQYPPRNHYARKNKDNSFKIKMRRKKRELIKNLRIAKALGDNHLSHQLARALRSILKLIQGISAQTAENRDNFDRAKQEVDFDKNPFEYSKTIFKKERGQLLLTNEQIYDHFKSTYEMPKSVRLYADPNEQKPGIPRFDFHGIPPTLDEISIQIKKKSSKSAPGPDGIPYIVFKKCPSVRKHLTYIYDKIWSRKQIPECFGKAIFVLIPKKDRVTDPKDTRPIALTNTISKIFFSVLQTRMTRFMLSNRYFRPNHQKGFLPGISGCLEHNTLLSESLKDARKSERQITVCWIDLENAFGSIQHELMLFALRWYNFPPLVTDMIASYYSKLKFSITTKEGHSKTFSYNVGLFQGCCLSPIIFNIVINILVDRLTSNEKKWGYRFKFNNKYTESILAFADDLAILTRNPKHCQVLLDEVDRFCEWTNGLRTKPSKCHCLCLGRRSTRYTSYDPGLSLGGQCISTVTENAPFKFLGRKIDNIGRTPSLEGIVDSFLNDLNKVDSQQISNVKKAWIYDNYLTSRLNWPFLVYDFNKTLLSKLDAGVIKMLKLWLGLALTADSSALFRDRNSFGMSLKRPSELYKHLRVSKRYILGKSQDDVVTSLPKDKDAPELESRLQFHKQFMIGAQSNRVGLGSSRKVQDTDILKSFIRQDENDKYKIHAISLEMQNEWLDIGDFCIPLALKWRTLIHDWSPALLKFYLNAFQMTLPDQSNLVRWGKGTEKTCYICGKAVGTARHLLVGCKVLLDSGQYSRRHDRVLEIIREAVSLSVARAQKGITTNERSVGFVREGIRTIKTNVKPYSILKAATDWTIMMDTCEKQYKIPEDICASASRPDIFMYSRILKRVVMIELTVPWETNIPKDHTIKVNKYYELTNELTRNRFVVDLYAVEVGARGITAKSLYNLLKDLGLSRTHINSFLERTSKAALVGSFQIWLGRERSLDSGGERLTRVS

SEQ ID NO: 19656 - protein, 853 aa, Erynnis brizo
MRRKKRELIKKLRTAKAMGDNQLSHQLSRALRSILKLIQGISLQITTNRDNFDRAKHEVDFDNNPFQYSKNIFKQEKGQLLLTEDQIYDHFKSTYEAYSEGRTYKDPHGQKPDIPQVDFQSNPPTLEEIDKQIRKKTSKSAPGPDGIPYIVYKKCASVRKHLLNIYGKIWSRKQIPASFGKAIFVLIPKKDQVTDPKDTRPIALTNTISKIFFSILQSRMSQFMINNKYFTPSHQKGFLPGISGCLEHNTLLWESLKDARTSERQITVCWVDLENAFGSVQHKLMMFALKWYNLPAVVSDIIASYYSQLQFVISLKEGHSKPLSYNIGLFQGCCLSPIIFNIIINILIDKLISHEKKWGYRFKFNNRITEHILAFADDLAILTRKPKQCQVLLNEIDEFCTWSDGLRTKPSKCHCLCLGRRDTKFTSYDPGLSIGGQSVSTITEAAPFKFLGRKINHIGRTPSMEIIVDSFLEDLNTVDHQPISNVKKAWIYDNFLTSRLNWPFLVYDISKTLLLKLDANVIKTLKLWLGLARSADASTLFRDQNNFGMRLKKPSELYKHLRVTKRQILGNSKDEIVTSLPKDKMASELESRLQFHKRFMTGAQTNTVGLGSSRKMLDTDIVKSFIRQDENDSYKVHAMSLEMQNEWLTVGEFCIPLALKWRTLLYDWSPALLRFYLNAFQMTLPDQSNLVRWGKATEKTCNICGEAIGTAKHLLVGCKILLDRGCYSRRHDRVLEIIREAVSLSVARAQRKVTSNKKTIHFVKEGITTKSKQKPYSILEAAPDWTILMDTYEKHYKIPEDVGVSSSRPDIFLYSRKLKRVVLVELTVPWETNIPKDHAIKVNKYYDLVNELT

SEQ ID NO: 19657 - protein, 928 aa, Danaus chrysippus
MRKKKRELIKNLRIAKALGDNHLSHQLARALRSILKLIQGISAQTAEYRDNFDRAKQEVDFDKNPFEYSKTIFKKERGQLLLTNDQIYDHFKSTYEVPKSLRRYRDPNDQKPEFPRIEFHGIPPTLEELSSQIKRKSSKSAPGPDGIPYIVFKKCASVRKHLLNIYGKIWSRKQIPECFGKAIFVLIPKKDRVTDPKDTRPIALTNTISKIFFSVLQTRMTRFMLSNNYFRPNHQKGFLPGISGCLEHNTLLSESLKDARKSERQITVCWIDLENAFGSIQHELMLFALRWYNFPPLVRDMIASYYSKLRFSIITKEGPSKSLSYNVGLFQGCCLSPIAFNIVINILVDKLICNEKKWGYRFKFNNKYTESILAFADDLAILTRNPKHCQVLLDEVDKFCEWTDGLRTKPSKCHCLCLGRRNTRYTSYDPGLSLGGQCISTVTENAPFKFLGRKIDNIGRTPSLEGIVDSFLNDLNKVDSQLISNVKKAWIYENYLTSRLNWPFLVYDFNKTLLSKLDAGVIKMLKLWLGLALTADSSALFRGSNSFGMSLKRPSELYKHLRVSKRYILGKSHDDIVTSLPKDEDAPELESRLQFHKQFMIGAQSNRAGLGSNRKVQDADILKSFIRQDENDKYKIHAMNLEMQNEWLDIGDFCIPLALKWRTLIYDWSPALLKFYLNAFQMTLPDQSNLVRWGKSTEKTCYICGKAVGTAKHLLVGCKVLLDSGQYSRRHDRVLEVIREAVSLSVARAQKGITTNERSVGFVREGTRATKSNIKPYSILKAASDWTIMMDTYEKQYKIPEDICASASRPDIFLFSRILKRVVMIELTVPWETNIPKDHTIKVNKYYELTNELTRNRFVVDLYAVEVGARGITAKSLYNLLKDLGLSRTHINAFLERTSKAALVGSFQIWLGRERSLDSGGERITRVS

SEQ ID NO: 19658 - protein, 991 aa, Danaus plexippus
MKQSTWKVHDDNLADLLEHPGSKQELNSRVETFQNTIYDYFNEQYPPRNHYARKNKDNSFKIKMRRKKRELIKNLRIAKALGDNHLSHQLARALRSILKLIQGISAQTAENRDNFDRAKQEVDFDKNPFEYSKTIFKKERGQLLLTNEQIYDHFKSTYEVPKSVRLYADPNEQKPGIPRFDFHGIPPTLDEISIQIKKKSSKSAPGPDGIPYIVFKKCPSVRKHLTYIYDKIWSRKQIPECFGKAIFVLIPKKDRVTDPKDTRPIALTNTISKIFFSVLQTRMTRFMLSNRYFRPNHQKGFLPGISGCLEHNTLLSESLKDARKSERQITVCWIDLENAFGSIQHELMLFALRWYNFPPLVTDMIASYYSKLKFSITTKEGHSKTFSYNVGLFQGCCLSPIVFNIVINILVDRLTSNEKKWGYRFKFNNKYTESILAFADDLAILTRNPKHCQVLLDEVDRFCEWTDGLRTKPSKCHCLCLGRRSTRYTSYDPGLSLGGQCISTVTENAPFKFLGRKIDNIGRTPSLEGIVDSFLNDLNKVDSQQISNVKKAWIYDNYLTSRLNWPFLVYDFNKTLLSKLDAGVIKMLKLWLGLALTADSSALFRDRNSFGMSLKRPSELYKHLRVSKRYILGKSQDDVVTSLPKDKDAPELESRLQFHKQFMIGAQSNRVGLGSSRKVQDTDILKSFIRQDENDKYKIHAISLEMQNEWLDIGDFCIPLALKWRTLIHDWSPALLKFYLNAFQMTLPDQSNLVRWGKGTEKTCYICGKAVGTARHLLVGCKVLLDSGQYSRRHDRVLEIIREAVSLSVARAQKGITTNERSVGFVREGIRTIKTNVKPYSILKAATDWTIMMDTCEKQYKIPEDICASASRPDIFMYSRILKHVVMIELTVPWETNIPKDHTIKVNKYYELTNELTRNRFVVDLYAVEVGARGITAKSLYNLLKDLGLSRTHINSFLERTSKAALVGSFQIWLGRERSLDSGGERLTRVS

SEQ ID NO: 19659 - protein, 1184 aa, Danaus chrysippus
MPLRKDTVFRTPCIYLISRLPYIRQASESPDSQELVCVLMLLSVVRQTGHLPARQGEAGGRWRDVITYEALRNTAVHTNDEVYRIYSLVSPKKKNTPGTVREGGRKNCPPVDFNGENGANTDLKCSTCGKNYKRRAWYIKHLKTHNGVEARQSSVRSTTFTSDRVDPHVSHGEPLTGNHQESINIRTRLSIPNLKQSTWKVHDDNLAVLLEHPGSKQELNSQVETFQNTVYDYFSEQYPPRNRYARKNKDNSFKLKMRKKKRELIKNLRIAKALGDNHLSHQLARALRSILKLIQGISAQTAEYRDNFDRAKQEVDFDKNPFEYSKTIFKKERGQLLLTNDQIYDHFKSTYEVPKSLRRYRDPNDQKPEFPRIEFHGIPPTLEELSSQIKRKSSKSAPGPDGIPYIVFKKCASVRKHLLNIYGKIWSRKQIPECFGKAIFVLIPKKDRVTDPKDTRPIALTNTISKIFFSVLQTRMTRFMLSNNYFRPNHQKGFLPGISGCLEHNTLLSESLKDARKSERQITVCWIDLENAFGSIQHELMLFALRWYNFPPLVRDMIASYYSKLRFSIITKEGPSKSLSYNVGLFQGCCLSPIAFNIVINILVDKLICNEKKWGYRFKFNNKYTESILAFADDLAILTRNPKHCQVLLDEVDKFCEWTDGLRTKPSKCHCLCLGRRNTRYTSYDPGLSLGGQCISTVTENAPFKFLGRKIDNIGRTPSLEGIVDSFLNDLNKVDSQLISNVKKAWIYENYLTSRLNWPFLVYDFNKTLLSKLDAGVIKMLKLWLGLALTADSSALFRGSNSFGMSLKRPSELYKHLRVSKRYILGKSHDDIVTSLPKDEDAPELESRLQFHKQFMIGAQSNRAGLGSNRKVQDADILKSFIRQDENDKYKIHAMNLEMQNEWLDIGDFCIPLALKWRTLIYDWSPALLKFYLNAFQMTLPDQSNLVRWGKSTEKTCYICGKAVGTAKHLLVGCKVLLDSGQYSRRHDRVLEVIREAVSLSVARAQKGITTNERSVGFVREGTRATKSNVKPYSILKAASDWTIMMDTYEKQYKIPEDICASASRPDIFLFSRILKRVVMIELTVPWETNIPKDHTIKVNKYYELTNELTRNRFVVDLYAVEVGARGITAKSLYNLLKDLGLSRTHINAFLERTSKAALVGSFQIWLGRERSLDSGGERITRVS

SEQ ID NO: 19660 - protein, 987 aa, Danaus plexippus
MKQSTWKVHDDNLADLLEHPGSKQDLNSRVETFQNTIYDYFNEQYPPRNHYARKNKDNSFKIKMRRKKRELIKNLRIAKALGDNHLSHQLARALRSILKLIQGISAQTAKNRDNFDRAKQEVDFDKNPFEYSKTIFKKERGQLLLTNEQIYDHFKSTYEVPKSVRLYADPNDQKPGIPRFDFHGIPPTLDEISIQIKKKSSKSAPGPDGIPYIVFKKCPSVRKHLTYIYDKIWSRKQIPECFGKAIFVLIPKKDRVTDPKDTRPIALTNTISKIFFSVLQTRMTRFMLSNRYFRPNHQKGFLPGISGCLEHNTLLSESLKDARKSERQITVCWIDLENAFGSIQHELMLFALRWYNFPPLVTDMIASYYSKLKFSITTKEGHSKTFSYNVGLFQGCCLSPIVFNIVINILVDKLSSNEKKWGYRFKFNNKYTESILAFADDLAILTRNPKHCQVLLDEVDRFCEWTDGLRTKPCKCHCLCLGRRSTRYTSYDPGLSLGGQCISTVTENAPFKFLGRKIDNIGRTPSLEGIVDSFLNDLNKVDSQQISNVKKAWIYDNYLTSRLNWPFLVYDFNKTLLSKLDAGVIKMLRLWLGLALTADSSALFRDRNSFGMSLKRPSELYKHLRFSKRYILGKSQDDVVTSLPKDKDAPELESRLQFHKQFMIGAQSNRVGLGSSRKVQDTDILKSFIRQDENDKYKIHAISLEMQNEWLDIGDFCIPLALKWRTLIHDWSPALLKFYLNAFQMTLPDQSNLVRWGKGTEKTCYICGKAVGTARHLLVGCKVLLDSGQYSRRHDRVLEIIREAVSLSVARAQKEITTNERSVGFVREGTRAIKTNVKPYSILKAATDWTIMMDTYEKQYKIPEDICASASRPDIFMYSRILKRVVMIELTVPWETNIPKDHTIKVNKYYELTRNRFVVDLYAVEVGARGITAKSLYNLLKDLGLSRTHINSFLERTSKAALVGSFQIWLGRERSLDSGGERLTRVS

SEQ ID NO: 19661 - protein, 991 aa, Danaus plexippus
MKQSTWKVHDDNLADLLEHPSSKQDLNSRVETFQNTIYDYFNEQYPPRNHYARKNKDNSFKIKMRRKKRELIKNLRIAKALGDNHLSHQLARALRSILKLIQGISAQTSKNRDNFDRAKQEVDFDKNPFEYSKTIFKKERGQLLLTNEQIYDHFKSTYEVPKSVRLYADPNDQKPGIPRFDFHGIPPTLDEISIQIKKKSSKSAPGPDGIPYIVFKKCPSVRKHLTYIYDKIWSRKQILECFGKAIFVLIPKKDRVTDPKDTRPIALTNTISKIFFSVLQTRMTRFMLSNRYFRPNHQKGFLPGISGCLEHNTLLSESLKDARKSERQITVCWIDLENAFGSIQHELMLFALKWYNFPPLVTDMIASYYSKLKFSITTKEGHSKTFSYNVGLFQGCCLSPIVFNIVINILVDKLTSNEKKWGYRFKFNNKYTESILAFADDLAILTRNPKHCQVLLDEVDRFCEWTDGLRTKPCKCHCLCLGRRSTRYTSYDPGLSLGGQCISTVTENAPFKFLGRKIDNIGRTPSLEGIVDSFLNDLNKVDSQQISNVKKAWIYDNYLTSRLNWPFLVYDFSKTLLSKLDAGVIKMLKLWLGLALTADSSALFRDRNSFGMSLKRPSELYKHLRVSKRYILGKSQDDVVTSLPKDKDAPELESRLQFHKQFMIGAQSNRVGLGSSRKVQDTDILKSFIRQDENDKYKIHAISLEMQNEWLDIGDFCIPLALKWRTLIHDWSPALLKFYLNAFQMTLPDQSNLVRWGKGTEKTCYICGKAVGTARHLLVGCKVLLDSGQYSRRHDRVLEIIREAVSLSVARAQKEITTNERSVGFVREGTRAIKTNVKPYSILKAATDWTIMMDTYEKQYKIPEDICASASRPDIFMYSRILKRVVMIELTVPWETNIPKDHTIKVNKYYELTNELTRNRFVVDLYAVEVGARGITAKSLYNLLKDLGLSRTHINSFLERTSKAALVGSFQIWLGRERSLDSGGERLTRVS

SEQ ID NO: 19662 - protein, 709 aa, Danaus plexippus
MTRFMLSNRYFRPNHQKGFLPGISGCLEHNTLLSESLKDARKSERQITVCWIDLENAFGSIQHELMLFALRWYNFPPLVTDMIASYYSKLKFSITTKEGHSKTFSYNVGLFQGCCLSPIVFNIVINILVDKLTSNEKKWGYRFKFNNKYTESILAFADDLAILTRNPKHCQVLLDEVDRFCEWTDGLRTKPCKCHCLCLGRRSTRYTSYDPGLSLGGQCISTVTENAPFKFLGRKIDNIGRTPSLEGIVDSFLNDLNKVDSQQISNVKKAWIYDNYLTSRLNWPFLVYDFNKTLLSKLDAGVIKMLKLWLGLALTADSSALFRDRNSFGMSLKRPSELYKHLRVSKRYILGKSQDDVVTSLPKDKDAPELESRLQFHKQFMIGAQSNRVGLGSSRKVQDTDILKSFIRQDENDKYKIHAISLEMQNEWLDIGDFCIPLALKWRTLIHDWSPALLKFYLNAFQMTLPDQSNLVRWGKGTEKTCYICGKAVGTARHLLVGCKVLLDSGQYSRRHDRVLEIIREAVSLSVARAQKEITTNERSVGFVREGTRAIKINVKPYSILKAATDWTIMMDTYEKQYKIPEDICASASRPDIFMYSRILKRVVMIELTVPWETNIPKDHTIKVNKYYELTNELTRNRFVVDLYAVEVGARGITAKSLYNLLKDLGLSRTHINSFLERTSKAALVGSFQIWLGRERSLDSGGERLTRVS

SEQ ID NO: 19663 - protein, 991 aa, Danaus plexippus
MKQSTWKVHDDNLADLLEHPSSKQDLNSRVETFQNTIYDYFNEQYPPRNHYARKNKDNSFKIKMRRKKRELIKNLRIAKALGDNHLSHQLARALRSILKLFQGISAQTSKNRDNFDRAKQEVDFDKNPFEYSKTIFKKERGQLLLTNEQIYDHFKSTYEVPKSVRLYADPNDQKPGIPRFDFHGIPPTLDEISIQIKKKSSKSAPGPDGIPYIVFKKCPSVRKHLTYIYDKIWSRKQIPECFGKAIFVLIPKKDRVTDPKDTRPIALTNTISKIFFSVLQTRMTRFMLSNRYFRPNHQKGFLPGISGCLEHNTLLSESLKDARKSERQITVCWIDLENAFGSIQHELMLFALKWYNFPPLVTDMIASYYSKLKFSITTKEGHSKTFSYNVGLFQGCCLSPIVFNIVINILVDKLTSNEKKWGYRFKFNNKYTESILAFADDLAILTRNPKHCQVLLDEVDRFCEWTDGLRTKPCKCHCLCLGRRSTRYTSYDPGLSLGGQCISTVTENAPFKFLGRKIDNIGRTPSLEGIVDSFLNDLNKVDSQQISNVKKAWIYDNYLTSRLNWPFLVYDFSKTLLSKLDAGVIKMLKLWLGLALTADSSALFRDRNSFGMSLKRPSELYKHLRVSKRYILGKSQDDVVTSLPKDKDAPELESRLQFHKQFMIGAQSNRVGLGSSRKVQDTDILKSFIRQDENDKYKIHAISLEMQNEWLDIGDFCIPLALKWRTLIHDWSPALLKFYLNAFQMTLPDQSNLVRWGKGTEKTCYICGKAVGTARHLLVGCKVLLDSGQYSRRHDRVLEIIREAVSLSVARAQKEITTNERSVGFVREGTRAIKTNVKPYSILKAATDWTIMMDTYEKQYKIPEDICASASRPDIFMYSRILKRVVMIELTVPWETNIPKDHTIKVNKYYELTNELTRNRFVVDLYAVEVGARGITAKSLYNLLKDLGLSRTHINSFLERTSKAALVGSFQIWLGRERSLDSGGERLTRVS

SEQ ID NO: 19664 - protein, 991 aa, Danaus plexippus
MKQSTWKVHDDNLADLLEHPGSKQDLNSRVETFQNTIYDYFNEQYPPRNHYARKNKDNSFKIKMRRKKRELIKNLRIAKALGDNHLSHQLARALRSILKLIQGISAQTAENRDNFDRAKQEVDFDKNPFEYSKTIFKKERGQLLLTNEQIYDHFKSTYEVPKSVRLYADPNDQKPGIPRFDFHGIPPTLDEISIQIKKKSSKSAPGPDGIPYIVFKKCPSVRKHLTYIYDKIWSRKQIPECFGKAIFVLIPKKDRVTDPKDTRPIALTNTISKIFFSVLQTRMTRFMLSNRYFRPNHQKGFLPGISGCLEHNTLLSESLKDARKSERQITVCWIDLENAFGSIQHELMLFALRWYNFPPLVTDMIASYYSKLKFSITTKEGHSKTFSYNVGLFQGCCLSPIAFNIVINILVDKLISNEKKWGYRFKFNNKYTESILAFADDLAILTRNPKHCQVLLDEVDRFCEWTDGLRTKPCKCHCLCLGRRSTRYTSYDPGLSLGGQCISTVTENAPFKFLGRKIDNIGRTPSLEGIVDSFLNDLNKVDSQQISNVKKAWIYDNYLTSRLNWPFLVYDFNKTLLSKLDAGVIKMLKLWLGLALTADSSALFRDRNSFGMSLKRPSELYKHLRVSKRYILGKSQDDVVTSLPKDKDAPELESRLQFHKQFMIGAQSNRVGLGSSRKVQDTDILKSFIRQDENDKYKIHAISLEMQNEWLDIGDFCIPLALKWRTLIHDWSPALLKFYLNAFQMTLPDQSNLVRWGKGTEKTCYICGKAVGTARHLLVGCRVLLDSGQYSRRHDRVLEIIREAVSLSVARAQKEITTNERSVGFVREGTRAIKTNVKPYSILKAATDWTIMMDTYEKQYKIPEDICASASRPDIFMYSRILKRVVMIELTVPWETNIPKDHTIKVNKYYELTNELTRNRFVADLYAVEVGARGITAKSLYNLLKDLGLSRTHINSFLERTSKAALVGSFQIWLGRERSLDSGGERLTRVS

SEQ ID NO: 19665 - protein, 928 aa, Danaus plexippus
MRRKKRELIKNLRIAKALGDNHLSHQLARALRSILKLIQGISAQTAKNRDNFDRAKQEVDLDKNPFEYSKTIFKKERGQLLLTNEQIYDHFKSTYEVPKSVRLYADPNDQKPGIPRFDFHGIPPTLDEISIQIKKKSSKSAPGPDGIPYIVFKKCPSVRKHLTYIYDKIWSRKQMPECFGKAIFVLIPKKDRVTDPKDTRPIALTNTISKIFFSVLQTRMTRFMLSNRYFRPNHQKGFLPGISGCLEHNTLLSESLKDARKSERQITVCWIDLENAFGSVQHELMLFALRWYNFPPLVTDMIASYYSKLKFSITTKEGHSKTFSYNVGLFQGCCLSPIVFNIVINILVDKLTSNEKKWGYRFKFNNKYTESILAFADDLAILTRNPKHCQVLLDEVDRFCEWTDGLRTKPCKCHCLCLGRRSTRYTSYDPGLSLGGQCISTVTENAPFKFLGRKIDNIGRTPSLEGIVDSFLNDLNKVDSQQISNVKKAWIYDNYLTSRLNWPFLVYDFNKTLLSKLDAGVIKMLKLWLGLALTADSSALFRDRNSFGMSLKRPSELYKHLRVSKRYILGKSQDDVVTSLPKDKDAPELESRLQFHKQFMIGAQSNRVGLGSSRKVQDTDILKSFIRQDENDKYKIHAISLEMQNEWLDIGDFCIPLALKWRTLIHDWSPALLKFYLNAFQMTLPDQSNLVRWGKGTEKTCYICGKAVGTARHLLVGCRVLLDSGQYSRRHDRVLEIIREAVSLSVARAQKEITTNERSVGFVREGTRAIKTNVKPYSILKAATDWTIMMDTYEKQYKIPEDICASASRPDIFMYSRILKRVVMIELTVPWETNTPKDHTIKVNKYYELTNELTRNRFVVDLYAVEVGARGITAKSLYNLLKDLGLCRTHINSFLERTSKAALVGSFQIWLGRERSLDSGGERLTRVN

SEQ ID NO: 19666 - protein, 928 aa, Danaus chrysippus
MRKKKRELIKNLRIAKALGDNHLSHQLARALRSILKLIQGISAQTAEYRDNFDRAKQEVDFDKNPFEYSKTIFKKERGQLLLTNDQIYDHFKSTYEVPKSLRRYRDPNDQKPEFPRIEFHGIPPTLEELSSQIKRKSSKSAPGPDGIPYIVFKKCASVRKHLLNIYGKIWSRKQIPECFGKAIFVLIPKKDRVTDPKDTRPIALTNTISKIFFSVLQTRMTRFMLSNNYFRPNHQKGFLPGISGCLEHNTLLSESLKDARKSERQITVCWIDLENAFGSIQHELMLFALRWYNFPPLVRDMIASYYSKLRFSIITKEGPSKSLSYNVGLFQGCCLSPIAFNIVINILVDKLICNEKKWGYRFKFNNKYTESILAFADDLAILTRNPKHCQVLLDEVDKFCEWTDGLRTKPSKCHCLCLGRRNTRYTSYDPGLSLGGQCISTVTENAPFKFLGRKIDNIGRTPSLEGIVDSFLNDLNKVDSQLISNVKKAWIYENYLTSRLNWPFLVYDFNKTLLSKLDAGVIKMLKLWLGLALTADSSALFRGSNSFGMSLKRPSELYKHLRVSKRYILGKSHDDIVTSLPKDEDAPELESRLQFHKQFMIGAQSNRAGLGSNRKVQDADILKSFIRQDENDKYKIHAMNLEMQNEWLDIGDFCIPLALKWRTLIYDWSPALLKFYLNAFQMTLPDQSNLVRWGKSTEKTCYICGKAVGTAKHLLVGCKVLLDSGQYSRRHDRVLEVIREAVSLSVARAQKGITTNERSVGFVREGTRATKSNVKPYSILKAASDWTIMMDTYEKQYKIPEDICASASRPDIFLFSRILKRVVMIELTVPWETNIPKDHTIKVNKYYELTNELTRNRFVVDLYAVEVGARGITAKSLYNLLKDLGLSRTHINEFLERTSKAALVGSFQIWLGRERSLDSGGERITRVS

SEQ ID NO: 19667 - protein, 991 aa, Danaus plexippus
MKQSTWKVHDDNLADLLEHPGSKQELNSRVETFQNTIYDYFNEQYPPRNHYARKNKDNSFKIKMRRKKRELIKNLRIAKALGDNHLSHQLARALRSILKLIQGISAQTAENRDNFDRAKQEVDFDKNPFEYSKTIFKKERGQLLLTNEQIYDHFKSTYEVPKSVRLYADPNEQKPGIPRFDFHGIPPTLDEISIQIKKKSSKSAPGPDGIPYIVFKKCPSVRKHLTYIYDKIWSRKQIPECFGKAIFVLIPKKDRVTDPKDTRPIALTNTISKIFFSVLQTRMTRFMLSNRYFRPNHQKGFLPGISGCLEHNTLLSESLKDARKSERQITVCWIDLENAFGSIQHELMLFALRWYNFPPLVTDMIASYYSKLKFSITTKEGHSKTFSYNVGLFQGCCLSPIVFNIVINILVDRLTSNEKKWGYRFKFNNKYTESILAFADDLAILTRNPKHCQVLLDEVDRFCEWTDGLRTKPSKCHCLCLGRRSTRYTSYDPGLSLGGQCISTVTENAPFKFLGRKIDNIGRTPSLEGIVDSFLNDLNKVDSQQISNVKKAWIYDNYLTSRLNWPFLVYDFNKTLLSKLDAGVIKMLKLWLGLALTADSSALFRDRNSFGMSLKRPSELYKHLRVSKRYILGKSQDDVVTSLPKDKDAPELESRLQFHKQFMIGAQSNRVGLGSSRKVQDTDILKSFIRQDENDKYKIHAISLEMQNEWLDIGDFCIPLALKWRTLIHDWSPALLKFYLNAFQMTLPDQSNLVRWGKGTEKTCYICGKAVGTARHLLVGCKVLLDSGQYSRRHDRVLEIIREAVSLSVARAQKGITTNERSVGFVREGIRTIKTNVKPYSILKAAADWTIMMDTCEKQYKIPEDICASASRPDIFMYSRILKRVVMIELTVPWETNIPKDHTIKVNKYYELTNELTRNRFVVDLYAVEVGARGITAKSLYNLLKDLGLSRTHINSFLERTSKAALVGSFQIWLGRERSLDSGGERLTRIS

SEQ ID NO: 19668 - protein, 1141 aa, Danaus plexippus
MNILGRTCVLNISYQYILIFICLCVFVCHGLIYINKSLFIYYFFPVILMKKNTPRTVREGGRKICPPVDVNGENGANTDLKCPTCGKNYKRRAWYIKHLKTHNGVEARQSSVSSSTFTSDRVDPHVSHGEPLTGNYQESIDIRTRLSIPNMKQSTWKVHDDNLADLLEHPGSKQELNSRVETFQNTIYDYFNEQYPPRNHYARKNKDNSFKIKMRRKKRELIKNLRIAKALGDNHLSHQLARALRSILKLIQGISAQTAENRDNFDRAKQEVDFDKNPFEYSKTIFKKERGQLLLTNEQIYDHFKSTYEVPKSVRLYADPNEQKPGIPRFDFHGIPPTLDEINIQIKKKSSKSAPGPDGIPYIVFKKCPSVRKHLTYIYDKIWSRKQIPECFGKAIFVLIPKKDRVTDPKDTRPIALTNTISKIFFSVLQTRMTRFMLSNRYFRPNHQKGFLPGISGCLEHNTLLSESLKDARKSERQITVCWIDLENAFGSIQHELMLFALRWYNFPPLVIDMIASYYSKLKFSITTKEGHSKTFSYNVGLFQGCCLSPIVFNIVINILVDKLTSNEKKWGYRFKFNNKYTESILAFADDLAILTRNPKHCQVLLDEVDRFCEWTDGLRTKPSKCHCLCLGRRSTRYTSYDPGLSLGGQCISTVTENAPFKFLGRKIDNIGRTPSLEGIVDSFLNDLNKVDSQQISNVKKAWIYDNYLTSRLNWPFLVYDFNKTLLSKLDAGVIKMLKLWLGLALTADSSALFRDRNSFGMSLKRPSELYKHLRVSKRYILGKSQDDVVTSLPKDKDAPELESRLHFHKQFMIGAQSNRVGLGSSRKVQDTDILKSFIRQDENDKYKIHAISLEMQNEWLDIGDFCIPLALKWRTLIHDWSPALLKFYLNAFQMTLPDQSNLVRWGKGTEKTCYICGKAVGTARHLLVGCKVLLDSGQYSRRHDRVLEIIREAVSLSVARAQKGITTNERSVGFVREGIRTIKTNVKPYSILKAATDWTIMMDTCEKQYKIPEDICASASRPDIFMYSRILKRVVMIELTVPWETNIPKDHTIKVNKYYELTNELTRNRFVVDLYAVEVGARGITAKSLYNLLKDLGLSRTHINSFLERTSKAALVGSFQIWLGRERSLDSGGERLTRVS

SEQ ID NO: 19669 - protein, 991 aa, Danaus chrysippus
MKQSTWKVHDDNLAVLLEHPGSKQELNSQVETFQNTVYDYFNEQYPPRNHYARKNKENSFKIKMRKKKRELIKNLRIAKALGDNHLSHQLARALRSILKLIQGISAQTAEYRGNFDRAKQEVDFDKNPFEYSKTIFKKERGQLLLTNDQIYDHFKSTYEVPKSVRLYTDPNEQKPEIPHIDFHGIPPTLDEISSHIKRKSSKSAPGPDGIPYIVFKKCPSVRKHLINIYGKIWSRKQIPECFGKAIFVLIPKKDRVTDPKDTRPIALTNTISKIFFSVLQTRMTRFMLSNKYFRPNHQKGFLPGISGCLEHNTLLSESLKDARKSERQITVCWIDLENAFGSIQHELMLFALRWYNFPPLVRDMIASYYSKLRFSIITKEGPSKSLSYNVGLFQGCCLSPITFNIVINILVDKLICNEKKWGYRFKFNNKYTESILAFADDLAILTRHPKHCQVLLDEVDKFCEWTDGLRTKPSKCHCLCLGRRNTRYTSYDPGLSIGGQCVSTVTEDAPFKFLGRKIDNIGRTPSLEGIVDSFLNDLNKVDSQQISNVKKAWIYDNYLTSRLNWPFLVYDFSKTLLSKLDAGVIKMLKLWLGLALTADSSALFRDRNSFGMNLKRPSELYKHLRVSKRHILGKSHDDVVTSLPKDNDAPELESRLQFHKQFMIGAQNNRVGLGSSRKVQDTDILKSFIRQDENDKYKIHAMSLEMQNEWLDMGDFCIPLALKWRTLIHDWSPALLKFYLNAFQMTLPDQSNLVRWGKGTEKTCYICGKAVGTAKHLLVGCKVLLDSGQYSRRHDRVLEIIREAVSLSVARAQREITTNERSIGFVREGTRAIKSNVKPYSILKAASDWTIMMDTYEKQYKIPEDICASASRPDIFLYSRILKRVVMIELTVPWETNIPKDHAIKVNKYYELTNELTRNRFVVDLYAVEVGARGITAKSLYNLLKDLGLSRTNINSFLERTSKAALVGSFQIWLGRERNLDSGGERIARVS

SEQ ID NO: 19670 - protein, 991 aa, Danaus plexippus
MKQSTWKVHDDNLADLLEHPGSKQDFNSRVETFQNTIYDYFNEQYPPRNHYARKNKDNSFKIKMRRKKRELIKNLRIAKALGDNHLSHQLARALRSILKLIQGISAQTAKNRDIFDRAKQEVDFDKNPFEYSKTIFKKERGQLLLTNEQIYDHFKSTYEVPKSVRLYADPNDQKPGIPRFDFHGIPPTLDEISIQIKKKSSKSAPGPDGIPYIVFKKCPSVRKHLINIYDKIWSRKQIPECFGKAIFVLIPKKDRVTDPKDTRPIALTNTISKIFFSVLQTRMTRFMLSNRYFRPNHQKGFLPGISGCLEHNTLLSESLKDARKSERQITVCWIDLENAFGSIQHELMLFALRWYNFPPLVTDMIASYYSKLKFSITTKEGHSKTFSYNVGLFQGCCLSPIVFNIVINILVDKLTSNEKKWGYRFKFNNKYTESILAFADDLAILTRNPKHCQVLLDEVDRFCEWTDGLRTKPSKCHCLCLGRRSTRYTSYDPGLSLGGQCISTVTENAPFKFLGRKIDNIGRTPSLEGIVDSFLNDLNKVDSQQISNVKKAWIYDNYLTSRLNWPFLVYDFNKTLLSKLDAGVIKMLKLWLGLALTADSSALFRDRNSFGMSLKRPSELYKHLRVSKRYILGKSQDDVVTSLPKDKDAPELESRLQFHKQFMIGAQSNRVGLGSSRKVQDTDILKSFIRQDENDKYKIHAISLEMQNEWLDIGDFCIPLALKWRTLIHDWSPALLKFYLNAFQMTLPDQSNLVRWGKGTEKTCYICGRAVGTARHLLVGCKVLLDSGQYSRRHDRVLEIIREAVSLSVARAQKEITTNERSVGFVREGTRAIKTNVKPYSILKAATDWTIMMDTYEKQYKIPEDICASASRPDIFMYSRILKRVVMIELTVPWETNIPKDHTIKVNKYYELTNELTRNRFVVDLYAVEVGARGITAKSLYNLLKDLGLSRTHINSFLERISKAALVGSFQIWLGRERSLDSGGERLTRVS

SEQ ID NO: 19671 - protein, 928 aa, Danaus plexippus
MRRKKRELIKNLRIAKALGDNHLSHQLARALRSILKLIQGISAQTAKNRDNFDRAKQEVDFDKNPFEYSKTIFKKERGQLLLTNEQIYDHFKSTYEVPKSVRLYADPNDQKPGIPRFDFHGIPPTLDEISIQIKKKSSKSAPGPDGIPYIVFKKCPSVRKHLTYIYDKIWSRKQMPECFGKAIFVLIPKKDRVTDPKDTRPIALTNTISKIFFSVLQTRMTRFMLSNRYFRPNHQKGFLPGISGCLEHNTLLSESLKDARKSERQITVCWIDLENAFGSVQHELMLFALRWYNFPPLVTDMIASYYSKLKFSITTKEGHSKTFSYNVGLFQGCCLSPIVFNIVINILVDKLTSNEKKWGYRFKFNNKYTESILAFADDLAILTRNPKHCQVLLDEVDRFCEWTDGLRTKPCKCHCLCLGRRSTRYTSYDPGLSLGGQCISTVTENAPFKFLGRKIDNIGRTPSLEGIVDSFLNDLNKVDSQQISNVKKAWIYDNYLTSRLNWPFLVYDFNKTLLSKLDAGVIKMLKLWLGLALTADSSALFRDRNSFGMSLKRPSELYKHLRVSKRYILGKSQDDVVTSLPKDKDAPELESRLQFHKQFMIGAQSNRVGLGSSRKVQDTDILKSFIRQDENDKYKIHAISLEMQNEWLDIGDFCIPLALKWRTLIHDWSPALLKFYLNAFQMTLPDQSNLVRWGKGTEKTCYICGKAVGTARHLLVGCRVLLDSGQYSRRHDRVLEIIREAVSLSVARAQKEITTNERSVGFVREGTRAIKTNVKPYSILKAATDWTIMMDTYEKQYKIPEDICASASRPDIFMYSRILKRVVMIELTVPWETNTPKDHTIKVNKYYELTNELTRNRFVVDLYAVEVGARGITAKSLYNLLKDLGLCRTHINSFLERTSKAALVGSFQIWLGRERSLDSGGERLTRVN

SEQ ID NO: 19672 - protein, 709 aa, Danaus chrysippus
MTRFMLSNKYFRPNHQKGFLPGISGCLEHNTLLSESLKDARKSERQITVCWIDLENAFGSIQHELMLFALRWYNFPPLVRDMIASYYSKLRFSIITKEGPSKSLSYNVGLFQGCCLSPITFNIVINILVDKLICNEKKWGYRFKFNNKYTESILAFADDLAILTRHPKHCQVLLDEVDKFCEWTDGLRTKPSKCHCLCLGRRNTRYTSYDPGLSIGGQCVSTVTEDAPFKFLGRKIDNIGRTPSLEGIVDSFLNDLNKVDSQQISNVKKAWIYDNYLTSRLNWPFLVYDFSKTLLSKLDAGVIKMLKLWLGLALTADSSALFRDRNSFGMNLKRPSELYKHLRVSKRHILGKSHDDVVTSLPKDNDAPELESRLQFHKQFMIGAQNNRVGLGSSRKVQDTDILKSFIRQDENDKYKIHAMSLEMQNEWLDIGDFCIPLALKWRTLIHDWSPALLKFYLNAFQMTLPDQSNLVRWGKGTEKTCYICGKAVGTAKHLLVGCKVLLDSGQYSRRHDRVLEIIREAVSLSVARAQREITTNERSIGFVREGTRAIKSNVKPYSILKAASDWTIMMDTYEKQYKIPEDICASASRPDIFLYSRILKRVVMIELTVPWETNIPKDHAIKVNKYYELTNELTRNRFVVDLYAVEVGARGITAKSLYNLLKDLGLSRTNINSFLERTSKAALVGSFQIWLGRERNLDSGGERITRVS

SEQ ID NO: 19673 - protein, 992 aa, Danaus plexippus
MKQSTWKVHDDNLADLLEHPGSKQDLNSRVETFQNTIYDYFNEQYPPRNHYARKNKDNSFKIKMRRKKRELIKNLRIAKALGDNHLSHQLARALRSILKLIQGISAQTAKNRDNFDVEFYFEVDFDKNPFEYSKTIFKKERGQLLLTNEQIYDHFKSTYEVPKSVRLYADPNDQKPGIPRFDFHGIPPTLDEISIQIKKKSSKSAPGPDGIPYIVFKKCPSVRKHLTYIYDKIWSRKQIPECFGKAIFVLIPKKDRVTDPKDTRPIALTNTISKIFFSVLQTRMTRFMLSNRYFRPNHQKGFLPGISGCLEHNTLLSESLKDARKSERQITVCWIDLENAFGSIQHELMLFALRWYNFPPLVTDMIASYYSKLKFSITTKEGHSKTFSYNVGLFQGCCLSPIVFNIVINILVDKLTSNEKKWGYRFKFNNKYTESILAFADDLAILTRNPKHCQVLLDEVDRFCEWTDGLRTKPSKCHCLCLGRRSTRYTSYDPGLSLGGQCISTVTENAPFKFLGRKIDNIGRTPSLEGIVDSFLNDLNKVDSQQISNVKKAWIYDNYLTSRLNWPFLVYDFNKTLLSKLDAGVIKMLKLWLGLALTADSSALFRDRNSFGMSLKRPSELYKHLRVSKRYILGKSQDDVVTSLPKDKDAPELESRLQFHKQFMIGSQSNRVGLGSSRKVQDTDILKSFIRQDENDKYKIQAISLEMQNEWLDIGDFCIPLALKWRTLIHDWSPALLKFYLNAFQMTLPDQSNLVRWGKGTEKTCYICGKAVGTARHLLVGCRVLLDSGQYSRRHDRVLEIIREAVSLSVARAQKEITTNERSVGFVREGTRAIKTNVKPYSILKAATDWTIMMDTYEKQYKIPEDICASASRPDIFMYSRILKRVVMIELTVPWETNIPKDHTIKVNKYYELTNELTRNRFVVDLYAVEVGARGITAKSLYNLLKDLGLSRTHINSFLERTSKAALVGSFQIWLGRERSLDSGGERLTRVS

SEQ ID NO: 19674 - protein, 990 aa, Danaus plexippus
MKQSTWKVHDDNLADLLEHPGSKQELNSRVETFQNTIYDYFNEQYPPRNHYARKNKDNSFKIKMRRKKRELIKNLRIAKALGDNHLSHQLARALRSILKLIQGISAQTAENRDNFDRAKQEVDFDKNPFEYSKTIFKKERGQLLLTNEQIYDHFKSTYEVPKSVRLYADPNEQKPGIPRFDFHGIPPTLDEISIQIKKKSSKSAPGPDGIPYIVFKKCPSVRKHLTYIYDKIWSRKQIPECFGKAIFVLIPKKDRVKDPKDTRPIALTNTISKIFFSVLQTRMTRFMLSNRYFRPNHQKGFLPGISGCLEHNTLLSECLKDARKSERQITVCWIDLENAFGSIQHELMLFALRWYNFPPLVTDMIASYYSKLKFSITTKGHSKTFSYNVGLFQGCCLSPIVFNIVINILVDKLTSNEKKWGYRFKFNNKYTESILAFADDLAILTRNPKHCQVLLDEVDRFCEWTDGLRTKPSKCHCLCLGRRSTRYTSYDPGLSLGGQCISTVTENAPFKFLGRKIDNIGRTPSLEGIVDSFLNDLNKVDSQQISNVKKAWIYDNYLTSRLNWPFLVYDFNKTLFSKLDAGVIKMLKLWLGLALTADSSALFRDRNSFGMSLKRPSELYKHLRVSKRYILGKSQDDVVTSLPKDKDAPELESRLQFHKQFMIGAQSNRVGLGSSRKVQDTDILKSFIRQDENDKYKIHAISLEMQNEWLDIGDFCIPLALKWRTLIHDWSPALLKFYLNAFQMTLPDQSNLVRWGKGTEKTCYICGKAVGTARHLLVGCRVLLDSGQYSRRHDRVLEIIREAVSLSVARAQKGITTNERSVGFVREGIRTIKTNVKPYSILKAATDWTIMMDTCEKQYKIPEDICASASRPDIFMYSRILKRVVMIELTVPWETNIPKDHTIKVNKYYELTNELTRNRFVVDLYAVEVGARGITAKSLYNLLKDLGLSRTHINSFLERTSKAALVGSFQIWLGRERSLDSGGERLTRVS

SEQ ID NO: 19675 - protein, 832 aa, Danaus plexippus
MPKSVRLYADPNEQKPGIPRFDFHGIPPTLDEISIQIKKKSSKSAPGPDGIPYIVFKKCPSVRKHLTYIYDKIWSRKQIPECFGKAIFVLIPKKDRVTDPKDTRPIALTNTISKIFFSVLQTRMTRFMLSNRYFRPNHQKGFLPGISGCLEHNTLLSESLKDARKSERQITVCWIDLENAFGSIQHELMLFALRWYNFPPLVTDMIASYYSKLKFSITTKEGHSKTFSYNVGLFQGCCLSPIVFNIVINILVDKLTSNEKKWGYRFKFNNKYTESILAFADDLAILTRNPKHCQVLLDEVDRFCEWTDGLRTKPSKCHCLCLGRRSTRYTSYDPGLSLGGQCISTVTENAPFKFLGRKIDNIGRTPSLEGIVDSFLNDLNKVDSQQISNVKKAWIYDNYLTSRLNWPFLVYDFNKTLLSKLDAGVIKMLKLWLGLALTADSSALFRDRNSFGMSLKRPSELYKHLRVSKRYILGKSQDDVVTSLPKDKDAPELESRLQFHKQFMIGSQSNRVGLGSSRKVQDTDILKSFIRQDENDKYKIQAISLEMQNEWLDIGDFCIPLALKWRTLIHDWSPALLKFYLNAFQMTLPDQSNLVRWGKGTEKTCYICGKAVGTARHLLVGCKVLLDSGQYSRRHDRVLEIIREAVSLSVARAQKGITTNERSVGFVREGIRTIKTNVKPYSILKAATDWTIMMDTCEKQYKIPEDICASASRPDIFMYSRILKRVVMIELTVPWETNIPKDHTIKVNKYYELTNELTRNRFVVDLYAVEVGARGITAKSLYNLLKDLGLSRTHINSFLERTSKAALVGSFQIWLGRERSLDSGGERLTRVS

SEQ ID NO: 19676 - protein, 704 aa, Danaus plexippus
MTRFMLSNRYFRPNHQKGFLPGISGCLEHNTLLSESLKDARKSERQITVCWIDLENAFGSIQHELMLFALRWYNFPPLVTDIIASYYSKLKFSITTKEGHSKTFSYNVGLFQGCCLSPIVFNIVINILVDRLTSNEKKWGYRFKFNNKYTESILVFADDLAILTRNPKHCQVLLDEVDRFCEWTDGLRTKPSKCHCLCLGRRSTRYTSYDPGLSLGGQCISTVTENAPFKFLGRKIDNIGRTPSLEGIVDSFLNDLNKVDSQQISNVKKAWIYDNYLTSRLNWPFLVYDFNKTLLSKLDAGVIKMLKLWLGLALTADSSALFRDRNSFGMSLKRPSELYKHLRVSKRYILGKSQDDVVTSLPKDKDAPELESRLQFHKQFMIGAQSNRVGLGSSRKVQDTDILKSFIRQDENDKYKIHAISLEMQNEWLDIGDFCIPLALKWRTLIHDWSPALLKFYLNAFQMTLPDQSNLVRWGKGTEKTCYICGKAVGTARHLLVGCKVLLDSGQYSRRHDRVLEIIREAVSLSVARAQKGITTNERSVGFVREGIRTIKTNVKPYSILKAATDWTIMMDTCEKQYKIPEDICASASRPDIFMYSRILKRVVMIELTVPWETNIPKDHTIKVNKYYELTNELTRNRFVVDLYAVEVGARGITAKSLYNLLKDLGLSRTHINSFLERTSKAALVGSFQIWLGRERSLDSGGER

SEQ ID NO: 19677 - protein, 991 aa, Danaus plexippus
MKQSTWKVHDDNLADLLEHPGSKQELNSRVETFQNTIYDYFNEQYPPRNHYARKNKDNSFKIKMRRKKRELIKNLRIAKALGDNHLSHQLARALRSILKLIQGISARTAKNRDNFDRAKQEVDFDKNPFEYSKIIFKKERGQLLLTNEQIYDHFKSTYEVPKSVRLYADPNDQKPGIPRFDFHGIPPTLDEISIQIKKKSSKSAPGPDGIPYIVFKKCPSVRKHLTYIYDKIWSRKQIPECFGKAIFVLIPKKDRVTDPKDTRPIALTNTISKIFFSVLQTRMTPFMLSNRYFRPNHQKGFLPGISGCLEHNTLLSESLKDARKSERQITVCWIDLENAFGSIQHELMLFALRWYNFPPLVTDMIASYYSKLKFSITTKEGHSKTFSYNVGLFQGCCLSPIVFNIVINILVDKLSSNEKKWGYRFKFNNKYTESILAFADDLAILTRNPKHCQVLLDEVDRFCEWTDGLRTKPCKCHCLCLSRRSTRYTSYDPGLSLGGQCISTVTENAPFKFLGRKIDNIGRTPSLEGIVDSFLNDLNKVDSQQISNVKKAWIYDNYLTSRLNWPFLVYDFNKTLLSKLDAGVIKMLKLWLGLALTADSSALFRDRNSFGMSLKRPSELYKHLRVSKRYILGKSQDDVVTSLPKDKDAPELESRLQFHKQFMIGAQSNRVGLGSSRKVQDTDILKSFIRQDENDKYKIHAISLEMQNEWLDIGDFCIPLALKWRTLIHDWSPALLKFYLNAFQMTLPDQSNLVRWGKGTEKTCYICGKAVGTARHLLVGCKVLLDSGQYSRRHDRVLEIIREAVSLSVARAQKEITTNERSVGFVREGTRAIKTNVKPYSILKAATDWTIMMDTYEKQYKIPEDICASASRPDIFMYSRILKRVVMIELTVPWETNIPKDHTIKVNKYYELTNELTRNRFVVDLYAVEVGARGITAKSLYNLLKDLGLSRTHINSFLERTSKAALVGSFQIWLGRERSLDSGGERLTRVS

SEQ ID NO: 19678 - protein, 928 aa, Danaus chrysippus
MRKKKRELIKNLRIAKALGDNHLSHQLARALRSILKLIQGISAQTAEYRDNFVRAKQEVDFDKNPFEYSKTIFKKERGQLLLTNDQIYDHFKSTYEVPKSLRRYRDPNDQKPEFPRIEFHGIPPTLEELSSQIKRKSSKSAPGPDGIPYIVFKKCASVRKHLLNIYGKIWSRKQIPECFGKAIFVLIPKKDRVTDPKDTRPIALTNTISKIFFSVLQTRMTRFMLSNNYFRPNHQKGFLPGISGCLEHNTLLSESLKDARKSERQITVCWIDLENAFGSIQHELMLFALRWYNFPPLVRDMIASYYSKLRFSIITKEGPSKSLSYNVGLFQGCCLSPIAFNIVINILVDKLICNEKKWGYRFKFNNKYTESILAFADDLAILTRNPKHCQVLLDEVDKFCEWTDGLRTKPSKCHCLCLGRRNTRYTSYDPGLSLGGQCISTVTENAPFKFLGRKIDNIGRTPSLEGIVDSFLNDLNKVDSQLISNVKKAWIYENYLTSRLNWPFLVYDFNKTLLSKLDAGVIKMLKLWLGLALTADSSALFRGSNSFGMSLKRPSELYKHLRVSKRYILGKSHDDIVTSLPKDEDAPELESRLQFHKQFMIGAQSNRAGLGSNRKVQDADILKSFIRQDENDKYKIHAMNLEMQNEWLDIGDFCIPLALKWRTLIYDWSPALLKFYLNAFQMTLPDQSNLVRWGKSTEKTCYICGKAVGTAKHLLVGCKVLLDSGQYSRRHDRVLEVIREAVSLSVARAQKGITTNERSVGFVREGTRATKSNVKPYSILKAASDWTIMMDTYEKQYKIPEDICASASRPDIFLFSRILKRVVMIELTVPWETNIPKDHTIKVNKYYELTNELTRNRFVVDLYAVEVGARGITAKSLYNLLKDLGLSRTHINAFLERTSKAALVGSFQIWLGRERSLDSGGERITRVS

SEQ ID NO: 19679 - protein, 709 aa, Danaus plexippus
MTRFMLSNRYFRPNHQKGFLPGISGCLEHNTLLSESLKDARKSERQITVCWIDLENAFGSIQHELMLFALRWYNFPPLVTDMIASYYSKLKFSITTKEGHSKTFSYNVGLFQGCCLSPIVFNIVINILVDKLTSNEKKWGYRFKFNNKYTESILAFADDLAILTRNPKHCQVLLDEVDRFCEWTDGLRTKPSKCHCLCLGRRSTRYTSYDPGLSLGGQCISTVTENAPFKFLGRKIDNIGRTPSLEGIVDSFLNDLNKVDSQQISNVKKAWIYDNYLTSRLNWPFLVYDFNKTLLSKLDAGVIKMLKLWLGLALTADSSALFRDRNSFGMSLKRPSELYKHLRVSKRYILGKSQDDVVTSLPKDKDAPELESRLQFHKQFMIGAQSNRVGLGSSRKVQDTDILKSFIRQDENDKYKIHAISLEMQNEWLDIGDFCIPLALKWRTLIHDWSPALLKFYLNAFQMTLPDQSNLVRWGKGTEKTCYICGKAVGTARHLLVGCKVLLDSGQYSRRHDRVLEIIREAVSLSVARAQKGITTNERSVGFVREGTRAIKTNVKPYSILKAATDWTIMMDTCEKQYKIPEDICASASRPDIFMYSRILKRVVMIELTVPWETNIPKDHTIKVNKYYELTNELTRNRFVVDLYAVEVGARGITAKSLYNLLKDLGLSRTHINSFLERTSKAALVGSFQIWLGRERSLDSGGERLTRVS

SEQ ID NO: 19680 - protein, 991 aa, Danaus plexippus
MKQSTWKVHDDNLADLLEHPGSKQELNSRVETFQNTIYDYFNEQYPPRNHYARKNKDNSFKIKMRRKKRELIKNLRIAKALGDNHLSHQLARALRSILKLIQGISAQTAENRDNFDRAKQEVDFDKNPFEYSKTIFKKERGQLLLTNEQIYDHFKSTYEVPKSVRLYADPNEQKPGIPRFDFHGIPPTLDEISIQIKKKSSKSAPGPDGIPYIVFKKCPSVRKHLTYIYDKIWSRKQIPECFGKAIFVLIPKKDRVTDPKDTRPIALTNTISKIFFSVLQTRMTRFMLSNRYFRPNHQKGFLPGISGCLEHNTLLSESLKDARKSERQITVCWIDLENAFGSIQHELMLFALRWYNFPPLVTDMIASYYSKLKFSITTKEGHSKTFSYNVGLFQGCCLSPIVFNIVINILVDKLTSNEKKWGYRFKFNNKYTESILAFADDLAILTRNPKHCQVLLDEVDRFCEWTDGLRTKPSKCHCLCLGRRSTRYTSYDPGLSLGGQCISTVTENAPFKFLGRKIDNIGRTPSLEGIVDSFLNDLNKVDSQQISNVKKAWIYDNYLTSRLNWPFLVYDFNKTLLSKLDAGVIKMLKLWLGLALTADSSALFRDRNSFGMSLKRPSELYKHLRVSKRYILGKSQDDVVTSLPKDKDAPELESRLQFHKQFMIGAQSNRVGLGSSRKVQDTDILKSFIRQDENDKYKIHAISLEMQNEWLDIGDFCIPLALKWRTLIHDWSPALLKFYLNAFQMTLPDQSNLVRWGKGTEKTCYICGKAVGTARHLLVGCRVLLDSGQYSRRHDRVLEIIREAVSLSVARAQKGITTNERSVGFVREGIRTIKTNVKPYSILKAATDWTIMMDTCEKQYKIPEDICASASRPDIFMYSRILKRVVMIELTVPWETNIPKDHTIKVNKYYELTNELTRNRFVVDLYAVEVGARGITAKSLYNLLKDLGLSRTHINSFLERTSKAALVGSFQIWLGRERSLDSGGERLTRVS
